United States Patent Application Publication US 2009/0181380 A1 - sequence listing, part 5

SEQ ID NO: 8207 - DNA, 7546 bp, Homo sapiens
cgggcgccggggagagcgggcggccgggcggcaggcgggcgagcagcgatcgggcggccgagcgagcgagcaacgccggcgcagcgcggtgaccccagccccagccggcgcggagcaggagccggagccgagcggatctcggcgccctcgctgcgctcctcccggcccgagcctgccctacccggcggtggcggcggcgcgtcctccagcggcggcagcggcgctcgcagcgcccggactcacggcagctgtgttctgatttcgtactactgctggggctgccacctcctcctccagacgctctcagcagacttgagtcctggtccttctgcagaggcctgagcaggaggaagaggaggaggcccgttggcgtcggaccaatgctgcaaggggtgtgaggagaggagccgctgtttttcactgagctgccataccccgaaagcaggatggagctggagtgaggtggaggggccgcaagctgctgaccggcgtgtggaacactggtggtttgcagatcactgaggctggacaacgttcatggctctcgggtagaacctagtgaaacggccagaatgaattctatggacaggcacatccagcagaccaatgaccgactgcagtgcatcaagcagcacttacagaatcctgccaacttccacaatgccgccacggagctgctggactggtgcggagacccacgggccttccagcggcccttcgagcagagcctgatgggctgtttgacggtggtcagtcgggtggcagcccagcaaggctttgacctggacctcggctacagactgctggctgtgtgtgctgcaaaccgagacaagttcaccccgaagtctgccgccttgttgtcctcctggtgcgaagagctcggccgcctgctgctgctccgacatcagaagagccgccagagcgatccccctgggaaactccccatgcagccccctctcagctccatgagctccatgaaacccactctgtcgcacagtgatgggtcgttcccctatgactctgtcccttggcagcagaacaccaaccagcctcccggctccctttccgtggtcaccacggtttggggagtaaccaacacatcccagagccaggtccttgggaaccctatggccaatgccaacaaccccatgaatccaggcggcaaccccatggcgtcgggcatgaccaccagcaacccaggcctcaactccccacagtttgcggggcagcagcagcagttctcagccaaggctggccccgctcagccctacatccagcagagcatgtatggccggcccaactaccccggcagcgggggctttggggccagttaccctgggggtcctaacgcccccgcaggcatgggcatccctccgcacaccaggccgcctgctgacttcactcagcccgcggcagccgctgcagcagcggcagtggcagcagcagcagccacagctacagccacagccacggccactgtggcagccctgcaggagacacagaacaaggatataaaccagtatggaccgatgggtcccacccaggcgtataacagccaattcatgaaccagcccgggccgcgggggcctgcctccatggggggcagcatgaaccccgcgagcatggcggctggcatgacgccctcggggatgagcggccctcccatgggcatgaaccagccccggccgcccggcatcagcccctttggcacacacgggcagcggatgccccagcagacctacccgggcccccggccccagtcccttcctattcagaacataaagaggccataccctggagagcccaactatggaaaccagcaatatggaccaaacagccagttccccacccagccaggccagtacccagcccccaaccccccgaggccactcacctcccccaactacccaggacagaggatgcccagccagccgagctccgggcagtacccgccccccacggtcaacatggggcagtattacaagccagaacagtttaatggacaaaataacacgttctcgggaagcagctacagtaactacagccaagggaatgtcaacaggcctcccaggccggttcctgtggcaaattacccccactcacctgttccagggaaccccacaccccccatgacccctgggagcagcatccctccatacctgtcccccagccaagacgtcaaaccacccttcccgcctgacatcaagccaaatatgagcgctctgccaccacccccagccaaccacaatgacgagctgcggctcacattccctgtgcgggatggcgtggtgctggagcccttccgcctggagcacaacctggcggtcagcaaccatgtgttccacctgcggcccacggtccaccagacgctgatgtggaggtctgacctggagctgcagttcaagtgctaccaccacgaggaccggcagatgaacaccaactggcccgcctcggtgcaggtcagcgtgaacgccacgcccctcaccattgagcgcggcgacaacaagacctcccacaagcccctgcacctgaagcacgtgtgccagccgggccgcaacaccatccagatcaccgtcacggcctgctgctgctcccacctcttcgtgctgcagctggtacaccggccctccgtccgctctgtgctgcaaggactcctcaagaagcgcctcctgcccgcagagcactgtatcacgaaaatcaagcggaatttcagcagcgtggctgcctcctcgggcaacacgaccctcaacggggaggatggggtggagcagacggccatcaaggtgtctctgaagtgccccatcacattccggcgcatccagctgcctgctcgaggacacgattgcaagcatgtgcagtgctttgatctggagtcatacctgcagctgaattgcgagagagggacctggaggtgtcctgtgtgcaataaaaccgctctgctggagggcctggaggtggatcagtacatgtggggaatcctgaatgccatccaacactccgagtttgaagaggtcaccatcgatcccacgtgcagctggcggccggtgcccatcaagtcggacttacacatcaaggacgaccctgatggcatcccctccaagcggttcaagaccatgagtcccagccagatgatcatgcccaatgtcatggagatgatcgcagccctgggccccggcccgtccccctatcccctcccgcctcccccagggggcaccaactccaacgactacagcagccaaggcaacaactaccaaggccatggcaactttgacttcccccacgggaaccctggagggacatccatgaatgacttcatgcacgggcccccccagctctcccaccccccggacatgcccaacaacatggccgccctcgagaaacccctcagccaccccatgcaggaaactatgccacacgctggcagctctgaccagccccacccctccatacaacaaggtttgcacgtaccacaccccagcagccagtcagggcctccattacatcacagtggggctcctcctcctcctccttcccagcctccccggcagccgccacaggccgctcccagcagccatccacacagcgacctgacctttaacccctcctcagccttagagggtcaggccggagcgcagggagcgtccgacatgccggagccttcgctggatctccttcccgaactcacaaatcctgacgagctcctgtcttatctggacccccccgacctgccgagcaatagtaacgatgacctcctgtctctatttgagaacaactgagggccacccggtcggggccatccctccacactctgcatcctaccccacctacccaacacacttttccacctgggagcctgtgccctcagaccgccccgcaccagagccacgggctgtggggcggggagccctcccccgctgcagccctctcagaacagaggggtagggagggtgcaccagtgcaccaggaaggctgtgtgggtctggagcccacgtcccacctccacacccttggcttgggcccatgcccagcgcaggcctgaagaccaccctcccgagaggaaccagcccggtaagagggcacacgctgatgcggcttcccggtccctccgcgtgtgccgattccagatgaccttccagtgtccccaaggttcttccatcttctagactgtaaccctgcctccctgcttcctggtccagagcctccctccagtgactgtggagcctgagaaggcccccgggccccagcatgggccccgagccttggaggagcactggcagttggtggcagtgagaccagcccacccaccaccacccaccacagaaaagcacaaacctctgggaaagacaacgtctctcgggggccaggggtcatcggtttgacccctgacctataagccaagataccccataaacacactcagaaagcagagaaaaaggacaagagtctgtgtttgagagggggtctgccattcctgcttggggactggtggggaagagggccaggacatcttctgagccaggacgtccctgaggctccacctccaagctcagacagggcccaggcttggggaacagagagagcaggtgtacacccaaccaaagtgattgtgcccttggttggggggcgcgggcatataacctgtcagaagcaaacaggagcggcaacttctaactttgctccaagccactctctttttaaacagcaacaatttaaagctatgaagtcacctggagaaaaggaacgttgctcttggacagcaagcaaaccatttctctccgtctgttctgtttttctcctagtccctctcctgccacctctccaagacttccgtgggacacccacttccctctgtcctagttctctttgtccaatcagatggcaagggcagtgcgtggaaaggccggggaggtgcagaaaccagagcccagggcaatggtgtctgtccagcccctccctctgtccctgtgctccaagctgcccccggctgcagcccaggccatggacatgtgcaccagtatgtacctgcaggcatgggggggaggggggcgtgtttctgggcctgccccagacactgcccttggctgccagcctaccctgcctgcactcctccaccatcacaatctcacccaaactcctgctcactcaagcaaaagcagcctctggccttccctccaccgctttgctccatctggcttaccactctccagggcctcctggggagcctgtcctgtgttcactttgtttcaggctggtctgtgccccgtgagccacatggcctagggtgatgccaggttgtcccgtcactggggtcccatctgtaaattctttgcgcccttcccggctgctgcctggggccctttcctgctctcccgtccgctgtgggtggtccccagctctcctctgtgggttttaccggaaaggtggccccagctgttgacttccagtcactgtcccagacggcacaaggttttctgtaggaaagctgccattgccccggccccttttcttcctttgtcccgttgtcgaggttttttcaaatagcgtgttgttcagtatgcaaatcaattattttaagaatcgcttttgtaaatatctttgtgaatattttagtatcgtctttgataatattcaacattttcatgacctggttatagcctttgctggtgtttttaaaatacctggactcaatgacaaagaccgagtcttctttttttttaaacaaaaacaaaaaaagcaaccagggctatttgtacagttgaaggggtgaacagaatgggcggctgtgctgggagttggaagaccgggcagcccgctatttagagccatccctcagtcagctggcagggacaagccaacgccaggtagcatgtggccacccttgcccagtgtctgtggcctggcaagtggccacgccctgtgtcagaccatctgggaattaagctccagacagacttacagatgccttccttaggagttcttgcttcttgcgttgatactttgccccagaaaggcctgggattcattctggttcttatcagggtgtgtccacactctgctcacaggtggatccacggctttccagtgcggagagtcgagatgctccctgcagcccaggccccgggcacctcctgcaaccatctctgggctcagcacctgaggcgggtttcctgggtcccctctccagcaagcctccaccagcaagctcggcccagagcttcccttccggctggctctgaaccgtgcgtggtgcctacagcctgcagtctggagacaagctcttccggagtgctctgggagccaggccagggtgtgagggaggtgcagaggcatccggggcgggagcaagccccaggttgtgacaggtgcaggtagacaacgcccataaacagagatggtcctgaactctggagagatccttccctgatcctttcggacgactacttggagccataagtaacctcagcaaaaacgaggcctctgcaagccacttttccatgccaagcatccacccggcccacaggcatgtttctgccgccactccgcaagatggacagggagccagcaggcaggcgggaagggccaagtacaggcaatcacccccatcttcttggtttgaagctttatccatgtatcatgttccgtgtagccattttattttttaagaaactgctaatactttctccctaatggaagccctgatcccccagagagctacaggtctgctcccgacgggcctcgggcctgacccgtccacacagggccgtgtcaacagcagcgactcaagggacgtgtgtacatatgtaaatgagaaatagagacgtgtcaacagatgcattcatttctcttggaatgtgtattgtttttattttgcgaaacaaaacaaaacaaaaaaaaaagcttggaactccatcacgtggaaaaactagatcctgttggttatagcatttgtgagttctccacgtctgtctctctcgctcatgtaatatactctgaccctgagtggaaaggggtttttgttctgtttttattttacctacatgtactatttagcttcagtgtactagtcctgccacctgtgtatttttagggtgctatggaaataatgaaaagaaacggggatttcagaagaaaattgtaaccaaattcatactttgtataatttttgatatcatgatcacaggtgattcacacgtacacacataaacacacccaccagtgcagcctgaagtaactcccacagaaaccatcatcgtctttgtacatcgtatgtacaatgcaatcatttcatactttaaactggtcaaaaaactaattgtgatttctagtcttgcaaagctgtatgtagttagatgatgtgacaacctctaatatttatctaataaatatgtattcagatgaaacctgtatattaggtgttcatgtggttattttgtatttaaagatcaaattatttgactattgctagacatttctatactctgttgtaacactgaggtatctcatttgcccatgttaatttttttctaaataaattgacaaaaacaaa

SEQ ID NO: 8208 - protein, 1067 aa, Homo sapiens; identical to SEQ ID NO: 1182

SEQ ID NO: 8209 - DNA, 4911 bp, Homo sapiens
gcggccgccgccggccgggccccaagcccccgagggcgccagggcgggatcgcgaccggtgcaacttctagccttgttgtcctcctggtgcgaagagctcggccgcctgctgctgctccgacatcagaagagccgccagagcgatccccctgggaaactccccatgcagccccctctcagctccatgagctccatgaaacccactctgtcgcacagtgatgggtcgttcccctatgactctgtcccttggcagcagaacaccaaccagcctcccggctccctttccgtggtcaccacggtttggggagtaaccaacacatcccagagccaggtccttgggaaccctatggccaatgccaacaaccccatgaatccaggcggcaaccccatggcgtcgggcatgaccaccagcaacccaggcctcaactccccacagtttgcggggcagcagcagcagttctcagccaaggctggccccgctcagccctacatccagcagagcatgtatggccggcccaactaccccggcagcgggggctttggggccagttaccctgggggtcctaacgcccccgcaggcatgggcatccctccgcacaccaggccgcctgctgacttcactcagcccgcggcagccgctgcagcagcggcagtggcagcagcagcagccacagctacagccacagccacggccactgtggcagccctgcaggagacacagaacaaggatataaaccagtatggaccgatgggtcccacccaggcgtataacagccaattcatgaaccagcccgggccgcgggggcctgcctccatggggggcagcatgaaccccgcgagcatggcggctggcatgacgccctcggggatgagcggccctcccatgggcatgaaccagccccggccgcccggcatcagcccctttggcacacacgggcagcggatgccccagcagacctacccgggcccccggccccagtcccttcctattcagaacataaagaggccataccctggagagcccaactatggaaaccagcaatatggaccaaacagccagttccccacccagccaggccagtacccagcccccaaccccccgaggccactcacctcccccaactacccaggacagaggatgcccagccagccgagctccgggcagtacccgccccccacggtcaacatggggcagtattacaagccagaacagtttaatggacaaaataacacgttctcgggaagcagctacagtaactacagccaagggaatgtcaacaggcctcccaggccggttcctgtggcaaattacccccactcacctgttccagggaaccccacaccccccatgacccctgggagcagcatccctccatacctgtcccccagccaagacgtcaaaccacccttcccgcctgacatcaagccaaatatgagcgctctgccaccacccccagccaaccacaatgacgagctgcggctcacattccctgtgcgggatggcgtggtgctggagcccttccgcctggagcacaacctggcggtcagcaaccatgtgttccacctgcggcccacggtccaccagacgctgatgtggaggtctgacctggagctgcagttcaagtgctaccaccacgaggaccggcagatgaacaccaactggcccgcctcggtgcaggtcagcgtgaacgccacgcccctcaccattgagcgcggcgacaacaagacctcccacaagcccctgcacctgaagcacgtgtgccagccgggccgcaacaccatccagatcaccgtcacggcctgctgctgctcccacctcttcgtgctgcagctggtacaccggccctccgtccgctctgtgctgcaaggactcctcaagaagcgcctcctgcccgcagagcactgtatcacgaaaatcaagcggaatttcagcagcgtggctgcctcctcgggcaacacgaccctcaacggggaggatggggtggagcagacggccatcaaggtgtctctgaagtgccccatcacattccggcgcatccagctgcctgctcgaggacacgattgcaagcatgtgcagtgctttgatctggagtcatacctgcagctgaattgcgagagagggacctggaggtgtcctgtgtgcaataaaaccgctctgctggagggcctggaggtggatcagtacatgtggggaatcctgaatgccatccaacactccgagtttgaagaggtcaccatcgatcccacgtgcagctggcggccggtgcccatcaagtcggacttacacatcaaggacgaccctgatggcatcccctccaagcggttcaagaccatgagtcccagccagatgatcatgcccaatgtcatggagatgatcgcagccctgggccccggcccgtccccctatcccctcccgcctcccccagggggcaccaactccaacgactacagcagccaaggcaacaactaccaaggccatggcaactttgacttcccccacgggaaccctggagggacatccatgaatgacttcatgcacgggcccccccagctctcccaccccccggacatgcccaacaacatggccgccctcgagaaacccctcagccaccccatgcaggaaactatgccacacgctggcagctctgaccagccccacccctccatacaacaaggtttgcacgtaccacaccccagcagccagtcagggcctccattacatcacagtggggctcctcctcctcctccttcccagcctccccggcagccgccacaggccgctcccagcagccatccacacagcgacctgacctttaacccctcctcagccttagagggtcaggccggagcgcagggagcgtccgacatgccggagccttcgctggatctccttcccgaactcacaaatcctgacgagctcctgtcttatctggacccccccgacctgccgagcaatagtaacgatgacctcctgtctctatttgagaacaactgagggccacccggtcggggccatccctccacactctgcatcctaccccacctacccaacacacttttccacctgggagcctgtgccctcagaccgccccgcaccagagccacgggctgtggggcggggagccctcccccgctgcagccctctcagaacagaggggtagggagggtgcaccagtgcaccaggaaggctgtgtgggtctggagcccacgtcccacctccacacccttggcttgggcccatgcccagcgcaggcctgaagaccaccctcccgagaggaaccagcccggtaagagggcacacgctgatgcggcttcccggtccctccgcgtgtgccgattccagatgaccttccagtgtccccaaggttcttccatcttctagactgtaaccctgcctccctgcttcctggtccagagcctccctccagtgactgtggagcctgagaaggcccccgggccccagcatgggccccgagccttggaggagcactggcagttggtggcagtgagaccagcccacccaccaccacccaccacagaaaagcacaaacctctgggaaagacaacgtctctcgggggccaggggtcatcggtttgacccctgacctataagccaagataccccataaacacactcagaaagcagagaaaaaggacaagagtctgtgtttgagagggggtctgccattcctgcttggggactggtggggaagagggccaggacatcttctgagccaggacgtccctgaggctccacctccaagctcagacagggcccaggcttggggaacagagagagcaggtgtacacccaaccaaagtgattgtgcccttggttggggggcgcgggcatataacctgtcagaagcaaacaggagcggcaacttctaactttgctccaagccactctctttttaaacagcaacaatttaaagctatgaagtcacctggagaaaaggaacgttgctcttggacagcaagcaaaccatttctctccgtctgttctgtttttctcctagtccctctcctgccacctctccaagacttccgtgggacacccacttccctctgtcctagttctctttgtccaatcagatggcaagggcagtgcgtggaaaggccggggaggtgcagaaaccagagcccagggcaatggtgtctgtccagcccctccctctgtccctgtgctccaagctgcccccggctgcagcccaggccatggacatgtgcaccagtatgtacctgcaggcatgggggggaggggggcgtgtttctgggcctgccccagacactgcccttggctgccagcctaccctgcctgcactcctccaccatcacaatctcacccaaactcctgctcactcaagcaaaagcagcctctggccttccctccaccgctttgctccatctggcttaccactctccagggcctcctggggagcctgtcctgtgttcactttgtttcaggctggtctgtgccccgtgagccacatggcctagggtgatgccaggttgtcccgtcactggggtcccatctgtaaattctttgcgcccttcccggctgctgcctggggccctttcctgctctcccgtccgctgtgggtggtccccagctctcctctgtgggttttaccggaaaggtggccccagctgttgacttccagtcactgtcccagacggcacaaggttttctgtaggaaagctgccattgccccggccccttttcttcctttgtcccgttgtcgaggttttttcaaatagcgtgttgttcagtatgcaaatcaattattttaagaatcgcttttgtaaatatctttgtgaatattttagtatcgtctttgataatattcaacattttcatgacctggttatagcctttgctggtgtttttaaaatacctggactcaatgac

SEQ ID NO: 8210 - protein, 943 aa, Homo sapiens
MQPPLSSMSSMKPTLSHSDGSFPYDSVPWQQNTNQPPGSLSVVTTVWGVTNTSQSQVLGNPMANANNPMNPGGNPMASGMTTSNPGLNSPQFAGQQQQFSAKAGPAQPYIQQSMYGRPNYPGSGGFGASYPGGPNAPAGMGIPPHTRPPADFTQPAAAAAAAAVAAAAATATATATATVAALQETQNKDINQYGPMGPTQAYNSQFMNQPGPRGPASMGGSMNPASMAAGMTPSGMSGPPMGMNQPRPPGISPFGTHGQRMPQQTYPGPRPQSLPIQNIKRPYPGEPNYGNQQYGPNSQFPTQPGQYPAPNPPRPLTSPNYPGQRMPSQPSSGQYPPPTVNMGQYYKPEQFNGQNNTFSGSSYSNYSQGNVNRPPRPVPVANYPHSPVPGNPTPPMTPGSSIPPYLSPSQDVKPPFPPDIKPNMSALPPPPANHNDELRLTFPVRDGVVLEPFRLEHNLAVSNHVFHLRPTVHQTLMWRSDLELQFKCYHHEDRQMNTNWPASVQVSVNATPLTIERGDNKTSHKPLHLKHVCQPGRNTIQITVTACCCSHLFVLQLVHRPSVRSVLQGLLKKRLLPAEHCITKIKRNFSSVAASSGNTTLNGEDGVEQTAIKVSLKCPITFRRIQLPARGHDCKHVQCFDLESYLQLNCERGTWRCPVCNKTALLEGLEVDQYMWGILNAIQHSEFEEVTIDPTCSWRPVPIKSDLHIKDDPDGIPSKRFKTMSPSQMIMPNVMEMIAALGPGPSPYPLPPPPGGTNSNDYSSQGNNYQGHGNFDFPHGNPGGTSMNDFMHGPPQLSHPPDMPNNMAALEKPLSHPMQETMPHAGSSDQPHPSIQQGLHVPHPSSQSGPPLHHSGAPPPPPSQPPRQPPQAAPSSHPHSDLTFNPSSALEGQAGAQGASDMPEPSLDLLPELTNPDELLSYLDPPDLPSNSNDDLLSLFENN

SEQ ID NO: 8211 - DNA, 6624 bp, Homo sapiens
gcggccgccgccggccgggccccaagcccccgagggcgccagggcgggatcgcgaccggtgcaacttctagccttgttgtcctcctggtgcgaagagctcggccgcctgctgctgctccgacatcagaagagccgccagagcgatccccctgggaaactccccatgcagccccctctcagctccatgagctccatgaaacccactctgtcgcacagtgatgggtcgttcccctatgactctgtcccttggcagcagaacaccaaccagcctcccggctccctttccgtggtcaccacggtttggggagtaaccaacacatcccagagccaggtccttgggaaccctatggccaatgccaacaaccccatgaatccaggcggcaaccccatggcgtcgggcatgaccaccagcaacccaggcctcaactccccacagtttgcggggcagcagcagcagttctcagccaaggctggccccgctcagccctacatccagcagagcatgtatggccggcccaactaccccggcagcgggggctttggggccagttaccctgggggtcctaacgcccccgcaggcatgggcatccctccgcacaccaggccgcctgctgacttcactcagcccgcggcagccgctgcagcagcggcagtggcagcagcagcagccacagctacagccacagccacggccactgtggcagccctgcaggagacacagaacaaggatataaaccagtatggaccgatgggtcccacccaggcgtataacagccaattcatgaaccagcccgggccgcgggggcctgcctccatggggggcagcatgaaccccgcgagcatggcggctggcatgacgccctcggggatgagcggccctcccatgggcatgaaccagccccggccgcccggcatcagcccctttggcacacacgggcagcggatgccccagcagacctacccgggcccccggccccagtcccttcctattcagaacataaagaggccataccctggagagcccaactatggaaaccagcaatatggaccaaacagccagttccccacccagccaggccagtacccagcccccaaccccccgaggccactcacctcccccaactacccaggacagaggatgcccagccagccgagctccgggcagtacccgccccccacggtcaacatggggcagtattacaagccagaacagtttaatggacaaaataacacgttctcgggaagcagctacagtaactacagccaagggaatgtcaacaggcctcccaggccggttcctgtggcaaattacccccactcacctgttccagggaaccccacaccccccatgacccctgggagcagcatccctccatacctgtcccccagccaagacgtcaaaccacccttcccgcctgacatcaagccaaatatgagcgctctgccaccacccccagccaaccacaatgacgagctgcggctcacattccctgtgcgggatggcgtggtgctggagcccttccgcctggagcacaacctggcggtcagcaaccatgtgttccacctgcggcccacggtccaccagacgctgatgtggaggtctgacctggagctgcagttcaagtgctaccaccacgaggaccggcagatgaacaccaactggcccgcctcggtgcaggtcagcgtgaacgccacgcccctcaccattgagcgcggcgacaacaagacctcccacaagcccctgcacctgaagcacgtgtgccagccgggccgcaacaccatccagatcaccgtcacggcctgctgctgctcccacctcttcgtgctgcagctggtacaccggccctccgtccgctctgtgctgcaaggactcctcaagaagcgcctcctgcccgcagagcactgtatcacgaaaatcaagcggaatttcagcagcgtggctgcctcctcgggcaacacgaccctcaacggggaggatggggtggagcagacggccatcaaggtgtctctgaagtgccccatcacattccggcgcatccagctgcctgctcgaggacacgattgcaagcatgtgcagtgctttgatctggagtcatacctgcagctgaattgcgagagagggacctggaggtgtcctgtgtgcaataaaaccgctctgctggagggcctggaggtggatcagtacatgtggggaatcctgaatgccatccaacactccgagtttgaagaggtcaccatcgatcccacgtgcagctggcggccggtgcccatcaagtcggacttacacatcaaggacgaccctgatggcatcccctccaagcggttcaagaccatgagtcccagccagatgatcatgcccaatgtcatggagatgatcgcagccctgggccccggcccgtccccctatcccctcccgcctcccccagggggcaccaactccaacgactacagcagccaaggcaacaactaccaaggccatggcaactttgacttcccccacgggaaccctggagggacatccatgaatgacttcatgcacgggcccccccagctctcccaccccccggacatgcccaacaacatggccgccctcgagaaacccctcagccaccccatgcaggaaactatgccacacgctggcagctctgaccagccccacccctccatacaacaaggtttgcacgtaccacaccccagcagccagtcagggcctccattacatcacagtggggctcctcctcctcctccttcccagcctccccggcagccgccacaggccgctcccagcagccatccacacagcgacctgacctttaacccctcctcagccttagagggtcaggccggagcgcagggagcgtccgacatgccggagccttcgctggatctccttcccgaactcacaaatcctgacgagctcctgtcttatctggacccccccgacctgccgagcaatagtaacgatgacctcctgtctctatttgagaacaactgagggccacccggtcggggccatccctccacactctgcatcctaccccacctacccaacacacttttccacctgggagcctgtgccctcagaccgccccgcaccagagccacgggctgtggggcggggagccctcccccgctgcagccctctcagaacagaggggtagggagggtgcaccagtgcaccaggaaggctgtgtgggtctggagcccacgtcccacctccacacccttggcttgggcccatgcccagcgcaggcctgaagaccaccctcccgagaggaaccagcccggtaagagggcacacgctgatgcggcttcccggtccctccgcgtgtgccgattccagatgaccttccagtgtccccaaggttcttccatcttctagactgtaaccctgcctccctgcttcctggtccagagcctccctccagtgactgtggagcctgagaaggcccccgggccccagcatgggccccgagccttggaggagcactggcagttggtggcagtgagaccagcccacccaccaccacccaccacagaaaagcacaaacctctgggaaagacaacgtctctcgggggccaggggtcatcggtttgacccctgacctataagccaagataccccataaacacactcagaaagcagagaaaaaggacaagagtctgtgtttgagagggggtctgccattcctgcttggggactggtggggaagagggccaggacatcttctgagccaggacgtccctgaggctccacctccaagctcagacagggcccaggcttggggaacagagagagcaggtgtacacccaaccaaagtgattgtgcccttggttggggggcgcgggcatataacctgtcagaagcaaacaggagcggcaacttctaactttgctccaagccactctctttttaaacagcaacaatttaaagctatgaagtcacctggagaaaaggaacgttgctcttggacagcaagcaaaccatttctctccgtctgttctgtttttctcctagtccctctcctgccacctctccaagacttccgtgggacacccacttccctctgtcctagttctctttgtccaatcagatggcaagggcagtgcgtggaaaggccggggaggtgcagaaaccagagcccagggcaatggtgtctgtccagcccctccctctgtccctgtgctccaagctgcccccggctgcagcccaggccatggacatgtgcaccagtatgtacctgcaggcatgggggggaggggggcgtgtttctgggcctgccccagacactgcccttggctgccagcctaccctgcctgcactcctccaccatcacaatctcacccaaactcctgctcactcaagcaaaagcagcctctggccttccctccaccgctttgctccatctggcttaccactctccagggcctcctggggagcctgtcctgtgttcactttgtttcaggctggtctgtgccccgtgagccacatggcctagggtgatgccaggttgtcccgtcactggggtcccatctgtaaattctttgcgcccttcccggctgctgcctggggccctttcctgctctcccgtccgctgtgggtggtccccagctctcctctgtgggttttaccggaaaggtggccccagctgttgacttccagtcactgtcccagacggcacaaggttttctgtaggaaagctgccattgccccggccccttttcttcctttgtcccgttgtcgaggttttttcaaatagcgtgttgttcagtatgcaaatcaattattttaagaatcgcttttgtaaatatctttgtgaatattttagtatcgtctttgataatattcaacattttcatgacctggttatagcctttgctggtgtttttaaaatacctggactcaatgacaaagaccgagtcttctttttttttaaacaaaaacaaaaaaagcaaccagggctatttgtacagttgaaggggtgaacagaatgggcggctgtgctgggagttggaagaccgggcagcccgctatttagagccatccctcagtcagctggcagggacaagccaacgccaggtagcatgtggccacccttgcccagtgtctgtggcctggcaagtggccacgccctgtgtcagaccatctgggaattaagctccagacagacttacagatgccttccttaggagttcttgcttcttgcgttgatactttgccccagaaaggcctgggattcattctggttcttatcagggtgtgtccacactctgctcacaggtggatccacggctttccagtgcggagagtcgagatgctccctgcagcccaggccccgggcacctcctgcaaccatctctgggctcagcacctgaggcgggtttcctgggtcccctctccagcaagcctccaccagcaagctcggcccagagcttcccttccggctggctctgaaccgtgcgtggtgcctacagcctgcagtctggagacaagctcttccggagtgctctgggagccaggccagggtgtgagggaggtgcagaggcatccggggcgggagcaagccccaggttgtgacaggtgcaggtagacaacgcccataaacagagatggtcctgaactctggagagatccttccctgatcctttcggacgactacttggagccataagtaacctcagcaaaaacgaggcctctgcaagccacttttccatgccaagcatccacccggcccacaggcatgtttctgccgccactccgcaagatggacagggagccagcaggcaggcgggaagggccaagtacaggcaatcacccccatcttcttggtttgaagctttatccatgtatcatgttccgtgtagccattttattttttaagaaactgctaatactttctccctaatggaagccctgatcccccagagagctacaggtctgctcccgacgggcctcgggcctgacccgtccacacagggccgtgtcaacagcagcgactcaagggacgtgtgtacatatgtaaatgagaaatagagacgtgtcaacagatgcattcatttctcttggaatgtgtattgtttttattttgcgaaacaaaacaaaacaaaaaaaaaagcttggaactccatcacgtggaaaaactagatcctgttggttatagcatttgtgagttctccacgtctgtctctctcgctcatgtaatatactctgaccctgagtggaaaggggtttttgttctgtttttattttacctacatgtactatttagcttcagtgtactagtcctgccacctgtgtatttttagggtgctatggaaataatgaaaagaaacggggatttcagaagaaaattgtaaccaaattcatactttgtataatttttgatatcatgatcacaggtgattcacacgtacacacataaacacacccaccagtgcagcctgaagtaactcccacagaaaccatcatcgtctttgtacatcgtatgtacaatgcaatcatttcatactttaaactggtcaaaaaactaattgtgatttctagtcttgcaaagctgtatgtagttagatgatgtgacaacctctaatatttatctaataaatatgtattcagatgaaacctgt

SEQ ID NO: 8212 - protein, 943 aa, Homo sapiens; identical to SEQ ID NO: 8210

SEQ ID NO: 8213 - DNA, 6765 bp, Homo sapiens
gcggccgccgccggccgggccccaagcccccgagggcgccagggcgggatcgcgaccggtgcaacttctagccttgttgtcctcctggtgcgaagagctcggccgcctgctgctgctccgacatcagaagagccgccagagcgatccccctgggaaactccccatgcagccccctctcagctccatgagctccatgaaacccactctgtcgcacagtgatgggtcgttcccctatgactctgtcccttggcagcagaacaccaaccagcctcccggctccctttccgtggtcaccacggtttggggagtaaccaacacatcccagagccaggtccttgggaaccctatggccaatgccaacaaccccatgaatccaggcggcaaccccatggcgtcgggcatgaccaccagcaacccaggcctcaactccccacagtttgcggggcagcagcagcagttctcagccaaggctggccccgctcagccctacatccagcagagcatgtatggccggcccaactaccccggcagcgggggctttggggccagttaccctgggggtcctaacgcccccgcaggcatgggcatccctccgcacaccaggccgcctgctgacttcactcagcccgcggcagccgctgcagcagcggcagtggcagcagcagcagccacagctacagccacagccacggccactgtggcagccctgcaggagacacagaacaaggatataaaccagtatggaccgatgggtcccacccaggcgtataacagccaattcatgaaccagcccgggccgcgggggcctgcctccatggggggcagcatgaaccccgcgagcatggcggctggcatgacgccctcggggatgagcggccctcccatgggcatgaaccagccccggccgcccggcatcagcccctttggcacacacgggcagcggatgccccagcagacctacccgggcccccggccccagtcccttcctattcagaacataaagaggccataccctggagagcccaactatggaaaccagcaatatggaccaaacagccagttccccacccagccaggccagtacccagcccccaaccccccgaggccactcacctcccccaactacccaggacagaggatgcccagccagccgagctccgggcagtacccgccccccacggtcaacatggggcagtattacaagccagaacagtttaatggacaaaataacacgttctcgggaagcagctacagtaactacagccaagggaatgtcaacaggcctcccaggccggttcctgtggcaaattacccccactcacctgttccagggaaccccacaccccccatgacccctgggagcagcatccctccatacctgtcccccagccaagacgtcaaaccacccttcccgcctgacatcaagccaaatatgagcgctctgccaccacccccagccaaccacaatgacgagctgcggctcacattccctgtgcgggatggcgtggtgctggagcccttccgcctggagcacaacctggcggtcagcaaccatgtgttccacctgcggcccacggtccaccagacgctgatgtggaggtctgacctggagctgcagttcaagtgctaccaccacgaggaccggcagatgaacaccaactggcccgcctcggtgcaggtcagcgtgaacgccacgcccctcaccattgagcgcggcgacaacaagacctcccacaagcccctgcacctgaagcacgtgtgccagccgggccgcaacaccatccagatcaccgtcacggcctgctgctgctcccacctcttcgtgctgcagctggtacaccggccctccgtccgctctgtgctgcaaggactcctcaagaagcgcctcctgcccgcagagcactgtatcacgaaaatcaagcggaatttcagcagcgtggctgcctcctcgggcaacacgaccctcaacggggaggatggggtggagcagacggccatcaaggtgtctctgaagtgccccatcacattccggcgcatccagctgcctgctcgaggacacgattgcaagcatgtgcagtgctttgatctggagtcatacctgcagctgaattgcgagagagggacctggaggtgtcctgtgtgcaataaaaccgctctgctggagggcctggaggtggatcagtacatgtggggaatcctgaatgccatccaacactccgagtttgaagaggtcaccatcgatcccacgtgcagctggcggccggtgcccatcaagtcggacttacacatcaaggacgaccctgatggcatcccctccaagcggttcaagaccatgagtcccagccagatgatcatgcccaatgtcatggagatgatcgcagccctgggccccggcccgtccccctatcccctcccgcctcccccagggggcaccaactccaacgactacagcagccaaggcaacaactaccaaggccatggcaactttgacttcccccacgggaaccctggagggacatccatgaatgacttcatgcacgggcccccccagctctcccaccccccggacatgcccaacaacatggccgccctcgagaaacccctcagccaccccatgcaggaaactatgccacacgctggcagctctgaccagccccacccctccatacaacaaggtttgcacgtaccacaccccagcagccagtcagggcctccattacatcacagtggggctcctcctcctcctccttcccagcctccccggcagccgccacaggccgctcccagcagccatccacacagcgacctgacctttaacccctcctcagccttagagggtcaggccggagcgcagggagcgtccgacatgccggagccttcgctggatctccttcccgaactcacaaatcctgacgagctcctgtcttatctggacccccccgacctgccgagcaatagtaacgatgacctcctgtctctatttgagaacaactgagggccacccggtcggggccatccctccacactctgcatcctaccccacctacccaacacacttttccacctgggagcctgtgccctcagaccgccccgcaccagagccacgggctgtggggcggggagccctcccccgctgcagccctctcagaacagaggggtagggagggtgcaccagtgcaccaggaaggctgtgtgggtctggagcccacgtcccacctccacacccttggcttgggcccatgcccagcgcaggcctgaagaccaccctcccgagaggaaccagcccggtaagagggcacacgctgatgcggcttcccggtccctccgcgtgtgccgattccagatgaccttccagtgtccccaaggttcttccatcttctagactgtaaccctgcctccctgcttcctggtccagagcctccctccagtgactgtggagcctgagaaggcccccgggccccagcatgggccccgagccttggaggagcactggcagttggtggcagtgagaccagcccacccaccaccacccaccacagaaaagcacaaacctctgggaaagacaacgtctctcgggggccaggggtcatcggtttgacccctgacctataagccaagataccccataaacacactcagaaagcagagaaaaaggacaagagtctgtgtttgagagggggtctgccattcctgcttggggactggtggggaagagggccaggacatcttctgagccaggacgtccctgaggctccacctccaagctcagacagggcccaggcttggggaacagagagagcaggtgtacacccaaccaaagtgattgtgcccttggttggggggcgcgggcatataacctgtcagaagcaaacaggagcggcaacttctaactttgctccaagccactctctttttaaacagcaacaatttaaagctatgaagtcacctggagaaaaggaacgttgctcttggacagcaagcaaaccatttctctccgtctgttctgtttttctcctagtccctctcctgccacctctccaagacttccgtgggacacccacttccctctgtcctagttctctttgtccaatcagatggcaagggcagtgcgtggaaaggccggggaggtgcagaaaccagagcccagggcaatggtgtctgtccagcccctccctctgtccctgtgctccaagctgcccccggctgcagcccaggccatggacatgtgcaccagtatgtacctgcaggcatgggggggaggggggcgtgtttctgggcctgccccagacactgcccttggctgccagcctaccctgcctgcactcctccaccatcacaatctcacccaaactcctgctcactcaagcaaaagcagcctctggccttccctccaccgctttgctccatctggcttaccactctccagggcctcctggggagcctgtcctgtgttcactttgtttcaggctggtctgtgccccgtgagccacatggcctagggtgatgccaggttgtcccgtcactggggtcccatctgtaaattctttgcgcccttcccggctgctgcctggggccctttcctgctctcccgtccgctgtgggtggtccccagctctcctctgtgggttttaccggaaaggtggccccagctgttgacttccagtcactgtcccagacggcacaaggttttctgtaggaaagctgccattgccccggccccttttcttcctttgtcccgttgtcgaggttttttcaaatagcgtgttgttcagtatgcaaatcaattattttaagaatcgcttttgtaaatatctttgtgaatattttagtatcgtctttgataatattcaacattttcatgacctggttatagcctttgctggtgtttttaaaatacctggactcaatgacaaagaccgagtcttctttttttttaaacaaaaacaaaaaaagcaaccagggctatttgtacagttgaaggggtgaacagaatgggcggctgtgctgggagttggaagaccgggcagcccgctatttagagccatccctcagtcagctggcagggacaagccaacgccaggtagcatgtggccacccttgcccagtgtctgtggcctggcaagtggccacgccctgtgtcagaccatctgggaattaagctccagacagacttacagatgccttccttaggagttcttgcttcttgcgttgatactttgccccagaaaggcctgggattcattctggttcttatcagggtgtgtccacactctgctcacaggtggatccacggctttccagtgcggagagtcgagatgctccctgcagcccaggccccgggcacctcctgcaaccatctctgggctcagcacctgaggcgggtttcctgggtcccctctccagcaagcctccaccagcaagctcggcccagagcttcccttccggctggctctgaaccgtgcgtggtgcctacagcctgcagtctggagacaagctcttccggagtgctctgggagccaggccagggtgtgagggaggtgcagaggcatccggggcgggagcaagccccaggttgtgacaggtgcaggtagacaacgcccataaacagagatggtcctgaactctggagagatccttccctgatcctttcggacgactacttggagccataagtaacctcagcaaaaacgaggcctctgcaagccacttttccatgccaagcatccacccggcccacaggcatgtttctgccgccactccgcaagatggacagggagccagcaggcaggcgggaagggccaagtacaggcaatcacccccatcttcttggtttgaagctttatccatgtatcatgttccgtgtagccattttattttttaagaaactgctaatactttctccctaatggaagccctgatcccccagagagctacaggtctgctcccgacgggcctcgggcctgacccgtccacacagggccgtgtcaacagcagcgactcaagggacgtgtgtacatatgtaaatgagaaatagagacgtgtcaacagatgcattcatttctcttggaatgtgtattgtttttattttgcgaaacaaaacaaaacaaaaaaaaaagcttggaactccatcacgtggaaaaactagatcctgttggttatagcatttgtgagttctccacgtctgtctctctcgctcatgtaatatactctgaccctgagtggaaaggggtttttgttctgtttttattttacctacatgtactatttagcttcagtgtactagtcctgccacctgtgtatttttagggtgctatggaaataatgaaaagaaacggggatttcagaagaaaattgtaaccaaattcatactttgtataatttttgatatcatgatcacaggtgattcacacgtacacacataaacacacccaccagtgcagcctgaagtaactcccacagaaaccatcatcgtctttgtacatcgtatgtacaatgcaatcatttcatactttaaactggtcaaaaaactaattgtgatttctagtcttgcaaagctgtatgtagttagatgatgtgacaacctctaatatttatctaataaatatgtattcagatgaaacctgtatattaggtgttcatgtggttattttgtatttaaagatcaaattatttgactattgctagacatttctatactctgttgtaacactgaggtatctcatttgcccatgttaatttttttctaaataaattgacaaaaacaaa

SEQ ID NO: 8214 - protein, 943 aa, Homo sapiens; identical to SEQ ID NO: 8210

SEQ ID NO: 8215 - DNA, 1598 bp, Homo sapiens
tgcggcgcgcggctgcgcgggactcggccttctgggcgcgcgcgacgtcagtttgagttctgtgttctccccgcccgtgtcccgcccgacccgcgcccgcgatgctggcgctgcgctgcggctcccgctggctcggcctgctctccgtcccgcgctccgtgccgctgcgcctccccgcggcccgcgcctgcagcaagggctccggcgacccgtcctcttcctcctcctccgggaacccgctcgtgtacctggacgtggacgccaacgggaagccgctcggccgcgtggtgctggagctgaaggcagatgtcgtcccaaagacagctgagaacttcagagccctgtgcactggtgagaagggcttcggctacaaaggctccaccttccacagggtgatcccttccttcatgtgccaggcgggcgacttcaccaaccacaatggcacaggcgggaagtccatctacggaagccgctttcctgacgagaactttacactgaagcacgtggggccaggtgtcctgtccatggctaatgctggtcctaacaccaacggctcccagttcttcatctgcaccataaagacagactggttggatggcaagcatgttgtgttcggtcacgtcaaagagggcatggacgtcgtgaagaaaatagaatctttcggctctaagagtgggaggacatccaagaagattgtcatcacagactgtggccagttgagctaatctgtggccagggtgctggcatggtggcagctgcaaatgtccatgcacccaggtggccgcgttgggctgtcagccaaggtgcctgaaacgatacgtgtgcccactccactgtcacagtgtgcctgaggaaggctgctagggatgttagacctcggccaggacccaccacattgcttcctaatacccacccttcctcacgacctcatttctgggcatctttgtggacatgatgtcacccaccccttgtcaagcattgcctgtgattgcccagcccagattcatctgtgccttggacatggtgatggtgatgggttgccatccaagtgaaagtcttttccttgaccaagggggacagtcagttttgcaaaaggactctaatacctgtttaatattgtcttcctaattgggataatttaattaacaagattgactagaagtgaaactgcaacactaacttccccgtgctgtggtgtgacctgagttggtgacacaggccacagaccccagagcttggcttttgaaacacaactcagggcttttgtgaaggttcccccgctgagatctttcctcctggttactgtgaagcctgttggtttgctgctgtcgtttttgaggagggcccatgggggtaggagcagttgaacctgggaacaaacctcacttgagctgtgcctagacaatgtgaattcctgtgttgctaacagaagtggcctgtaagctcctgtgctccggagggaagcatttcctggtaggctttgatttttctgtgtgttaaagaaattcaatctactcatgatgtgttatgcataaaacatttctggaacatggatttgtgttcaccttaaatgtgaaaataaatcctattttctatgg

SEQ ID NO: 8216 - protein, 207 aa, Homo sapiens; identical to SEQ ID NO: 1184

SEQ ID NO: 8217 - DNA, 2220 bp, Homo sapiens
tgcggcgcgcggctgcgcgggactcggccttctgggcgcgcgcgacgtcagtttgagttctgtgttctccccgcccgtgtcccgcccgacccgcgcccgcgatgctggcgctgcgctgcggctcccgctggctcggcctgctctccgtcccgcgctccgtgccgctgcgcctccccgcggcccgcgcctgcagcaagggctccggcgacccgtcctcttcctcctcctccgggaacccgctcgtgtacctggacgtggacgccaacgggaagccgctcggccgcgtggtgctggagctgaaggcagatgtcgtcccaaagacagctgagaacttcagagccctgtgcactggtgagaagggcttcggctacaaaggctccaccttccacagggtgatcccttccttcatgtgccaggcgggcgacttcaccaaccacaatggcacaggcgggaagtccatctacggaagccgctttcctgacgagaactttacactgaagcacgtggggccaggtgtcctgtccatggctaatgctggtcctaacaccaacggctcccagttcttcatctgcaccataaagacagactggttggatggcaagcatgttgtgttcggtcacgtcaaagagggcatggacgtcgtgaagaaaatagaatctttcggctctaagagtgggaggacatccaagaagattgtcatcacagactgtggccagttgagctaatctgtggccagggtgctggcatggtggcagctgcaaatgtccatgcacccaggtggccgcgttgggctgtcagccaaggtgcctgaaacgatacgtgtgcccactccactgtcacagtgtgcctgaggaaggctgctagggatgttagacctcggccaggacccaccacattgcttcctaatacccacccttcctcacgacctcatttctgggcatctttgtggacatgatgtcacccaccccttgtcaagcattgcctgtgattgcccagcccagattcatctgtgccttggacatggtgatggtgatgggttgccatccaagtgaaagtcttttccttgaccaagggggacagtcagttttgcaaaaggactctaatacctgtttaatattgtcttcctaattgggataatttaattaacaagattgactagaagtgaaactgcaacactaacttccccgtgctgtggtgtgacctgagttggtgacacaggccacagaccccagagcttggcttttgaaacacaactcagggcttttgtgaaggttcccccgctgagatctttcctcctggttactgtgaagcctgttggtttgctgctgtcgtttttgaggagggcccatgggggtaggagcagttgaacctgggaacaaacctcacttgagctgtgcctagacaatgtgaattcctgtgttgctaacagaagtggcctgtaagctcctgtgctccggagggaagcatttcctggtaggctttgatttttctgtgtgttaaagaaattcaatctactcatgatgtgttatgcataaaacatttctggaacatggatttgtgttcaccttaaatgtgaaaataaatcctattttctatggaagactggtacctggtttctggaagaggggtctgtgacttggagctgatctttactgagctcgccgtggcagatgccatgctcaggacgttcatgtggatggtttcatgtcatcgtgctggcaacttgtcctccctgccttagagatgaggctcagacaaacgaccttagcacccatagcctatgccatgagcactggctccaccctgaatcccagctcctccccttagtgaccccaagtctgtttccctcagctgcataaggaggcgatatagtttgaatatttgtccccagccaaatctcatgttgaactgtaatccccagtgctggaggtggggcctgctacgaggtgtttggatcatggggacgggtatttcatggcttggtgctgttttcttgatggtgaattattgcaagatacggtcatttaaaattgtgtggcacctccccctgcccccttcttgctcctgctttcaccatgtgacatgcctgatcccccttcaccttttgccatggtcataagcttcctgaggcctccctggaagctgagcagatgccagcaccatgcttcctgtacatcctgcagaaccataagccaattaaacctttttaataataaatta

SEQ ID NO: 8218 - protein, 207 aa, Homo sapiens; identical to SEQ ID NO: 1184

SEQ ID NO: 8219 - DNA, 625 bp, Homo sapiens
actcggccttctgggcgcgcgcgacgtcagtttgagttctgtgttctccccgcccgtgtcccgcccgacccgcgcccgcgatgctggcgctgcgctgcggctcccgctggctcggcctgctctccgtcccgcgctccgtgccgctgcgcctccccgcggcccgcgcctgcagcaagggctccggcgacccgtcctcttcctcctcctccgggaacccgctcgtgtacctggacgtggacgccaacgggaagccgctcggccgcgtggtgctggagctgaaggcagatgtcgtcccaaagacagctgagaacttcagagccctgtgcactggtgagaagggcttcggctacaaaggctccaccttccacagggtgatcccttccttcatgtgccaggcgggcgacttcaccaaccacaatggcacaggcgggaagtccatctacggaagccgctttcctgacgagaactttacactgaagcacgtggggccaggtgagtgggggcctcctctagggtgagtgtccccacagctctgacctggcctggaagccccagcaggccctgagaggccacatgcagtcaccgtccagtatctgatgagtctccttcctccctgcgacactgt

SEQ ID NO: 8220 - protein, 145 aa, Homo sapiens
MLALRCGSRWLGLLSVPRSVPLRLPAARACSKGSGDPSSSSSSGNPLVYLDVDANGKPLGRVVLELKADVVPKTAENFRALCTGEKGFGYKGSTFHRVIPSFMCQAGDFTNHNGTGGKSIYGSRFPDENFTLKHVGPGEWGPPLG

SEQ ID NO: 8221 - DNA, 1639 bp, Homo sapiens
actcggccttctgggcgcgcgcgacgtcagtttgagttctgtgttctccccgcccgtgtcccgcccgacccgcgcccgcgatgctggcgctgcgctgcggctcccgctggctcggcctgctctccgtcccgcgctccgtgccgctgcgcctccccgcggcccgcgcctgcagcaagggctccggcgacccgtcctcttcctcctcctccgggaacccgctcgtgtacctggacgtggacgccaacgggaagccgctcggccgcgtggtgctggagctgaaggcagatgtcgtcccaaagacagctgagaacttcagagccctgtgcactggtgagaagggcttcggctacaaaggctccaccttccacagggtgatcccttccttcatgtgccaggcgggcgacttcaccaaccacaatggcacaggcgggaagtccatctacggaagccgctttcctgacgagaactttacactgaagcacgtggggccaggtgtcctgtccatggctaatgctggtcctaacaccaacggctcccagttcttcatctgcaccataaagacagactggtccatggcattggatgacattgcgctacactgttgctcacccgggtcacccgtcctcacaggttggatggcaagcatgttgtgttcggtcacgtcaaagagggcatggacgtcgtgaagaaaatagaatctttcggctctaagagtgggaggacatccaagaagattgtcatcacagactgtggccagttgagctaatctgtggccagggtgctggcatggtggcagctgcaaatgtccatgcacccaggtggccgcgttgggctgtcagccaaggtgcctgaaacgatacgtgtgcccactccactgtcacagtgtgcctgaggaaggctgctagggatgttagacctcggccaggacccaccacattgcttcctaatacccacccttcctcacgacctcatttctgggcatctttgtggacatgatgtcacccaccccttgtcaagcattgcctgtgattgcccagcccagattcatctgtgccttggacatggtgatggtgatgggttgccatccaagtgaaagtcttttccttgaccaagggggacagtcagttttgcaaaaggactctaatacctgtttaatattgtcttcctaattgggataatttaattaacaagattgactagaagtgaaactgcaacactaacttccccgtgctgtggtgtgacctgagttggtgacacaggccacagaccccagagcttggcttttgaaacacaactcagggcttttgtgaaggttcccccgctgagatctttcctcctggttactgtgaagcctgttggtttgctgctgtcgtttttgaggagggcccatgggggtaggagcagttgaacctgggaacaaacctcacttgagctgtgcctagacaatgtgaattcctgtgttgctaacagaagtggcctgtaagctcctgtgctccggagggaagcatttcctggtaggctttgatttttctgtgtgttaaagaaattcaatctactcatgatgtgttatgcataaaacatttctggaacatggatttgtgttcaccttaaatgtgaaaataaatcctattttctatgg

SEQ ID NO: 8222 - protein, 201 aa, Homo sapiens
MLALRCGSRWLGLLSVPRSVPLRLPAARACSKGSGDPSSSSSSGNPLVYLDVDANGKPLGRVVLELKADVVPKTAENFRALCTGEKGFGYKGSTFHRVIPSFMCQAGDFTNHNGTGGKSIYGSRFPDENFTLKHVGPGVLSMANAGPNTNGSQFFICTIKTDWSMALDDIALHCCSPGSPVLTGWMASMLCSVTSKRAWTS

SEQ ID NO: 8223 - DNA, 1501 bp, Homo sapiens
actcggccttctgggcgcgcgcgacgtcagtttgagttctgtgttctccccgcccgtgtcccgcccgacccgcgcccgcgatgctggcgctgcgctgcggctcccgctggctcggcctgctctccgtcccgcgctccgtgccgctgcgcctccccgcggcccgcgcctgcagcaagggctccggcgacccgtcctcttcctcctcctccgggaacccgctcgtgtacctggacgtggacgccaacgggaagccgctcggccgcgtggtgctggagctgaaggcagatgtcgtcccaaagacagctgagaacttcagagccctgtgcactggtgagaagggcttcggctacaaaggctccaccttccacagggtgatcccttccttcatgtgccaggcgggcgacttcaccaaccacaatggcacaggcgggaagtccatctacggaagccgctttcctgacgagaactttacactgaagcacgtggggccaggttggatggcaagcatgttgtgttcggtcacgtcaaagagggcatggacgtcgtgaagaaaatagaatctttcggctctaagagtgggaggacatccaagaagattgtcatcacagactgtggccagttgagctaatctgtggccagggtgctggcatggtggcagctgcaaatgtccatgcacccaggtggccgcgttgggctgtcagccaaggtgcctgaaacgatacgtgtgcccactccactgtcacagtgtgcctgaggaaggctgctagggatgttagacctcggccaggacccaccacattgcttcctaatacccacccttcctcacgacctcatttctgggcatctttgtggacatgatgtcacccaccccttgtcaagcattgcctgtgattgcccagcccagattcatctgtgccttggacatggtgatggtgatgggttgccatccaagtgaaagtcttttccttgaccaagggggacagtcagttttgcaaaaggactctaatacctgtttaatattgtcttcctaattgggataatttaattaacaagattgactagaagtgaaactgcaacactaacttccccgtgctgtggtgtgacctgagttggtgacacaggccacagaccccagagcttggcttttgaaacacaactcagggcttttgtgaaggttcccccgctgagatctttcctcctggttactgtgaagcctgttggtttgctgctgtcgtttttgaggagggcccatgggggtaggagcagttgaacctgggaacaaacctcacttgagctgtgcctagacaatgtgaattcctgtgttgctaacagaagtggcctgtaagctcctgtgctccggagggaagcatttcctggtaggctttgatttttctgtgtgttaaagaaattcaatctactcatgatgtgttatgcataaaacatttctggaacatggatttgtgttcaccttaaatgtgaaaataaatcctattttctatgg

SEQ ID NO: 8224 - protein, 155 aa, Homo sapiens
MLALRCGSRWLGLLSVPRSVPLRLPAARACSKGSGDPSSSSSSGNPLVYLDVDANGKPLGRVVLELKADVVPKTAENFRALCTGEKGFGYKGSTFHRVIPSFMCQAGDFTNHNGTGGKSIYGSRFPDENFTLKHVGPGWMASMLCSVTSKRAWTS

SEQ ID NO: 8225 - DNA, 2123 bp, Homo sapiens
actcggccttctgggcgcgcgcgacgtcagtttgagttctgtgttctccccgcccgtgtcccgcccgacccgcgcccgcgatgctggcgctgcgctgcggctcccgctggctcggcctgctctccgtcccgcgctccgtgccgctgcgcctccccgcggcccgcgcctgcagcaagggctccggcgacccgtcctcttcctcctcctccgggaacccgctcgtgtacctggacgtggacgccaacgggaagccgctcggccgcgtggtgctggagctgaaggcagatgtcgtcccaaagacagctgagaacttcagagccctgtgcactggtgagaagggcttcggctacaaaggctccaccttccacagggtgatcccttccttcatgtgccaggcgggcgacttcaccaaccacaatggcacaggcgggaagtccatctacggaagccgctttcctgacgagaactttacactgaagcacgtggggccaggttggatggcaagcatgttgtgttcggtcacgtcaaagagggcatggacgtcgtgaagaaaatagaatctttcggctctaagagtgggaggacatccaagaagattgtcatcacagactgtggccagttgagctaatctgtggccagggtgctggcatggtggcagctgcaaatgtccatgcacccaggtggccgcgttgggctgtcagccaaggtgcctgaaacgatacgtgtgcccactccactgtcacagtgtgcctgaggaaggctgctagggatgttagacctcggccaggacccaccacattgcttcctaatacccacccttcctcacgacctcatttctgggcatctttgtggacatgatgtcacccaccccttgtcaagcattgcctgtgattgcccagcccagattcatctgtgccttggacatggtgatggtgatgggttgccatccaagtgaaagtcttttccttgaccaagggggacagtcagttttgcaaaaggactctaatacctgtttaatattgtcttcctaattgggataatttaattaacaagattgactagaagtgaaactgcaacactaacttccccgtgctgtggtgtgacctgagttggtgacacaggccacagaccccagagcttggcttttgaaacacaactcagggcttttgtgaaggttcccccgctgagatctttcctcctggttactgtgaagcctgttggtttgctgctgtcgtttttgaggagggcccatgggggtaggagcagttgaacctgggaacaaacctcacttgagctgtgcctagacaatgtgaattcctgtgttgctaacagaagtggcctgtaagctcctgtgctccggagggaagcatttcctggtaggctttgatttttctgtgtgttaaagaaattcaatctactcatgatgtgttatgcataaaacatttctggaacatggatttgtgttcaccttaaatgtgaaaataaatcctattttctatggaagactggtacctggtttctggaagaggggtctgtgacttggagctgatctttactgagctcgccgtggcagatgccatgctcaggacgttcatgtggatggtttcatgtcatcgtgctggcaacttgtcctccctgccttagagatgaggctcagacaaacgaccttagcacccatagcctatgccatgagcactggctccaccctgaatcccagctcctccccttagtgaccccaagtctgtttccctcagctgcataaggaggcgatatagtttgaatatttgtccccagccaaatctcatgttgaactgtaatccccagtgctggaggtggggcctgctacgaggtgtttggatcatggggacgggtatttcatggcttggtgctgttttcttgatggtgaattattgcaagatacggtcatttaaaattgtgtggcacctccccctgcccccttcttgctcctgctttcaccatgtgacatgcctgatcccccttcaccttttgccatggtcataagcttcctgaggcctccctggaagctgagcagatgccagcaccatgcttcctgtacatcctgcagaaccataagccaattaaacctttttaataataaatta

SEQ ID NO: 8226 - protein, 155 aa, Homo sapiens; identical to SEQ ID NO: 8224

SEQ ID NO: 8227 - DNA, 2261 bp, Homo sapiens
actcggccttctgggcgcgcgcgacgtcagtttgagttctgtgttctccccgcccgtgtcccgcccgacccgcgcccgcgatgctggcgctgcgctgcggctcccgctggctcggcctgctctccgtcccgcgctccgtgccgctgcgcctccccgcggcccgcgcctgcagcaagggctccggcgacccgtcctcttcctcctcctccgggaacccgctcgtgtacctggacgtggacgccaacgggaagccgctcggccgcgtggtgctggagctgaaggcagatgtcgtcccaaagacagctgagaacttcagagccctgtgcactggtgagaagggcttcggctacaaaggctccaccttccacagggtgatcccttccttcatgtgccaggcgggcgacttcaccaaccacaatggcacaggcgggaagtccatctacggaagccgctttcctgacgagaactttacactgaagcacgtggggccaggtgtcctgtccatggctaatgctggtcctaacaccaacggctcccagttcttcatctgcaccataaagacagactggtccatggcattggatgacattgcgctacactgttgctcacccgggtcacccgtcctcacaggttggatggcaagcatgttgtgttcggtcacgtcaaagagggcatggacgtcgtgaagaaaatagaatctttcggctctaagagtgggaggacatccaagaagattgtcatcacagactgtggccagttgagctaatctgtggccagggtgctggcatggtggcagctgcaaatgtccatgcacccaggtggccgcgttgggctgtcagccaaggtgcctgaaacgatacgtgtgcccactccactgtcacagtgtgcctgaggaaggctgctagggatgttagacctcggccaggacccaccacattgcttcctaatacccacccttcctcacgacctcatttctgggcatctttgtggacatgatgtcacccaccccttgtcaagcattgcctgtgattgcccagcccagattcatctgtgccttggacatggtgatggtgatgggttgccatccaagtgaaagtcttttccttgaccaagggggacagtcagttttgcaaaaggactctaatacctgtttaatattgtcttcctaattgggataatttaattaacaagattgactagaagtgaaactgcaacactaacttccccgtgctgtggtgtgacctgagttggtgacacaggccacagaccccagagcttggcttttgaaacacaactcagggcttttgtgaaggttcccccgctgagatctttcctcctggttactgtgaagcctgttggtttgctgctgtcgtttttgaggagggcccatgggggtaggagcagttgaacctgggaacaaacctcacttgagctgtgcctagacaatgtgaattcctgtgttgctaacagaagtggcctgtaagctcctgtgctccggagggaagcatttcctggtaggctttgatttttctgtgtgttaaagaaattcaatctactcatgatgtgttatgcataaaacatttctggaacatggatttgtgttcaccttaaatgtgaaaataaatcctattttctatggaagactggtacctggtttctggaagaggggtctgtgacttggagctgatctttactgagctcgccgtggcagatgccatgctcaggacgttcatgtggatggtttcatgtcatcgtgctggcaacttgtcctccctgccttagagatgaggctcagacaaacgaccttagcacccatagcctatgccatgagcactggctccaccctgaatcccagctcctccccttagtgaccccaagtctgtttccctcagctgcataaggaggcgatatagtttgaatatttgtccccagccaaatctcatgttgaactgtaatccccagtgctggaggtggggcctgctacgaggtgtttggatcatggggacgggtatttcatggcttggtgctgttttcttgatggtgaattattgcaagatacggtcatttaaaattgtgtggcacctccccctgcccccttcttgctcctgctttcaccatgtgacatgcctgatcccccttcaccttttgccatggtcataagcttcctgaggcctccctggaagctgagcagatgccagcaccatgcttcctgtacatcctgcagaaccataagccaattaaacctttttaataataaatta

SEQ ID NO: 8228 - protein, 201 aa, Homo sapiens; identical to SEQ ID NO: 8222

SEQ ID NO: 8229 - DNA, 811 bp, Homo sapiens
cgcgcgacgtcagtttgagttctgtgttctccccgcccgtgtcccgcccgacccgcgcccgcgatgctggcgctgcgctgcggctcccgctggctcggcctgctctccgtcccgcgctccgtgccgctgcgcctccccgcggcccgcgcctgcagcaagggctccggcgacccgtcctcttcctcctcctccgggaacccgctcgtgtacctggacgtggacgccaacgggaagccgctcggccgcgtggtgctggagctgaaggcagatgtcgtcccaaagacagctgagaacttcagagccctgtgcactggtgagaagggcttcggctacaaaggctccaccttccacagggtgatcccttccttcatgtgccaggtaatgtagtttcctcttctgtaaggggggatgagagcaggagctgccttgtgggtgtgtgaagatgcctggtatgaggaaggtgctgagcagagcagctgcagttgctctgtcagccaggctgccctccctgcattagccctgtatccaggcttcactgcacatggaagcccagccccaacccgctgccactccaggtcagtggcaggccctgcccgggggactgggaggtggagtctatcaagagagagctgggttgggagatggatgtgctgggggtggccttgaagactttgaagagccagcatattccagtggtctctgaccttgtcccctgtgtgcccctgagcactggtgtgggagataagagagggagagagagaagtggaggaggcggaggaggaagacaggtccagggcaggaacacacacgc

SEQ ID NO: 8230 - protein, 107 aa, Homo sapiens [sequence omitted]

SEQ ID NO: 8231 - DNA, 509 bp, Homo sapiens
aaagcccagcacccaagtggcccaagcctggcaaaaactagcctctgttacatgcccagaggtgtgcagaagcagtggccaggacttggactctgtccacttctcaagcctgtgtgctgtctactcatggaactatttgcattggaaggatctttagggatcatctaggtcaggaatgccaactcaagtcatgtgtgcctgctgcccccggccatggcagggcaggcaccacgaaaatcacaccattcttgccgtccgacctcctccgcccccatgcggtgaccccgtccgtgtctgtgtctgtccatacgtgtgagtccagctaaaaagacaaaacagaacccgtgggcccagctcggaaggtgcgtggagaaggctccgacgtctccgaagtgcagcccttgggatggcattccgttgtgtgccttattcctggagaatctgtatacggctcgcctatagaaatatagcctcttcatgctgtattaaaaggacttttaaaagcaaaa

SEQ ID NO: 8232 - protein, 46 aa, Homo sapiens
MPTQVMCACCPRPWQGRHHENHTILAVRPPPPPCGDPVRVCVCPYV

SEQ ID NO: 8233 - DNA, 4618 bp, Homo sapiens
acccatctgtggccttcacttcctccccttgtgggggttttctctgcaaagatgcaagaggtgtgttcgggggaggacacacatgggggtcactttccttccagacctgggcacaccggcgctgagcaacagtgtgtacaagggcgcctcaccctatggctccctcaacaacatcgccgatggcctcagctccctcaccgagcacttctcagacctgaccctcacctccgaggctcgcaagcccagcaagcggcccccacccaactacctgtgccacctgtgcttcaacaaaggacactacatcaaggactgcccccaggcacgccccaaaggcgagggcctgactccataccagggcaaaaagcgctgcttcggcgagtacaagtgtcccaagtgcaagagaaaatggatgagcgggaactcctgggccaacatggggcaggagtgcatcaagtgccacatcaacgtgtatccacacaagcagagacccctggagaagcccgacggcctggacgtgtccgaccagagcaaggagcacccgcagcacctctgcgagaagtgcaaggtcctgggctactactgccgtcgcgtgcagtgacgggctgcccgcccgcacccagagccaccccccgccagcccgaggagacgctgcttccctgtgctactccgaggggctgcgtgtcgccctgtgcatggggtgccctcgcaggcctgcggggctgggccgggggctcttagcgtccttgtcttgtgtgtgttgacaaacagtgttactgacattgctgccccccacaggccagggaaagcagggagtctggggctttttgcaggcgggcctggggtctcagtggaggggacaaaggcaagcaaaagcccatgtccaggagccctgggtgtccccacaggctcgcctctgagagcctctttggggtgagcagccttgtattggccacaggtgcactaaattgactgtgaatcccaaacctccccagaccagccaggccgcctgcccccacccagaaccttccggtttgccctgtatggaaagccactctcagaaatccctctttcctgagtcagcaatcgtggcaaggggacatgtgttccaacagcggctggggagtggacctctctgtcccttgcccaccttaagccccaaatccagaccccctctgacatcactggcattgcacctgggtgtgcccccctccccacgctatggacccagataggaggggttaggcatgggggaggcacagaatgctggagagatgcgtcctggtgaacgtggggcagcccctcccacgacccccaccagactgccttaggttttgtcagccccactccctttccttcccctctgcctcccacccactctgggggtccacatcaagatagctgggcccagtgtggaagcccagcgtgtctgttccagcagaaaggacacaagcctggtgttctggagacctcggctcaagtctttgccctgctgccgacgcattgtgtcaccttgggcaaggacttcgcatctccaggcctcagtttccccattagttaaatgacagcataacactagagagcagagggcccatttcagctctgttgttctgggattcaggctggccggtgctgtgtcctggagctttatttggggagtttcacccagaatggtgggagaaacctcccaggtgccaggtaccccgcatcgtgacccttcacttggtgtcttaggaagtcaagctgagggatgctgagtcctcccctgctggcccctgcagccccagccctgcttttcatcccccacccctgcaaacatggaggagccccctccttctcacctcggtctcctagcccctgacatggagaaccctgagacaagccacagaacccctcttttctaaaatggagacaataatttcctacctcccaagggagcagagaggcctcgtggcacgtccgtggccagggagcccactgtcctggctggcggcgggatcgtgcgctcctctgtctcccggatgagaagccccgtttccatggtcttgacccttcctttctcccggctgtcagaactgggtctcttgattttgcccctacattatgcctctgtgggaaaaaaaaaaaatcagaccaagaaatgagcctgaaattcagtgtttaccatggctcaaggatgcccatctggtgtccagttgccttttgtattcaaatgaaaatgctttgtacaactgaggagttacagtgaagtgttaaccaggggtccagggagcgagttgaaaagatggagtgagtgtatttgcagccagggagctgcagggtggatttgaggggccataccctctgagcacttaaaaaaggtatttgctccaggccaggcagcaggctgtggacacccttgccaccactggggactgccactgaggactccccgagcacgttgttccccgtcttctccaaggtgttgaggtgagctggggttggccccggcccaggcttctgtcccaaggagaagctgccactgacagtcatcctaccgcactgctaaagagaatgttcgcagtggtgggcggcgtgcctgtgccaacccttccagggacccggccatgggggaccttggcccaaggatgcctggggcctgccagctgtgctgcaaaggtggggggcccacaccctaaaactaacccaggccccagaccactggaggccagggcttccctgcacgggctaaggggagttgggatatcaccccaaagtgaccttgccagtgagctgttcagcaggtagccactgccctgccatctgtgcagagccagccaccttgggggctggggttcccgctttgaggcccaccttccatactccccttgactcggctctggctgaactggggaactctcttgtggtcagcaaagcccctgccatgcaggccaggtgccattgagaattaagtgctcagagggccaggagcccaggggatgggaaagtgtgtggttttagtacgttcaaaagggacaatcgcttgcagttggtagatctagcgatctagttgggagataatggtgtttaccccatatgaagtattcaatagttctacttgtgaatttgtatttattttgagttatacttgacacagaattccttttttaaaaaaatatgtgtgtattttggaaaaaaaattcatagatgttaaaatttctgcatggttaccagtttttctcacaacactgaatttggtagcttttcccgaaaaaatcttcacagtaattttttgtctgtatatatttgagggcctttttttaaaaaaaaaaaaagaaaagaaaaatataattgtttgatttttgagattaaaacaaacaaaaagagaggcattttcaaaatttcagaactttcaggagggcaagagaatatcaaacaaagatttctggaagtattttgccaaccttctggttgagctgcaagaaaatatttatggtgagaacttttctgtttcccgttattgggtttttggttggtttttgtttgttttttactatgctttggtctgtaaaaatatgcaactgaactacattcagaaggaaatattgtctacatagaatattatatgaagttggtacataattctgatgaggaaaaaaaatctttgcaattctttaagccatattgttgtttttctgtgttgttttccctggatgaaaatatcagtattaagtagacagcatattattcaagtgtttagacttattaatatgttcttgtcctgtatttatacatatgtgtattttggaaagtattgccttttttaagggaagctataattcgatacatagtgaaaaagggaatggtgacccctttgtgcctcttccactgaggataacaaacagcattgtaatccattctcttgcaccttcttcttcttatcttgttattacggttttattaattttgtagagggacagggagtgggcaaggggaagaagcagcttatttgactaaccagcccctctgtggtccaccagcgtcttggcttggtgggagggctctcaatcagcagggccccaggagggaagaagaagtggggcaaagcctggcctcgccgctcgggagctttgccatctgagccacgcctcctccaggccatgctccttgaacttggaaatgtcaaccggagcccttacaccagccctccagcatctaatagacttgaatctactctaaacgaatatttaatccaacctcactacattgtagctcagtccaacgactaaccctgaaatgggggtgttccagccttcagcgagatggccaagcggtcccctgggggctgtggcagcgggcttatccttctctgttgccaaccttgccgtccgacctcctccgcccccatgcggtgaccccgtccgtgtctgtgtctgtccatacgtgtgagtccagctaaaaagacaaaacagaacccgtgggcccagctcggaaggtgcgtggagaaggctccgacgtctccgaagtgcagcccttgggatggcattccgttgtgtgccttattcctggagaatctgtatacggctcgcctatagaaatatagcctcttcatgctgtattaaaaggacttttaaaagcaaaa

SEQ ID NO: 8234 - protein, 228 aa, Homo sapiens
MQEVCSGEDTHGGHFPSRPGHTGAEQQCVQGRLTLWLPQQHRRWPQLPHRALLRPDPHLRGSQAQQAAPTQLPVPPVLQQRTLHQGLPPGTPQRRGPDSIPGQKALLRRVQVSQVQEKMDERELLGQHGAGVHQVPHQRVSTQAETPGEARRPGRVRPEQGAPAAPLREVQGPGLLLPSRAVTGCPPAPRATPRQPEETLLPCATPRGCVSPCAWGALAGLRGWAGGS

SEQ ID NO: 8235 - DNA, 4926 bp, Homo sapiens
ggggggaggcggcggcagcggcagcggctgcgggcagcgcgcggggcgcagggcgcggggcgatcaccgtcggggctcgggaggcgggcagtgggcacaggctccccggtgcccgcccctccgctgcggaggggggccgcgagcgggcggccggggaggggccggcaccgccgccacaaaatgagcctgctgtcggccatcgacacgagcgccgcctcggtgtaccagcccgcccagctgctcaactgggtctacctgtcgctgcaggacacgcaccaggctagcgccttcgatgccttccggcccgagccgaccgccggcgccgcacccccggagctggccttcggcaagggccgccccgagcagctgggctcgcccctgcactccagctatctcaacagcttcttccagctgcagcgcggagaggcgctgagcaacagtgtgtacaagggcgcctcaccctatggctccctcaacaacatcgccgatggcctcagctccctcaccgagcacttctcagacctgaccctcacctccgaggctcgcaagcccagcaagcggcccccacccaactacctgtgccacctgtgcttcaacaaaggacactacatcaaggactgcccccaggcacgccccaaaggcgagggcctgactccataccagggcaaaaagcgctgcttcggcgagtacaagtgtcccaagtgcaagagaaaatggatgagcgggaactcctgggccaacatggggcaggagtgcatcaagtgccacatcaacgtgtatccacacaagcagagacccctggagaagcccgacggcctggacgtgtccgaccagagcaaggagcacccgcagcacctctgcgagaagtgcaaggtcctgggctactactgccgtcgcgtgcagtgacgggctgcccgcccgcacccagagccaccccccgccagcccgaggagacgctgcttccctgtgctactccgaggggctgcgtgtcgccctgtgcatggggtgccctcgcaggcctgcggggctgggccgggggctcttagcgtccttgtcttgtgtgtgttgacaaacagtgttactgacattgctgccccccacaggccagggaaagcagggagtctggggctttttgcaggcgggcctggggtctcagtggaggggacaaaggcaagcaaaagcccatgtccaggagccctgggtgtccccacaggctcgcctctgagagcctctttggggtgagcagccttgtattggccacaggtgcactaaattgactgtgaatcccaaacctccccagaccagccaggccgcctgcccccacccagaaccttccggtttgccctgtatggaaagccactctcagaaatccctctttcctgagtcagcaatcgtggcaaggggacatgtgttccaacagcggctggggagtggacctctctgtcccttgcccaccttaagccccaaatccagaccccctctgacatcactggcattgcacctgggtgtgcccccctccccacgctatggacccagataggaggggttaggcatgggggaggcacagaatgctggagagatgcgtcctggtgaacgtggggcagcccctcccacgacccccaccagactgccttaggttttgtcagccccactccctttccttcccctctgcctcccacccactctgggggtccacatcaagatagctgggcccagtgtggaagcccagcgtgtctgttccagcagaaaggacacaagcctggtgttctggagacctcggctcaagtctttgccctgctgccgacgcattgtgtcaccttgggcaaggacttcgcatctccaggcctcagtttccccattagttaaatgacagcataacactagagagcagagggcccatttcagctctgttgttctgggattcaggctggccggtgctgtgtcctggagctttatttggggagtttcacccagaatggtgggagaaacctcccaggtgccaggtaccccgcatcgtgacccttcacttggtgtcttaggaagtcaagctgagggatgctgagtcctcccctgctggcccctgcagccccagccctgcttttcatcccccacccctgcaaacatggaggagccccctccttctcacctcggtctcctagcccctgacatggagaaccctgagacaagccacagaacccctcttttctaaaatggagacaataatttcctacctcccaagggagcagagaggcctcgtggcacgtccgtggccagggagcccactgtcctggctggcggcgggatcgtgcgctcctctgtctcccggatgagaagccccgtttccatggtcttgacccttcctttctcccggctgtcagaactgggtctcttgattttgcccctacattatgcctctgtgggaaaaaaaaaaaatcagaccaagaaatgagcctgaaattcagtgtttaccatggctcaaggatgcccatctggtgtccagttgccttttgtattcaaatgaaaatgctttgtacaactgaggagttacagtgaagtgttaaccaggggtccagggagcgagttgaaaagatggagtgagtgtatttgcagccagggagctgcagggtggatttgaggggccataccctctgagcacttaaaaaaggtatttgctccaggccaggcagcaggctgtggacacccttgccaccactggggactgccactgaggactccccgagcacgttgttccccgtcttctccaaggtgttgaggtgagctggggttggccccggcccaggcttctgtcccaaggagaagctgccactgacagtcatcctaccgcactgctaaagagaatgttcgcagtggtgggcggcgtgcctgtgccaacccttccagggacccggccatgggggaccttggcccaaggatgcctggggcctgccagctgtgctgcaaaggtggggggcccacaccctaaaactaacccaggccccagaccactggaggccagggcttccctgcacgggctaaggggagttgggatatcaccccaaagtgaccttgccagtgagctgttcagcaggtagccactgccctgccatctgtgcagagccagccaccttgggggctggggttcccgctttgaggcccaccttccatactccccttgactcggctctggctgaactggggaactctcttgtggtcagcaaagcccctgccatgcaggccaggtgccattgagaattaagtgctcagagggccaggagcccaggggatgggaaagtgtgtggttttagtacgttcaaaagggacaatcgcttgcagttggtagatctagcgatctagttgggagataatggtgtttaccccatatgaagtattcaatagttctacttgtgaatttgtatttattttgagttatacttgacacagaattccttttttaaaaaaatatgtgtgtattttggaaaaaaaattcatagatgttaaaatttctgcatggttaccagtttttctcacaacactgaatttggtagcttttcccgaaaaaatcttcacagtaattttttgtctgtatatatttgagggcctttttttaaaaaaaaaaaaagaaaagaaaaatataattgtttgatttttgagattaaaacaaacaaaaagagaggcattttcaaaatttcagaactttcaggagggcaagagaatatcaaacaaagatttctggaagtattttgccaaccttctggttgagctgcaagaaaatatttatggtgagaacttttctgtttcccgttattgggtttttggttggtttttgtttgttttttactatgctttggtctgtaaaaatatgcaactgaactacattcagaaggaaatattgtctacatagaatattatatgaagttggtacataattctgatgaggaaaaaaaatctttgcaattctttaagccatattgttgtttttctgtgttgttttccctggatgaaaatatcagtattaagtagacagcatattattcaagtgtttagacttattaatatgttcttgtcctgtatttatacatatgtgtattttggaaagtattgccttttttaagggaagctataattcgatacatagtgaaaaagggaatggtgacccctttgtgcctcttccactgaggataacaaacagcattgtaatccattctcttgcaccttcttcttcttatcttgttattacggttttattaattttgtagagggacagggagtgggcaaggggaagaagcagcttatttgactaaccagcccctctgtggtccaccagcgtcttggcttggtgggagggctctcaatcagcagggccccaggagggaagaagaagtggggcaaagcctggcctcgccgctcgggagctttgccatctgagccacgcctcctccaggccatgctccttgaacttggaaatgtcaaccggagcccttacaccagccctccagcatctaatagacttgaatctactctaaacgaatatttaatccaacctcactacattgtagctcagtccaacgactaaccctgaaatgggggtgttccagccttcagcgagatggccaagcggtcccctgggggctgtggcagcgggcttatccttctctgttgccaaccttgccgtccgacctcctccgcccccatgcggtgaccccgtccgtgtctgtgtctgtccatacgtgtgagtccagctaaaaagacaaaacagaacccgtgggcccagctcggaaggtgcgtggagaaggctccgacgtctccgaagtgcagcccttgggatggcattccgttgtgtgccttattcctggagaatctgtatacggctcgcctatagaaatatagcctcttcatgctgtattaaaaggacttttaaaagcaaaa

SEQ ID NO: 8236 - protein, 241 aa, Homo sapiens
MSLLSAIDTSAASVYQPAQLLNWVYLSLQDTHQASAFDAFRPEPTAGAAPPELAFGKGRPEQLGSPLHSSYLNSFFQLQRGEALSNSVYKGASPYGSLNNIADGLSSLTEHFSDLTLTSEARKPSKRPPPNYLCHLCFNKGHYIKDCPQARPKGEGLTPYQGKKRCFGEYKCPKCKRKWMSGNSWANMGQECIKCHINVYPHKQRPLEKPDGLDVSDQSKEHPQHLCEKCKVLGYYCRRVQ

SEQ ID NO: 8237 - DNA, 3657 bp, Homo sapiens
acccatctgtggccttcacttcctccccttgtgggggttttctctgcaaagatgcaagaggtgtgttcgggggaggacacacatgggggtcactttccttccagacctgggcacaccggcgctgagcaacagtgtgtacaagggcgcctcaccctatggctccctcaacaacatcgccgatggcctcagctccctcaccgagcacttctcagacctgaccctcacctccgaggctcgcaagcccagcaagcggcccccacccaactacctgtgccacctgtgcttcaacaaaggacactacatcaaggactgcccccaggcacgccccaaaggcgagggcctgactccataccagggcaaaaagcgctgcttcggcgagtacaagtgtcccaagtgcaagagaaaatggatgagcgggaactcctgggccaacatggggcaggagtgcatcaagtgccacatcaacgtgtatccacacaagcagagacccctggagaagcccgacggcctggacgtgtccgaccagagcaaggagcacccgcagcacctctgcgagaagtgcaaggtcctgggctactactgccgtcgcgtgcagtgacgggctgcccgcccgcacccagagccaccccccgccagcccgaggagacgctgcttccctgtgctactccgaggggctgcgtgtcgccctgtgcatggggtgccctcgcaggcctgcggggctgggccgggggctcttagcgtccttgtcttgtgtgtgttgacaaacagtgttactgacattgctgccccccacaggccagggaaagcagggagtctggggctttttgcaggcgggcctggggtctcagtggaggggacaaaggcaagcaaaagcccatgtccaggagccctgggtgtccccacaggctcgcctctgagagcctctttggggtgagcagccttgtattggccacaggtgcactaaattgactgtgaatcccaaacctccccagaccagccaggccgcctgcccccacccagaaccttccggtttgccctgtatggaaagccactctcagaaatccctctttcctgagtcagcaatcgtggcaaggggacatgtgttccaacagcggctggggagtggacctctctgtcccttgcccaccttaagccccaaatccagaccccctctgacatcactggcattgcacctgggtgtgcccccctccccacgctatggacccagataggaggggttaggcatgggggaggcacagaatgctggagagatgcgtcctggtgaacgtggggcagcccctcccacgacccccaccagactgccttaggttttgtcagccccactccctttccttcccctctgcctcccacccactctgggggtccacatcaagatagctgggcccagtgtggaagcccagcgtgtctgttccagcagaaaggacacaagcctggtgttctggagacctcggctcaagtctttgccctgctgccgacgcattgtgtcaccttgggcaaggacttcgcatctccaggcctcagtttccccattagttaaatgacagcataacactagagagcagagggcccatttcagctctgttgttctgggattcaggctggccggtgctgtgtcctggagctttatttggggagtttcacccagaatggtgggagaaacctcccaggtgccaggtaccccgcatcgtgacccttcacttggtgtcttaggaagtcaagctgagggatgctgagtcctcccctgctggcccctgcagccccagccctgcttttcatcccccacccctgcaaacatggaggagccccctccttctcacctcggtctcctagcccctgacatggagaaccctgagacaagccacagaacccctcttttctaaaatggagacaataatttcctacctcccaagggagcagagaggcctcgtggcacgtccgtggccagggagcccactgtcctggctggcggcgggatcgtgcgctcctctgtctcccggatgagaagccccgtttccatggtcttgacccttcctttctcccggctgtcagaactgggtctcttgattttgcccctacattatgcctctgtgggaaaaaaaaaaaatcagaccaagaaatgagcctgaaattcagtgtttaccatggctcaaggatgcccatctggtgtccagttgccttttgtattcaaatgaaaatgctttgtacaactgaggagttacagtgaagtgttaaccaggggtccagggagcgagttgaaaagatggagtgagtgtatttgcagccagggagctgcagggtggatttgaggggccataccctctgagcacttaaaaaaggtatttgctccaggccaggcagcaggctgtggacacccttgccaccactggggactgccactgaggactccccgagcacgttgttccccgtcttctccaaggtgttgaggtgagctggggttggccccggcccaggcttctgtcccaaggagaagctgccactgacagtcatcctaccgcactgctaaagagaatgttcgcagtggtgggcggcgtgcctgtgccaacccttccagggacccggccatgggggaccttggcccaaggatgcctggggcctgccagctgtgctgcaaaggtggggggcccacaccctaaaactaacccaggccccagaccactggaggccagggcttccctgcacgggctaaggggagttgggatatcaccccaaagtgaccttgccagtgagctgttcagcaggtagccactgccctgccatctgtgcagagccagccaccttgggggctggggttcccgctttgaggcccaccttccatactccccttgactcggctctggctgaactggggaactctcttgtggtcagcaaagcccctgccatgcaggccaggtgccattgagaattaagtgctcagagggccaggagcccaggggatgggaaagtgtgtggttttagtacgttcaaaagggacaatcgcttgcagttggtagatctagcgatctagttgggagataatggtgtttaccccatatgaagtattcaatagttctacttgtgaatttgtatttattttgagttatacttgacacagaattccttttttaaaaaaatatgtgtgtattttggaaaaaaaattcatagatgttaaaatttctgcatggttaccagtttttctcacaacactgaatttggtagcttttcccgaaaaaatcttcacagtaattttttgtctgtatatatttgagggcctttttttaaaaaaaaaaaaagaaaagaaaaatataattgtttgatttttgagattaaaacaaacaaaaagagaggcattttcaaaatttcagaactttcaggagggcaagagaatatcaaacaaagatttctggaagtattttgccaaccttctggttgagctgcaagaaaatatttatggtgagaacttttctgtttcccgttattgggtttttggttggtttttgtttgttttttactatgctttggtctgtaaaaatatgcaactgaactacattcagaaggaaatattgtctacatagaatattatatgaagttggtacataattctgatgaggaaaaaaaatctttgcaattctttaagcc

SEQ ID NO: 8238 - protein, 228 aa, Homo sapiens; identical to SEQ ID NO: 8234

SEQ ID NO: 8239 - DNA, 3965 bp, Homo sapiens
ggggggaggcggcggcagcggcagcggctgcgggcagcgcgcggggcgcagggcgcggggcgatcaccgtcggggctcgggaggcgggcagtgggcacaggctccccggtgcccgcccctccgctgcggaggggggccgcgagcgggcggccggggaggggccggcaccgccgccacaaaatgagcctgctgtcggccatcgacacgagcgccgcctcggtgtaccagcccgcccagctgctcaactgggtctacctgtcgctgcaggacacgcaccaggctagcgccttcgatgccttccggcccgagccgaccgccggcgccgcacccccggagctggccttcggcaagggccgccccgagcagctgggctcgcccctgcactccagctatctcaacagcttcttccagctgcagcgcggagaggcgctgagcaacagtgtgtacaagggcgcctcaccctatggctccctcaacaacatcgccgatggcctcagctccctcaccgagcacttctcagacctgaccctcacctccgaggctcgcaagcccagcaagcggcccccacccaactacctgtgccacctgtgcttcaacaaaggacactacatcaaggactgcccccaggcacgccccaaaggcgagggcctgactccataccagggcaaaaagcgctgcttcggcgagtacaagtgtcccaagtgcaagagaaaatggatgagcgggaactcctgggccaacatggggcaggagtgcatcaagtgccacatcaacgtgtatccacacaagcagagacccctggagaagcccgacggcctggacgtgtccgaccagagcaaggagcacccgcagcacctctgcgagaagtgcaaggtcctgggctactactgccgtcgcgtgcagtgacgggctgcccgcccgcacccagagccaccccccgccagcccgaggagacgctgcttccctgtgctactccgaggggctgcgtgtcgccctgtgcatggggtgccctcgcaggcctgcggggctgggccgggggctcttagcgtccttgtcttgtgtgtgttgacaaacagtgttactgacattgctgccccccacaggccagggaaagcagggagtctggggctttttgcaggcgggcctggggtctcagtggaggggacaaaggcaagcaaaagcccatgtccaggagccctgggtgtccccacaggctcgcctctgagagcctctttggggtgagcagccttgtattggccacaggtgcactaaattgactgtgaatcccaaacctccccagaccagccaggccgcctgcccccacccagaaccttccggtttgccctgtatggaaagccactctcagaaatccctctttcctgagtcagcaatcgtggcaaggggacatgtgttccaacagcggctggggagtggacctctctgtcccttgcccaccttaagccccaaatccagaccccctctgacatcactggcattgcacctgggtgtgcccccctccccacgctatggacccagataggaggggttaggcatgggggaggcacagaatgctggagagatgcgtcctggtgaacgtggggcagcccctcccacgacccccaccagactgccttaggttttgtcagccccactccctttccttcccctctgcctcccacccactctgggggtccacatcaagatagctgggcccagtgtggaagcccagcgtgtctgttccagcagaaaggacacaagcctggtgttctggagacctcggctcaagtctttgccctgctgccgacgcattgtgtcaccttgggcaaggacttcgcatctccaggcctcagtttccccattagttaaatgacagcataacactagagagcagagggcccatttcagctctgttgttctgggattcaggctggccggtgctgtgtcctggagctttatttggggagtttcacccagaatggtgggagaaacctcccaggtgccaggtaccccgcatcgtgacccttcacttggtgtcttaggaagtcaagctgagggatgctgagtcctcccctgctggcccctgcagccccagccctgcttttcatcccccacccctgcaaacatggaggagccccctccttctcacctcggtctcctagcccctgacatggagaaccctgagacaagccacagaacccctcttttctaaaatggagacaataatttcctacctcccaagggagcagagaggcctcgtggcacgtccgtggccagggagcccactgtcctggctggcggcgggatcgtgcgctcctctgtctcccggatgagaagccccgtttccatggtcttgacccttcctttctcccggctgtcagaactgggtctcttgattttgcccctacattatgcctctgtgggaaaaaaaaaaaatcagaccaagaaatgagcctgaaattcagtgtttaccatggctcaaggatgcccatctggtgtccagttgccttttgtattcaaatgaaaatgctttgtacaactgaggagttacagtgaagtgttaaccaggggtccagggagcgagttgaaaagatggagtgagtgtatttgcagccagggagctgcagggtggatttgaggggccataccctctgagcacttaaaaaaggtatttgctccaggccaggcagcaggctgtggacacccttgccaccactggggactgccactgaggactccccgagcacgttgttccccgtcttctccaaggtgttgaggtgagctggggttggccccggcccaggcttctgtcccaaggagaagctgccactgacagtcatcctaccgcactgctaaagagaatgttcgcagtggtgggcggcgtgcctgtgccaacccttccagggacccggccatgggggaccttggcccaaggatgcctggggcctgccagctgtgctgcaaaggtggggggcccacaccctaaaactaacccaggccccagaccactggaggccagggcttccctgcacgggctaaggggagttgggatatcaccccaaagtgaccttgccagtgagctgttcagcaggtagccactgccctgccatctgtgcagagccagccaccttgggggctggggttcccgctttgaggcccaccttccatactccccttgactcggctctggctgaactggggaactctcttgtggtcagcaaagcccctgccatgcaggccaggtgccattgagaattaagtgctcagagggccaggagcccaggggatgggaaagtgtgtggttttagtacgttcaaaagggacaatcgcttgcagttggtagatctagcgatctagttgggagataatggtgtttaccccatatgaagtattcaatagttctacttgtgaatttgtatttattttgagttatacttgacacagaattccttttttaaaaaaatatgtgtgtattttggaaaaaaaattcatagatgttaaaatttctgcatggttaccagtttttctcacaacactgaatttggtagcttttcccgaaaaaatcttcacagtaattttttgtctgtatatatttgagggcctttttttaaaaaaaaaaaaagaaaagaaaaatataattgtttgatttttgagattaaaacaaacaaaaagagaggcattttcaaaatttcagaactttcaggagggcaagagaatatcaaacaaagatttctggaagtattttgccaaccttctggttgagctgcaagaaaatatttatggtgagaacttttctgtttcccgttattgggtttttggttggtttttgtttgttttttactatgctttggtctgtaaaaatatgcaactgaactacattcagaaggaaatattgtctacatagaatattatatgaagttggtacataattctgatgaggaaaaaaaatctttgcaattctttaagcc

SEQ ID NO: 8240 - protein, 241 aa, Homo sapiens; identical to SEQ ID NO: 8236

SEQ ID NO: 8241 - DNA, 1018 bp, Homo sapiens
ggaaagcagggagtctggggctttttgcaggcgggcctggggtctcagtggaggggacaaaggcaagcaaaagcccatgtccaggagccctgggtgtccccacaggctcgcctctgagagcctctttggggtgagcagccttgtattggccacaggtgcactaaattgactgtgaatcccaaacctccccagaccagccaggccgcctgcccccacccagaaccttccggtttgccctgtatggaaagccactctcagaaatccctctttcctgagtcagcaatcgtggcaaggggacatgtgttccaacagcggctggggagtggacctctctgtcccttgcccaccttaagccccaaatccagaccccctctgacatcactggcattgcacctgggtgtgcccccctccccacgctatggacccagataggaggggttaggcatgggggaggcacagaatgctggagagatgcgtcctggtgaacgtggggcagcccctcccacgacccccaccagactgccttaggttttgtcagccccactccctttccttcccctctgcctcccacccactctgggggtccacatcaagatagctgggcccagtgtggaagcccagcgtgtctgttccagcagaaaggacacaagcctggtgttctggagacctcggctcaagtctttgccctgctgccgacgcattgtgtcaccttgggcaaggacttcgcatctccaggcctcagtttccccattagttaaatgacagcataacactagagagcagagggcccatttcagctctgttgttctgggattcaggctggccggtgctgtgtcctggagctttatttggggagtttcacccagaatggtgggagaaacctcccaggtgccaggtaccccgcatcgtgacccttcacttggtgtcttaggaagtcaagctgagggatgctgagtcctcccctgatggaggagccccctccttctcacctcggtctcctagcccctgacatggagaa

SEQ ID NO: 8242 - protein, 63 aa, Homo sapiens
MESHSQKSLFPESAIVARGHVFQQRLGSGPLCPLPTLSPKSRPPLTSLALHLGVPPSPRYGPR

SEQ ID NO: 8243 - DNA, 517 bp, Homo sapiens
agagtgcacccatctggcaaggcactaggtatttgggcaggctagaacctgattggatgctgtctacccctcacctggccatagctccaggggcaggtgctgggctggattcatctctgtgctcctcaccatctgaccacgccagctcaagggacctcacacgcagcggtgctcagtgcaaggctccctgaagggaggaacgggttgacagggcttttataaaccacagaaagaaacctgtgtcacaaatgaaatagtgtgttagaacctaatttctataatatttaaaagtagaaggattttcttgggaacagctttatgagatacaattcacttcccatataattcccatttgaagtgtacaattcagtgattttcgtatatgcctggagttgtgcagctgtcacctcaatcagagaacattgtcatcaccttgaaaaggaatttcatatccagcctaggcaacagaaatgagactctgtctgaaaaaataaaaataaataaaaaataaaaataa

SEQ ID NO: 8244 - protein, 42 aa, Homo sapiens
MPGVVQLSPQSENIVITLKRNFISSLGNRNETLSEKIKINKK

SEQ ID NO: 8245 - DNA, 289 bp, Homo sapiens
gagatatcggaggtccagaaggccatggacaggtgcccccagggatcccgcttgttgtctgcaggccaaacaaccagccagggagcagggaaggctttggagcaccaatcaccacgtgcatttacttcctttccacatgtgccctcgacaactatgaattaggcacccacaaggcactggaggagggtggttaacaagacagatgcaaccccggcccccatgaacttacagccaggcgcggaagaaaagtaagtatcccattcagatcattaaagctgtgatgagagat

SEQ ID NO: 8246 - protein, 45 aa, Homo sapiens
MDRCPQGSRLLSAGQTTSQGAGKALEHQSPRAFTSFPHVPSTTMN

SEQ ID NO: 8247 - DNA, 2626 bp, Homo sapiens
ctgattaccactgatgctgaggatcttttcacacgtttcacggccacttggatttcttctgaggaaattatcactgtttcaggaggagagttacttcaggaaccctgcggacagagggacagcccaccagactaccatctgttgtttgaataatttttttccttatcaattggattcattttggtatcctgtttttgaactcagcttaagaacttctcatctcaaatcctatggccttctggaagatccaccactatccaaaggaaaaagtagattaatatgcctcaagggatatgacatctatggcatagggctactggtctcatcccagcgatcgggacagaaattgctaatagctcatgcaactctttcatgaagagcttagctatgaccttagaagacaaagcctgtttgtcatggctgccgtaaaccgagctcttacagtgcgtggaccatgttttaataatccaaaataattccagtgccgaaccctgaatttaacatatggtagacattcagtaaatgtttgttgaatgaatgcatgtcttctaaaagttttccaacacaaattagcagtggtttcttgtaaattatttcctactcgccactctataaaatcatggcaataatagaagattatgaaggatttctatggaggacataaatgctgcatctttcataatctccattatcaccctcattgatattatcattggaattatctaaggtgagccccagtttccagggcagctgattgacaccgtcctgccttccttatttaacctcttcttttgccactcgcctctatctttgaatcatattttggccttggttttgcaatggttttatgtcatcctacagatgtcttcaagacctggggtgagttatcaatgcaagaatggttcttagaaatctgatgaggcctctgctctctgggatgtggccctctctatgcaggttactccaatgattagctctgtcctcattgtccttttaattcccttgtcaacttaatctcagtatgttgcttatattaacaagaagactcacgcaataactcctcgataactctcagtgatggtatctgttggtgcatacttgtgttccacagttatggccatatacacagaggtagtatatgatgaagagaagattacagtctttacagtcaagaagacttgggttcatatcctaaccctggaacttactagcattataatgcttgcagcattgtgtttggtgagaggaaaagaatgaatggattctaggaatgttagggaacgatttactttacccgatggctgtatcaaacatctatgccccacttcttctcttgcctcacctattccttagattcttggtcacttctctaccacaagccaccagcactataaccagttttgcgtgggttctgctcttcctccctatgttgatcagtgtcatgtgagcataagccaatggtagcttgccacatgccccatctcccattgctgcagaggcataagacagaagagatgggaagtgaatgcccgatgtggtgaatctgggatgaatgggagtcataggctggtagatcgctttttcctccttcttcctcctggaggaactattctgagagtcatctgtttgtatggtcttgtagaagacagtcctgtaagatcgagcaaccagtcatgatgaaaccaagtggtggccggatcagtatgacaccctgctgcccccgtttttaattcttctctgccttgccctgctctctcctgttgctctgggattgcacttctgaatgaagtagcagctcataagcttttgccacaggctctgtcttttggggaatccaggataagaacccattatacagaagtgttcaataatatcaattttgcaactcactcagctccatggcttcccccggtctacctgtctcactacatgcataaagtgaaatgatggaaggaatctgctttctgaactctaatgtgccttcattgattatcattaaaattatcattaaaattgccttatttctatggactcagaggaatgatgttttagttttggctctctgatttaccaactatgtgactttgtccaagtcatttaacttcagtaaacctcggtatgactgaaaagggagttttctgtatggccgtcactaggtttttttgtgggttagttaaatgataaacatgaaagctctgtccaaatgaaaaaggtatttctaacaacaaccacaataacaataacaacttagtgcttagcccatgatgtatcaggggatatgatgtgatgattttcaaggtgttggaggcaacttctgttccaagaactcccagcagctttgaaagcagactgagatgagttgagaccctgaatccctgggctgttgttcctgtcacccctaattaatatgtgagagacaacagctgggttttccatccctaacacatttatttcattttatttggggcctgcaatttctgcatgtctcatatattttaggttttacctttttacctggctttaaaataaatcccttgtaagttgtcctgcaaatgaaattactgtctggaaaactgcaatttcatcttgagagttttattatgctaataaatgtcaggattctcat

SEQ ID NO: 8248 - protein, 120 aa, Homo sapiens
MLRIFSHVSRPLGFLLRKLSLFQEESYFRNPADRGTAHQTTICCLNNFFPYQLDSFWYPVFELSLRTSHLKSYGLLEDPPLSKGKSRLICLKGYDIYGIGLLVSSQRSGQKLLIAHATLS

SEQ ID NO: 8249 - DNA, 369 bp, Homo sapiens
ttccaggaagaagaaacaactggcatcagcaaagatctggagtcatgaaactacccccgaggatggctgggaaaagaagatccaggaactgctggtgtctgtactagttaccgccctgataggaaaggcagaagccatagctctcaccaaacctccagcatttaaactttgctgtggagtctacgtgaccccaccacgaggtgaccctcacctttccctccatacctggggagacagacatggcagtggtcactgaaccctgggatgacacgctacctcatcctttatgacaccctttgatatgttgcttttgatgcatttctttgtatcccatttggtttcatttttagcaataaactcattcttggt

SEQ ID NO: 8250 - protein, 84 aa, Homo sapiens
SRKKKQLASAKIWSHETTPEDGWEKKIQELLVSVLVTALIGKAEAIALTKPPAFKLCCGVYVTPPRGDPHLSLHTWGDRHGSGH

SEQ ID NO: 8251 - DNA, 2171 bp, Homo sapiens
ggcccaggtcggcccagggagcacggaaccaaagagcgctagcgccggttcggccgcctttccagaaagcccgggccgaacggccccgccgcagagactcagcgcggatcgctgctccctctcgccatggcgcaggtgctgatcgtgggcgccgggatgacaggaagcttgtgcgctgcgctgctgaggaggcagacgtccggtcccttgtaccttgctgtgtgggacaaggctgaggactcagggggaagaatgactacagcctgcagtcctcataatcctcagtgcacagctgacttgggtgctcagtacatcacctgcactcctcattatgccaaaaaacaccaacgtttttatgatgaactgttagcctatggcgttttgaggcctctaagctcgcctattgaaggaatggtgatgaaagaaggagactgtaactttgtggcacctcaaggaatttcttcaattattaagcattacttgaaagaatcaggtgcagaagtctacttcagacatcgtgtgacacagatcaacctaagagatgacaaatgggaagtatccaaacaaacaggctcccctgagcagtttgatcttattgttctcacaatgccagttcctgagattctgcagcttcaaggtgacatcaccaccttaattagtgaatgccaaaggcagcaactggaggctgtgagctactcctctcgatatgctctgggcctcttttatgaagctggtacgaagattgatgtcccttgggctgggcagtacatcaccagtaatccctgcatacgcttcgtctccattgataataagaagcgcaatatagagtcatcagaaattgggccttccctcgtgattcacaccactgtcccatttggagttacatacttggaacacagcattgaggatgtgcaagagttagtcttccagcagctggaaaacattttgccgggtttgcctcagccaattgctaccaaatgccaaaaatggagacattcacaggtaccaagtgctggtgtgattctaggatgtgcgaagagcccctggatgatggcgattggatttcccatctgacttcctggaaattggagcacacagtcaggttttatttgatttttttttttaaggataccacttcacagcctttaggatagctattatttagaagcaaaacagaagataaatgttggcaaggatgtggagatattggattcccttgtgcagtgccggtgggaatgtaaaatgatgtagctactatggaaaatgatacggcaatttctttagaaatgaaatatagaattgctgtatgatctgcagttccacatctggatatctatccaaaagaagtgaaagtagggacttgaacgaacatttgtacaccaatgttcacagcggctttattcacaacagccaaaaggtggaagcaacccagtgtccatggatagatgaatagataaataaaatgtggtataaacatacaatgggctattgtttagccttaaaagggaaggaaattctgacatgctgcaatatggatgaagcttaaagtcattatgcaaagtggaataagcctatcacaaaaaataatattacataattctacttatatgaggaatctagagcagtcagtttcacagagacagaaaatagaatggtggttgccaagggctgggagaagagggcaatggagagtgagtgtttagtgggtcagagttttagtttgggaaggtaaaaagttctggagatggatgatggttatgggtgctcaacagtgtgaatgtacttaatgccacagaactgcacatttaaatgtggttaaaatcatcacttttatgttatgtatatttaccacaataaataaagaagttgatatttcttatacttacaaagaggagaagggcatttgcaaatcaacaagaagtgtgaggcccctctctctagcagaaaaatagactaaatctatttctttatcttttaacatcctgtttaagggaaatgccaaaacaaatgggaaaaaatacacacacacaaatatatatgaacatgttttgcctcatgagtaatcaaaatgtgtacatatgtatgtttatgtatgtgtgtttatatttaaaatcgtgttctgccttatgagtaaacaaaaagtatacaaattaaaaactataatgaaacgt

SEQ ID NO: 8252 - protein, 315 aa, Homo sapiens; identical to SEQ ID NO: 1194

SEQ ID NO: 8253 - DNA, 1909 bp, Homo sapiens
aagtcttgtgagatctgatggttttgtaaagggcagttgtacatatgctgtcttgcctgccaccactaattagtgaatgccaaaggcagcaactggaggctgtgagctactcctctcgatatgctctgggcctcttttatgaagctggtacgaagattgatgtcccttgggctgggcagtacatcaccagtaatccctgcatacgcttcgtctccattgataataagaagcgcaatatagagtcatcagaaattgggccttccctcgtgattcacaccactgtcccatttggagttacatacttggaacacagcattgaggatgtgcaagagttagtcttccagcagctggaaaacattttgccgggtttgcctcagccaattgctaccaaatgccaaaaatggagacattcacagattttgtttggtgggggaagtggatgtgcacacagaagagcttgagaccacccgtacgtttacattatcccctcatgagattaatttctggttacaaatgctgctgccaactgtcctggccaaatgactctgcatcacaaacctttccttgcatgtggaggggatggatttactcagtccaactttgatggctgcatcacttctgccctatgtgttctggaagctttaaagaattatatttagtgcctatatccttattctctacatgtgtattgggtttttattttcacaattttctgttattgattattttgttttctattttgctaagaaaaattactggaaaattgttcttcacttattatcatttttcatgtggagtataaaatcaattttgtaattttgatagttacaacccatgctagaatggaaattcctcacaccttgcaccttccctacttttctgaattgctatgactactccttgttggaggaaaagtggtacttaaaaaataacaaacgactctctcaaaaaaattacattaaatcacaataacagtttgtgtgccaaaaacttgattatccttatgaaaatttcaattctgaataaagaataatcacattatcaaagccccatcttaagtcttcggatgtgtccttgaatcaatatttttgcaaattatacaaaacaagatttttccaaaatgtaggtaacagagtgtaattcttatttctcatttatcccccaagttattaagtgatcctgaattgtaggtcatatatgtcatcatcttagtgtggagggcaacttgactgataaagagaccttccttcagattttcagaaagtataagattccacatgattttcccagccacacagtactttttaactttcaaacaaattccagtcctaatatgaaagataaaaattaaatagaaacagagagaaagtatatcgatccttaccttttgctatattttatagctgttgctgttactttatgggttctccagtatgtgctgtggcatttagactgtgtcgagtttaatgaatttaacacaacaaaaaatttactgaaccagaaaatagatgcacttaaaatagttcaatatttgccaagttggtggttcagcatatcacccacatgcttcagtgacctgaccccacgacttgctagctggagagaaatcaatctccagccttccaaaccagctacctgttgctaatttgaaaagcaaaatgatgagttctatttcagcattttgaaaggagaaaaatcattgcagcctctcaaactaacaaaagttcaacaaaagacttcttactgtaatagtgtttaaagtttcacacttacatgtccactgtcatacatacacatacacaggcacaggcagaacttgcttctatagctgcaaagtgggttttatgaccctatagcatattattatatgtttcctcttagcaataaattggtgaaaaacttaaatgcc

SEQ ID NO: 8254 - protein, 138 aa, Homo sapiens
MLSCLPPLISECQRQQLEAVSYSSRYALGLFYEAGTKIDVPWAGQYITSNPCIRFVSIDNKKRNIESSEIGPSLVIHTTVPFGVTYLEHSIEDVQELVFQQLENILPGLPQPIATKCQKWRHSQILFGGGSGCAHRRA

SEQ ID NO: 8255 - DNA, 1550 bp, Homo sapiens
ggcccaggtcggcccagggagcacggaaccaaagagcgctagcgccggttcggccgcctttccagaaagcccgggccgaacggccccgccgcagagactcagcgcggatcgctgctccctctcgccatggcgcaggtgctgatcgtgggcgccgggatgacaggaagcttgtgcgctgcgctgctgaggaggcagacgtccggtcccttgtaccttgctgtgtgggacaaggctgaggactcagggggaagaatgactacagcctgcagtcctcataatcctcagtgcacagctgacttgggtgctcagtacatcacctgcactcctcattatgccaaaaaacaccaacgtttttatgatgaactgttagcctatggcgttttgaggcctctaagctcgcctattgaaggaatggtgatgaaagaaggagactgtaactttgtggcacctcaaggaatttcttcaattattaagcattacttgaaagaatcaggtgcagaagtctacttcagacatcgtgtgacacagatcaacctaagagatgacaaatgggaagtatccaaacaaacaggctcccctgagcagtttgatcttattgttctcacaatgccagttcctgagattctgcagcttcaaggtgacatcaccaccttaattagtgaatgccaaaggcagcaactggaggctgtgagctactcctctcgatatgctctgggcctcttttatgaagctggtacgaagattgatgtcccttgggctgggcagtacatcaccagtaatccctgcatacgcttcgtctccattgataataagaagcgcaatatagagtcatcagaaattgggccttccctcgtgattcacaccactgtcccatttggagttacatacttggaacacagcattgaggatgtgcaagagttagtcttccagcagctggaaaacattttgccgggtttgcctcagccaattgctaccaaatgccaaaaatggagacattcacaggttacaaatgctgctgccaactgtcctggccaaatgactctgcatcacaaacctttccttgcatgtggaggggatggatttactcagtccaactttgatggctgcatcacttctgccctatgtgttctggaagctttaaagaattatatttagtgcctatatccttattctctacatgtgtattgggtttttattttcacaattttctgttattgattattttgttttctattttgctaagaaaaattactggaaaattgttcttcacttattatcatttttcatgtggagtataaaatcaattttgtaattttgatagttacaacccatgctagaatggaaattcctcacaccttgcaccttccctacttttctgaattgctatgactactccttgttggaggaaaagtggtacttaaaaaataacaaacgactctctcaaaaaaattacattaaatcacaataacagtttgtgtgccaaaaacttgattatccttatgaaaatttcaattctgaataaagaataatcacattatcaaagccccatc

SEQ ID NO: 8256 - protein, 342 aa, Homo sapiens
MAQVLIVGAGMTGSLCAALLRRQTSGPLYLAVWDKAEDSGGRMTTACSPHNPQCTADLGAQYITCTPHYAKKHQRFYDELLAYGVLRPLSSPIEGMVMKEGDCNFVAPQGISSIIKHYLKESGAEVYFRHRVTQINLRDDKWEVSKQTGSPEQFDLIVLTMPVPEILQLQGDITTLISECQRQQLEAVSYSSRYALGLFYEAGTKIDVPWAGQYITSNPCIRFVSIDNKKRNIESSEIGPSLVIHTTVPFGVTYLEHSIEDVQELVFQQLENILPGLPQPIATKCQKWRHSQVTNAAANCPGQMTLHHKPFLACGGDGFTQSNFDGCITSALCVLEALKNYI

SEQ ID NO: 8257 - DNA, 6937 bp, Homo sapiens
ctgcgtagacgcggggagttcggtatcagtttacacgttgccttcagtaaaatccgccagaggtccacccattttgccttttccccttccttgccctgggagaaatcctcccttcactgggagagaacttctctcccagggcggtgcgacccggagctccagcgccctagtctccacttcgtttgctgaaacttgctttctaccagctaagaaccatgctgcgagtgattgtggaatctgccagcaatatccctaaaacgaaatttggcaagccggatcctattgtttctgtcatttttaaggatgagaaaaagaaaacaaagaaagttgataatgaattgaaccctgtctggaatgagattttggagtttgacttgaggggtataccactggacttttcatcttcccttgggattattgtgaaagattttgagacaattggacaaaataaattaattggcacggcgactgtagccctgaaggacctgactggtgaccagagcagatccctgccgtacaagctgatctccctgctaaatgaaaaagggcaagatactggggccaccattgacttggtgatcggctatgatccgccttctgctccacatccaaatgacctgagcgggcccagcgtgccaggcatgggaggagatggggaagaagatgaaggtgatgaagacaggttggacaatgcagtcaggggccctgggcccaaggggccagttgggacggtgtcggaagctcagcttgctcggaggctcaccaaagtaaagaacagccggcggatgctgtcaaataagccacaggacttccagatccgcgtccgagtgattgagggccgacagttaagtggtaacaacataaggcctgtggtcaaagttcacgtctgtggccagacacaccgaacaagaatcaagagaggaaacaaccctttttttgatgagttgtttttctacaatgtcaacatgaccccttctgaattgatggatgagatcatcagcatccgggtttataattctcactctctgcgggcagattgtctgatgggggaatttaagattgatgttggatttgtttatgatgaacctggccatgctgtcatgagaaagtggcttcttctcaatgacccggaagataccagttcaggttctaaaggttatatgaaagtcagcatgtttgtcctgggaaccggagatgagcctcctcctgagagacgagatcgtgataatgacagtgatgatgtggagagtaatttgttactccctgctggcattgccctccggtgggtgaccttcttgctgaaaatctaccgagctgaggacatcccccagatggatgatgccttctcacagacagtaaaggaaatatttggaggcaatgcagataagaaaaatctcgtggatccttttgtagaagtttcctttgctggaaaaaaggtttgtacaaacataattgagaaaaatgcaaacccagagtggaatcaggtcgtcaatcttcagatcaagtttccttcagtgtgtgaaaaaataaaactaacaatatatgactgggaccgtcttactaaaaatgatgtagttggaacaacatatctacacctctctaaaattgctgcctctggtggggaagtggaagatttctcatcttcgggaactggggctgcatcatatacagtaaacacaggagaaacagaggtaggctttgttccaacgtttggaccttgttacctgaatctttatggaagccccagagagtacacgggattcccagacccctatgatgagctgaatactggaaagggggaaggagttgcctacagaggcaggatcttggttgaattagccacttttcttgagaagacaccaccagataaaaagcttgagcccatttcaaatgatgacctgctggttgttgagaaataccagcgaaggcggaagtacagcctgtctgccgtgtttcattcagccaccatgttgcaagatgttggtgaggccattcagtttgaagtcagcattgggaactatggcaacaagtttgacaccacctgtaagcctttggcatcaacaactcagtacagccgtgctgtatttgatggcaactactattattacttgccttgggcccacaccaagccagttgttaccctgacttcatactgggaggatattagtcatcgcctggatgcggtgaacactctcctagctatggcagaacggctgcaaacaaatatagaagctctaaaatcagggatacaaggtaaaattcctgcaaaccagctggctgaattgtggctgaagctgatagatgaagttatagaagacacgagatacacgttgcctctcacagaaggaaaagccaacgtcacagttctcgatactcagatccgaaagctgcggtccaggtctctctcccaaatacatgaggcggctgtgaggatgaggtcggaagccacagatgtgaagtccacactggcagaaattgaggactggcttgataaattaatgcagctgactgaagagccacagaacagcatgcctgacatcatcatctggatgatccggggagagaagagactggcctatgcacgaattcccgcacatcaggtcttgtactccaccagtggtgagaatgcatctggaaaatactgtgggaaaacccaaaccatctttctgaagtatccacaggagaaaaacaacgggccaaaggtgcctgtggagttgcgagtgaacatctggctaggcttaagtgctgtggagaagaagtttaacagcttcgcagaaggaactttcaccgtctttgctgaaatgtatgaaaatcaagctctcatgtttggaaaatggggtacttctggattagtaggacgtcataagttttctgatgtcacaggaaaaataaaactcaagagggaattttttctgcctccaaaaggctgggaatgggaaggagagtggatagttgatcctgaaagaagcttgctgactgaggcagatgcaggtcacacggagttcactgatgaagtctatcagaacgagagccgctaccccgggggcgactggaagccggccgaggacacctacacggatgcgaacggcgataaagcagcatcacccagcgagttgacttgtcctccaggttgggaatgggaagatgatgcatggtcttatgacataaatcgagcggtggatgagaaaggctgggaatatggaatcaccattcctcctgatcataagcccaaatcctgggttgcagcagagaaaatgtaccacactcatagacggcgaaggctggtccgaaaacgcaagaaagatttaacacagactgcttcaagcaccgcaagggccatggaggaattgcaagaccaagagggctgggaatatgcttctctaattggctggaaatttcactggaaacaacgtagttcagataccttccgccgcagacgctggaggagaaaaatggctccttcagaaacacatggtgcagctgccatctttaaacttgaaggtgcccttggggcagacactaccgaagatggggatgagaagagcctggagaaacagaagcacagtgccaccactgtgttcggagcaaacacccccattgtttcctgcaattttgacagagtctacatctaccatctgcgctgctatgtctatcaagccagaaacctcttggctttagataaggatagcttttcagatccatatgctcatatctgtttcctccatcggagcaaaaccactgagatcatccattcaaccctgaatcccacgtgggaccaaacaattatattcgatgaagttgaaatctatggggaaccccaaacagttctacagaatccacccaaagttatcatggaactttttgacaatgaccaagtgggcaaagatgaatttttaggacgaagcattttctctcctgtggtgaaactgaactcagaaatggacatcacacccaaacttctctggcacccagtaatgaatggagacaaagcctgcggggatgttcttgtaactgcagagctgattctgaggggcaaggatggctccaaccttcccattcttccccctcaaagggcgccaaatctatacatggtcccccaggggatcaggcctgtggtccagctcactgccattgagattctagcttggggcttaagaaatatgaaaaacttccagatggcttctatcacatcccccagtcttgttgtggagtgtggaggagaaagggtggaatcggtggtgatcaaaaaccttaagaagacacccaactttccaagttctgttctcttcatgaaagtgttcttgcccaaggaggaattgtacatgcccccactggtgatcaaggtcatcgaccacaggcagtttgggcggaagcctgtcgtcggccagtgcaccatcgagcgcctggaccgctttcgctgtgacccttatgcagggaaagaggacatcgtcccacagctcaaagcctcccttctgtctgccccaccatgccgggacatcgttatcgaaatggaagacaccaaaccattactggcttctaagctgacagaaaaggaggaagaaatcgtggactggtggagtaaattttatgcttcctcaggggaacatgaaaaatgcggacagtatattcagaaaggctattccaagctcaagatatataattgtgaactagaaaatgtagcagaatttgagggcctgacagacttctcagatacgttcaagttgtaccgaggcaagtcggatgaaaatgaagatccttctgtggttggagagtttaagggctcctttcggatctaccctctgccggatgaccccagcgtgccagcccctcccagacagtttcgggaattacctgacagcgtcccacaggaatgcacggttaggatttacattgttcgaggcttagagctccagccccaggacaacaatggcctgtgtgacccttacataaaaataacactgggcaaaaaagtcattgaagaccgagatcactacattcccaacactctcaacccagtctttggcaggatgtacgaactgagctgctacttacctcaagaaaaagacctgaaaatttctgtctatgattatgacacctttacccgggatgaaaaagtaggagaaacaattattgatctggaaaaccgattcctttcccgctttgggtcccactgcggcataccagaggagtactgtgtttctggagtcaatacctggcgagatcaactgagaccaacacagctgcttcaaaatgtcgccagattcaaaggcttcccacaacccatcctttccgaagatgggagtagaatcagatatggaggacgagactacagcttggatgaatttgaagccaacaaaatcctgcaccagcacctcggggcccctgaagagcggcttgctcttcacatcctcaggactcaggggctggtccctgagcacgtggaaacaaggactttgcacagcaccttccagcccaacatttcccagggaaaacttcagatgtgggtggatgttttccccaagagtttggggccaccaggccctcctttcaacatcacaccccggaaagccaagaaatactacctgcgtgtgatcatctggaacaccaaggacgttatcttggacgagaaaagcatcacaggagaggaaatgagtgacatctacgtcaaaggctggattcctggcaatgaagaaaacaaacagaaaacagatgtccattacagatctttggatggtgaagggaattttaactggcgatttgttttcccgtttgactaccttccagccgaacaactctgtatcgttgcgaaaaaagagcatttctggagtattgaccaaacggaatttcgaatcccacccaggctgatcattcagatatgggacaatgacaagttttctctggatgactacttgggtttcctagaacttgacttgcgtcacacgatcattcctgcaaaatcaccagagaaatgcagattggacatgattccggacctcaaagccatgaacccccttaaagccaagacagcctccctctttgagcagaagtccatgaaaggatggtggccatgctacgcagagaaagatggcgcccgcgtaatggctgggaaagtggagatgacattggaaatcctcaacgagaaggaggccgacgagaggccagccgggaaggggcgggacgaacccaacatgaaccccaagctggacttaccaaatcgaccagaaacctccttcctctggttcaccaacccatgcaagaccatgaagttcatcgtgtggcgccgctttaagtgggtcatcatcggcttgctgttcctgcttatcctgctgctcttcgtggccgtgctcctctactctttgccgaactatttgtcaatgaagattgtaaagccaaatgtgtaacaaaggcaaaggcttcatttcaagagtcatccagcaatgagagaatcctgcctctgtagaccaacatccagtgtgattttgtgtctgagaccacaccccagtagcaggttacgccatgtcaccgagccccattgattcccagagggtcttagtcctggaaagtcaggccaacaagcaacgtttgcatcatgttatctcttaagtattaaaagttttattttctaaagtttaaatcatgtttttcaaaatatttttcaaggtggctggttccatttaaaaatcatctttttatatgtgtcttcggttctagacttcagcttttggaaattgctaaatagaattcaaaaatctctgcatcctgaggtgatatacttcatatttgtaatcaactgaaagagctgtgcattataaaatcagttagaatagttagaacaattcttatttatgcccacaaccattgctatattttgtatggatgtcataaaagtctatttaacctctgtaatgaaactaaataaaaatgtttcacctttaca

SEQ ID NO: 8258 - protein, 2061 aa, Homo sapiens; identical to SEQ ID NO: 1196

SEQ ID NO: 8259 - DNA, 6898 bp, Homo sapiens
ctgcgtagacgcggggagttcggtatcagtttacacgttgccttcagtaaaatccgccagaggtccacccattttgccttttccccttccttgccctgggagaaatcctcccttcactgggagagaacttctctcccagggcggtgcgacccggagctccagcgccctagtctccacttcgtttgctgaaacttgctttctaccagctaagaaccatgctgcgagtgattgtggaatctgccagcaatatccctaaaacgaaatttggcaagccggatcctattgtttctgtcatttttaaggatgagaaaaagaaaacaaagaaagttgataatgaattgaaccctgtctggaatgagattttggagtttgacttgaggggtataccactggacttttcatcttcccttgggattattgtgaaagattttgagacaattggacaaaataaattaattggcacggcgactgtagccctgaaggacctgactggtgaccagagcagatccctgccgtacaagctgatctccctgctaaatgaaaaagggcaagatactggggccaccattgacttggtgatcggctatgatccgccttctgctccacatccaaatgacctgagcgggcccagcgtgccaggcatgggaggagatggggaagaagatgaaggtgatgaagacaggttggacaatgcagtcaggggccctgggcccaaggggccagttgggacggtgtcggaagctcagcttgctcggaggctcaccaaagtaaagaacagccggcggatgctgtcaaataagccacaggacttccagatccgcgtccgagtgattgagggccgacagttaagtggtaacaacataaggcctgtggtcaaagttcacgtctgtggccagacacaccgaacaagaatcaagagaggaaacaaccctttttttgatgagttgtttttctacaatgtcaacatgaccccttctgaattgatggatgagatcatcagcatccgggtttataattctcactctctgcgggcagattgtctgatgggggaatttaagattgatgttggatttgtttatgatgaacctggccatgctgtcatgagaaagtggcttcttctcaatgacccggaagataccagttcaggttctaaaggttatatgaaagtcagcatgtttgtcctgggaaccggagatgagcctcctcctgagagacgagatcgtgataatgacagtgatgatgtggagagtaatttgttactccctgctggcattgccctccggtgggtgaccttcttgctgaaaatctaccgagctgaggacatcccccagatggatgatgccttctcacagacagtaaaggaaatatttggaggcaatgcagataagaaaaatctcgtggatccttttgtagaagtttcctttgctggaaaaaaggtttgtacaaacataattgagaaaaatgcaaacccagagtggaatcaggtcgtcaatcttcagatcaagtttccttcagtgtgtgaaaaaataaaactaacaatatatgactgggaccgtcttactaaaaatgatgtagttggaacaacatatctacacctctctaaaattgctgcctctggtggggaagtggaagtaaacacaggagaaacagaggtaggctttgttccaacgtttggaccttgttacctgaatctttatggaagccccagagagtacacgggattcccagacccctatgatgagctgaatactggaaagggggaaggagttgcctacagaggcaggatcttggttgaattagccacttttcttgagaagacaccaccagataaaaagcttgagcccatttcaaatgatgacctgctggttgttgagaaataccagcgaaggcggaagtacagcctgtctgccgtgtttcattcagccaccatgttgcaagatgttggtgaggccattcagtttgaagtcagcattgggaactatggcaacaagtttgacaccacctgtaagcctttggcatcaacaactcagtacagccgtgctgtatttgatggcaactactattattacttgccttgggcccacaccaagccagttgttaccctgacttcatactgggaggatattagtcatcgcctggatgcggtgaacactctcctagctatggcagaacggctgcaaacaaatatagaagctctaaaatcagggatacaaggtaaaattcctgcaaaccagctggctgaattgtggctgaagctgatagatgaagttatagaagacacgagatacacgttgcctctcacagaaggaaaagccaacgtcacagttctcgatactcagatccgaaagctgcggtccaggtctctctcccaaatacatgaggcggctgtgaggatgaggtcggaagccacagatgtgaagtccacactggcagaaattgaggactggcttgataaattaatgcagctgactgaagagccacagaacagcatgcctgacatcatcatctggatgatccggggagagaagagactggcctatgcacgaattcccgcacatcaggtcttgtactccaccagtggtgagaatgcatctggaaaatactgtgggaaaacccaaaccatctttctgaagtatccacaggagaaaaacaacgggccaaaggtgcctgtggagttgcgagtgaacatctggctaggcttaagtgctgtggagaagaagtttaacagcttcgcagaaggaactttcaccgtctttgctgaaatgtatgaaaatcaagctctcatgtttggaaaatggggtacttctggattagtaggacgtcataagttttctgatgtcacaggaaaaataaaactcaagagggaattttttctgcctccaaaaggctgggaatgggaaggagagtggatagttgatcctgaaagaagcttgctgactgaggcagatgcaggtcacacggagttcactgatgaagtctatcagaacgagagccgctaccccgggggcgactggaagccggccgaggacacctacacggatgcgaacggcgataaagcagcatcacccagcgagttgacttgtcctccaggttgggaatgggaagatgatgcatggtcttatgacataaatcgagcggtggatgagaaaggctgggaatatggaatcaccattcctcctgatcataagcccaaatcctgggttgcagcagagaaaatgtaccacactcatagacggcgaaggctggtccgaaaacgcaagaaagatttaacacagactgcttcaagcaccgcaagggccatggaggaattgcaagaccaagagggctgggaatatgcttctctaattggctggaaatttcactggaaacaacgtagttcagataccttccgccgcagacgctggaggagaaaaatggctccttcagaaacacatggtgcagctgccatctttaaacttgaaggtgcccttggggcagacactaccgaagatggggatgagaagagcctggagaaacagaagcacagtgccaccactgtgttcggagcaaacacccccattgtttcctgcaattttgacagagtctacatctaccatctgcgctgctatgtctatcaagccagaaacctcttggctttagataaggatagcttttcagatccatatgctcatatctgtttcctccatcggagcaaaaccactgagatcatccattcaaccctgaatcccacgtgggaccaaacaattatattcgatgaagttgaaatctatggggaaccccaaacagttctacagaatccacccaaagttatcatggaactttttgacaatgaccaagtgggcaaagatgaatttttaggacgaagcattttctctcctgtggtgaaactgaactcagaaatggacatcacacccaaacttctctggcacccagtaatgaatggagacaaagcctgcggggatgttcttgtaactgcagagctgattctgaggggcaaggatggctccaaccttcccattcttccccctcaaagggcgccaaatctatacatggtcccccaggggatcaggcctgtggtccagctcactgccattgagattctagcttggggcttaagaaatatgaaaaacttccagatggcttctatcacatcccccagtcttgttgtggagtgtggaggagaaagggtggaatcggtggtgatcaaaaaccttaagaagacacccaactttccaagttctgttctcttcatgaaagtgttcttgcccaaggaggaattgtacatgcccccactggtgatcaaggtcatcgaccacaggcagtttgggcggaagcctgtcgtcggccagtgcaccatcgagcgcctggaccgctttcgctgtgacccttatgcagggaaagaggacatcgtcccacagctcaaagcctcccttctgtctgccccaccatgccgggacatcgttatcgaaatggaagacaccaaaccattactggcttctaagctgacagaaaaggaggaagaaatcgtggactggtggagtaaattttatgcttcctcaggggaacatgaaaaatgcggacagtatattcagaaaggctattccaagctcaagatatataattgtgaactagaaaatgtagcagaatttgagggcctgacagacttctcagatacgttcaagttgtaccgaggcaagtcggatgaaaatgaagatccttctgtggttggagagtttaagggctcctttcggatctaccctctgccggatgaccccagcgtgccagcccctcccagacagtttcgggaattacctgacagcgtcccacaggaatgcacggttaggatttacattgttcgaggcttagagctccagccccaggacaacaatggcctgtgtgacccttacataaaaataacactgggcaaaaaagtcattgaagaccgagatcactacattcccaacactctcaacccagtctttggcaggatgtacgaactgagctgctacttacctcaagaaaaagacctgaaaatttctgtctatgattatgacacctttacccgggatgaaaaagtaggagaaacaattattgatctggaaaaccgattcctttcccgctttgggtcccactgcggcataccagaggagtactgtgtttctggagtcaatacctggcgagatcaactgagaccaacacagctgcttcaaaatgtcgccagattcaaaggcttcccacaacccatcctttccgaagatgggagtagaatcagatatggaggacgagactacagcttggatgaatttgaagccaacaaaatcctgcaccagcacctcggggcccctgaagagcggcttgctcttcacatcctcaggactcaggggctggtccctgagcacgtggaaacaaggactttgcacagcaccttccagcccaacatttcccagggaaaacttcagatgtgggtggatgttttccccaagagtttggggccaccaggccctcctttcaacatcacaccccggaaagccaagaaatactacctgcgtgtgatcatctggaacaccaaggacgttatcttggacgagaaaagcatcacaggagaggaaatgagtgacatctacgtcaaaggctggattcctggcaatgaagaaaacaaacagaaaacagatgtccattacagatctttggatggtgaagggaattttaactggcgatttgttttcccgtttgactaccttccagccgaacaactctgtatcgttgcgaaaaaagagcatttctggagtattgaccaaacggaatttcgaatcccacccaggctgatcattcagatatgggacaatgacaagttttctctggatgactacttgggtttcctagaacttgacttgcgtcacacgatcattcctgcaaaatcaccagagaaatgcagattggacatgattccggacctcaaagccatgaacccccttaaagccaagacagcctccctctttgagcagaagtccatgaaaggatggtggccatgctacgcagagaaagatggcgcccgcgtaatggctgggaaagtggagatgacattggaaatcctcaacgagaaggaggccgacgagaggccagccgggaaggggcgggacgaacccaacatgaaccccaagctggacttaccaaatcgaccagaaacctccttcctctggttcaccaacccatgcaagaccatgaagttcatcgtgtggcgccgctttaagtgggtcatcatcggcttgctgttcctgcttatcctgctgctcttcgtggccgtgctcctctactctttgccgaactatttgtcaatgaagattgtaaagccaaatgtgtaacaaaggcaaaggcttcatttcaagagtcatccagcaatgagagaatcctgcctctgtagaccaacatccagtgtgattttgtgtctgagaccacaccccagtagcaggttacgccatgtcaccgagccccattgattcccagagggtcttagtcctggaaagtcaggccaacaagcaacgtttgcatcatgttatctcttaagtattaaaagttttattttctaaagtttaaatcatgtttttcaaaatatttttcaaggtggctggttccatttaaaaatcatctttttatatgtgtcttcggttctagacttcagcttttggaaattgctaaatagaattcaaaaatctctgcatcctgaggtgatatacttcatatttgtaatcaactgaaagagctgtgcattataaaatcagttagaatagttagaacaattcttatttatgcccacaaccattgctatattttgtatggatgtcataaaagtctatttaacctctgtaatgaaactaaataaaaatgtttcacctttaca

SEQ ID NO: 8260 - protein, 2048 aa, Homo sapiens; identical to SEQ ID NO: 1198

SEQ ID NO: 8261 - DNA, 5473 bp, Homo sapiens
ctgcgtagacgcggggagttcggtatcagtttacacgttgccttcagtaaaatccgccagaggtccacccattttgccttttccccttccttgccctgggagaaatcctcccttcactgggagagaacttctctcccagggcggtgcgacccggagctccagcgccctagtctccacttcgtttgctgaaacttgctttctaccagctaagaaccatgctgcgagtgattgtggaatctgccagcaatatccctaaaacgaaatttggcaagccggatcctattgtttctgtcatttttaaggatgagaaaaagaaaacaaagaaagttgataatgaattgaaccctgtctggaatgagattttggagtttgacttgaggggtataccactggacttttcatcttcccttgggattattgtgaaagattttgagacaattggacaaaataaattaattggcacggcgactgtagccctgaaggacctgactggtgaccagagcagatccctgccgtacaagctgatctccctgctaaatgaaaaagggcaagatactggggccaccattgacttggtgatcggctatgatccgccttctgctccacatccaaatgacctgagcgggcccagcgtgccaggcatgggaggagatggggaagaagatgaaggtgatgaagacaggttggacaatgcagtcaggggccctgggcccaaggggccagttgggacggtgtcggaagctcagcttgctcggaggctcaccaaagtaaagaacagccggcggatgctgtcaaataagccacaggacttccagatccgcgtccgagtgattgagggccgacagttaagtggtaacaacataaggcctgtggtcaaagttcacgtctgtggccagacacaccgaacaagaatcaagagaggaaacaaccctttttttgatgagttgtttttctacaatgtcaacatgaccccttctgaattgatggatgagatcatcagcatccgggtttataattctcactctctgcgggcagattgtctgatgggggaatttaagattgatgttggatttgtttatgatgaacctggccatgctgtcatgagaaagtggcttcttctcaatgacccggaagataccagttcaggttctaaaggttatatgaaagtcagcatgtttgtcctgggaaccggagatgagcctcctcctgagagacgagatcgtgataatgacagtgatgatgtggagagtaatttgttactccctgctggcattgccctccggtgggtgaccttcttgctgaaaatctaccgagctgaggacatcccccagatggatgatgccttctcacagacagtaaaggaaatatttggaggcaatgcagataagaaaaatctcgtggatccttttgtagaagtttcctttgctggaaaaaaggtttgtacaaacataattgagaaaaatgcaaacccagagtggaatcaggtcgtcaatcttcagatcaagtttccttcagtgtgtgaaaaaataaaactaacaatatatgactgggaccgtcttactaaaaatgatgtagttggaacaacatatctacacctctctaaaattgctgcctctggtggggaagtggaagatttctcatcttcgggaactggggctgcatcatatacagtaaacacaggagaaacagaggtaggctttgttccaacgtttggaccttgttacctgaatctttatggaagccccagagagtacacgggattcccagacccctatgatgagctgaatactggaaagggggaaggagttgcctacagaggcaggatcttggttgaattagccacttttcttgagaagacaccaccagataaaaagcttgagcccatttcaaatgatgacctgctggttgttgagaaataccagcgaaggcggaagtacagcctgtctgccgtgtttcattcagccaccatgttgcaagatgttggtgaggccattcagtttgaagtcagcattgggaactatggcaacaagtttgacaccacctgtaagcctttggcatcaacaactcagtacagccgtgctgtatttgatggcaactactattattacttgccttgggcccacaccaagccagttgttaccctgacttcatactgggaggatattagtcatcgcctggatgcggtgaacactctcctagctatggcagaacggctgcaaacaaatatagaagctctaaaatcagggatacaaggtaaaattcctgcaaaccagctggctgaattgtggctgaagctgatagatgaagttatagaagacacgagatacacgttgcctctcacagaaggaaaagccaacgtcacagttctcgatactcagatccgaaagctgcggtccaggtctctctcccaaatacatgaggcggctgtgaggatgaggtcggaagccacagatgtgaagtccacactggcagaaattgaggactggcttgataaattaatgcagctgactgaagagccacagaacagcatgcctgacatcatcatctggatgatccggggagagaagagactggcctatgcacgaattcccgcacatcaggtcttgtactccaccagtggtgagaatgcatctggaaaatactgtgggaaaacccaaaccatctttctgaagtatccacaggagaaaaacaacgggccaaaggtgcctgtggagttgcgagtgaacatctggctaggcttaagtgctgtggagaagaagtttaacagcttcgcagaaggaactttcaccgtctttgctgaaatgtatgaaaatcaagctctcatgtttggaaaatggggtacttctggattagtaggacgtcataagttttctgatgtcacaggaaaaataaaactcaagagggaattttttctgcctccaaaaggctgggaatgggaaggagagtggatagttgatcctgaaagaagcttgctgactgaggcagatgcaggtcacacggagttcactgatgaagtctatcagaacgagagccgctaccccgggggcgactggaagccggccgaggacacctacacggatgcgaacggcgataaagcagcatcacccagcgagttgacttgtcctccaggttgggaatgggaagatgatgcatggtcttatgacataaatcgagcggtggatgagaaaggctgggaatatggaatcaccattcctcctgatcataagcccaaatcctgggttgcagcagagaaaatgtaccacactcatagacggcgaaggctggtccgaaaacgcaagaaagatttaacacagactgcttcaagcaccgcaagggccatggaggaattgcaagaccaagagggctgggaatatgcttctctaattggctggaaatttcactggaaacaacgtagttcagataccttccgccgcagacgctggaggagaaaaatggctccttcagaaacacatggtgcagctgccatctttaaacttgaaggtgcccttggggcagacactaccgaagatggggatgagaagagcctggagaaacagaagcacagtgccaccactgtgttcggagcaaacacccccattgtttcctgcaattttgacagagtctacatctaccatctgcgctgctatgtctatcaagccagaaacctcttggctttagataaggatagcttttcagatccatatgctcatatctgtttcctccatcggagcaaaaccactgagatcatccattcaaccctgaatcccacgtgggaccaaacaattatattcgatgaagttgaaatctatggggaaccccaaacagttctacagaatccacccaaagttatcatggaactttttgacaatgaccaagtggtaggtcccaacaaaatcctgcaccagcacctcggggcccctgaagagcggcttgctcttcacatcctcaggactcaggggctggtccctgagcacgtggaaacaaggactttgcacagcaccttccagcccaacatttcccagggaaaacttcagatgtgggtggatgttttccccaagagtttggggccaccaggccctcctttcaacatcacaccccggaaagccaagaaatactacctgcgtgtgatcatctggaacaccaaggacgttatcttggacgagaaaagcatcacaggagaggaaatgagtgacatctacgtcaaaggctggattcctggcaatgaagaaaacaaacagaaaacagatgtccattacagatctttggatggtgaagggaattttaactggcgatttgttttcccgtttgactaccttccagccgaacaactctgtatcgttgcgaaaaaagagcatttctggagtattgaccaaacggaatttcgaatcccacccaggctgatcattcagatatgggacaatgacaagttttctctggatgactacttgggtttcctagaacttgacttgcgtcacacgatcattcctgcaaaatcaccagagaaatgcagattggacatgattccggacctcaaagccatgaacccccttaaagccaagacagcctccctctttgagcagaagtccatgaaaggatggtggccatgctacgcagagaaagatggcgcccgcgtaatggctgggaaagtggagatgacattggaaatcctcaacgagaaggaggccgacgagaggccagccgggaaggggcgggacgaacccaacatgaaccccaagctggacttaccaaatcgaccagaaacctccttcctctggttcaccaacccatgcaagaccatgaagttcatcgtgtggcgccgctttaagtgggtcatcatcggcttgctgttcctgcttatcctgctgctcttcgtggccgtgctcctctactctttgccgaactatttgtcaatgaagattgtaaagccaaatgtgtaacaaaggcaaaggcttcatttcaagagtcatccagcaatgagagaatcctgcctctgtagaccaacatccagtgtgattttgtgtctgagaccacaccccagtagcaggttacgccatgtcaccgagccccattgattcccagagggtcttagtcctggaaagtcaggccaacaagcaacgtttgcatcatgttatctcttaagtattaaaagttttattttctaaagtttaaatcatgtttttcaaaatatttttcaaggtggctggttccatttaaaaatcatctttttatatgtgtcttcggttctagacttcagcttttggaaattgctaaatagaattcaaaaatctctgcatcctgaggtgatatacttcatatttgtaatcaactgaaagagctgtgcattataaaatcagttagaatagttagaacaattcttatttatgcccacaaccattgctatattttgtatggatgtcataaaagtctatttaacctctgtaatgaaactaaataaaaatgtttcacctttaca

SEQ ID NO: 8262 - protein, 1573 aa, Homo sapiens
MLRVIVESASNIPKTKFGKPDPIVSVIFKDEKKKTKKVDNELNPVWNEILEFDLRGIPLDFSSSLGIIVKDFETIGQNKLIGTATVALKDLTGDQSRSLPYKLISLLNEKGQDTGATIDLVIGYDPPSAPHPNDLSGPSVPGMGGDGEEDEGDEDRLDNAVRGPGPKGPVGTVSEAQLARRLTKVKNSRRMLSNKPQDFQIRVRVIEGRQLSGNNIRPVVKVHVCGQTHRTRIKRGNNPFFDELFFYNVNMTPSELMDEIISIRVYNSHSLRADCLMGEFKIDVGFVYDEPGHAVMRKWLLLNDPEDTSSGSKGYMKVSMFVLGTGDEPPPERRDRDNDSDDVESNLLLPAGIALRWVTFLLKIYRAEDIPQMDDAFSQTVKEIFGGNADKKNLVDPFVEVSFAGKKVCTNIIEKNANPEWNQVVNLQIKFPSVCEKIKLTIYDWDRLTKNDVVGTTYLHLSKIAASGGEVEDFSSSGTGAASYTVNTGETEVGFVPTFGPCYLNLYGSPREYTGFPDPYDELNTGKGEGVAYRGRILVELATFLEKTPPDKKLEPISNDDLLVVEKYQRRRKYSLSAVFHSATMLQDVGEAIQFEVSIGNYGNKFDTTCKPLASTTQYSRAVFDGNYYYYLPWAHTKPVVTLTSYWEDISHRLDAVNTLLAMAERLQTNIEALKSGIQGKIPANQLAELWLKLIDEVIEDTRYTLPLTEGKANVTVLDTQIRKLRSRSLSQIHEAAVRMRSEATDVKSTLAEIEDWLDKLMQLTEEPQNSMPDIIIWMIRGEKRLAYARIPAHQVLYSTSGENASGKYCGKTQTIFLKYPQEKNNGPKVPVELRVNIWLGLSAVEKKFNSFAEGTFTVFAEMYENQALMFGKWGTSGLVGRHKFSDVTGKIKLKREFFLPPKGWEWEGEWIVDPERSLLTEADAGHTEFTDEVYQNESRYPGGDWKPAEDTYTDANGDKAASPSELTCPPGWEWEDDAWSYDINRAVDEKGWEYGITIPPDHKPKSWVAAEKMYHTHRRRRLVRKRKKDLTQTASSTARAMEELQDQEGWEYASLIGWKFHWKQRSSDTFRRRRWRRKMAPSETHGAAAIFKLEGALGADTTEDGDEKSLEKQKHSATTVFGANTPIVSCNFDRVYIYHLRCYVYQARNLLALDKDSFSDPYAHICFLHRSKTTEIIHSTLNPTWDQTIIFDEVEIYGEPQTVLQNPPKVIMELFDNDQVVGPNKILHQHLGAPEERLALHILRTQGLVPEHVETRTLHSTFQPNISQGKLQMWVDVFPKSLGPPGPPFNITPRKAKKYYLRVIIWNTKDVILDEKSITGEEMSDIYVKGWIPGNEENKQKTDVHYRSLDGEGNFNWRFVFPFDYLPAEQLCIVAKKEHFWSIDQTEFRIPPRLIIQIWDNDKFSLDDYLGFLELDLRHTIIPAKSPEKCRLDMIPDLKAMNPLKAKTASLFEQKSMKGWWPCYAEKDGARVMAGKVEMTLEILNEKEADERPAGKGRDEPNMNPKLDLPNRPETSFLWFTNPCKTMKFIVWRRFKWVIIGLLFLLILLLFVAVLLYSLPNYLSMKIVKPNV

SEQ ID NO: 8263 - DNA, 1614 bp, Homo sapiens
ctgcgtagacgcggggagttcggtatcagtttacacgttgccttcagtaaaatccgccagaggtccacccattttgccttttccccttccttgccctgggagaaatcctcccttcactgggagagaacttctctcccagggcggtgcgacccggagctccagcgccctagtctccacttcgtttgctgaaacttgctttctaccagctaagaaccatgctgcgagtgattgtggaatctgccagcaatatccctaaaacgaaatttggcaagccggatcctattgtttctgtcatttttaaggatgagaaaaagaaaacaaagaaagttgataatgaattgaaccctgtctggaatgagattttggagtttgacttgaggggtataccactggacttttcatcttcccttgggattattgtgaaagattttgagacaattggacaaaataaattaattggcacggcgactgtagccctgaaggacctgactggtgaccagagcagatccctgccgtacaagctgatctccctgctaaatgaaaaagggcaagatactggggccaccattgacttggtgatcggctatgatccgccttctgctccacatccaaatgacctgagcgggcccagcgtgccaggcatgggaggagatggggaagaagatgaaggtgatgaagacaggttggacaatgcagtcaggggccctgggcccaaggggccagttgggacggtgtcggaagctcagcttgctcggaggctcaccaaagtaaagaacagccggcggatgctgtcaaataagccacaggacttccagatccgcgtccgagtgattgagggccgacagttaagtggtaacaacataaggcctgtggtcaaagttcacgtctgtggccagacacaccgaacaagaatcaagagaggaaacaaccctttttttgatgagttgtttttctacaatgtcaacatgaccccttctgaattgatggatgagatcatcagcatccgggtttataattctcactctctgcgggcagattgtctgatgggggaatttaagattgatgttggatttgtttatgatgaacctggccatgctgtcatgagaaagtggcttcttctcaatgacccggaagataccagttcaggttctaaaggttatatgaaagtcagcatgtttgtcctgggaaccggagatgagcctcctcctgagagacgagatcgtgataatgacagtgatgatgtggagagtaatttgttactccctgctggcattgccctccggtgggtgaccttcttgctgaaaatctaccgagctgaggacatcccccagatggatgatgccttctcacagacagtaaaggaaatatttggaggcaatgcagataagaaaaatctcgtggatccttttgtagaagtttcctttgctggaaaaaaggtttgtacaaacataattgagaaaaatgcaaacccagagtggaatcaggtcgtcaatcttcagatcaagtttccttcagtgtgtgaaaaaataaaactaacaatatatgactggtgagttgaaaatacgtatgtgtctaattcaacataaaataaacattggatattgtgaaacatta

SEQ ID NO: 8264 - protein, 445 aa, Homo sapiens
MLRVIVESASNIPKTKFGKPDPIVSVIFKDEKKKTKKVDNELNPVWNEILEFDLRGIPLDFSSSLGIIVKDFETIGQNKLIGTATVALKDLTGDQSRSLPYKLISLLNEKGQDTGATIDLVIGYDPPSAPHPNDLSGPSVPGMGGDGEEDEGDEDRLDNAVRGPGPKGPVGTVSEAQLARRLTKVKNSRRMLSNKPQDFQIRVRVIEGRQLSGNNIRPVVKVHVCGQTHRTRIKRGNNPFFDELFFYNVNMTPSELMDEIISIRVYNSHSLRADCLMGEFKIDVGFVYDEPGHAVMRKWLLLNDPEDTSSGSKGYMKVSMFVLGTGDEPPPERRDRDNDSDDVESNLLLPAGIALRWVTFLLKIYRAEDIPQMDDAFSQTVKEIFGGNADKKNLVDPFVEVSFAGKKVCTNIIEKNANPEWNQVVNLQIKFPSVCEKIKLTIYDW

SEQ ID NO: 8265 - DNA, 260 bp, Homo sapiens
gtcataatctagtatgcatagattgtaaacttttagaaattagaaacttgaaaacctacacttttgctttggtgattttacaggtttgtacaaacataattgagaaaaatgcaaacccagagtggaatcaggtcgtcaatcttcagatcaagtttccttcagtgtgtgaaaaaataaaactaacaatatatgactggtgagttgaaaatacgtatgtgtctaattcaacataaaataaacattggatattgtgaaacatt

SEQ ID NO: 8266 - protein, 65 aa, Homo sapiens
HNLVCIDCKLLEIRNLKTYTFALVILQVCTNIIEKNANPEWNQVVNLQIKFPSVCEKIKLTIYDW

SEQ ID NO: 8267 - DNA, 1619 bp, Homo sapiens
tgggagaaatcctcccttcactgggagagaacttctctcccagggcggtgcgacccggagctccagcgccctagtctccacttcgtttgctgaaacttgctttctaccagctaagaaccatgctgcgagtgattgtggaatctgccagcaatatccctaaaacgaaatttggcaagccggatcctattgtttctgtcatttttaagggttccatgagccagatccgaattgaggctggagtgagtgcctgtgagccaggggtggccattctgccctaagttccatgcggacagccaggctgtgaagctgaatctagctgagattagactacacagacctctgagaccaatttcaactctgagacttgatgattcttccaaacagtcctccaaacagaacagatgagaaaaagaaaacaaagaaagttgataatgaattgaaccctgtctggaatgagattttggagtttgacttgaggggtataccactggacttttcatcttcccttgggattattgtgaaagattttgagacaattggacaaaataaattaattggcacggcgactgtagccctgaaggacctgactggtgaccagagcagatccctgccgtacaagctgatctccctgctaaatgaaaaagggcaagatactggggccaccattgacttggtgatcggctatgatccgccttctgctccacatccaaatgacctgagcgggcccagcgtgccaggcatgggaggagatggggaagaagatgaaggtgatgaagacaggttggacaatgcagtcaggggccctgggcccaaggggccagttgggacggtgtcggaagctcagcttgctcggaggctcaccaaagtaaagaacagccggcggatgctgtcaaataagccacaggacttccagatccgcgtccgagtgattgagggccgacagttaagtggtaacaacataaggcctgtggtcaaagttcacgtctgtggccagacacaccgaacaagaatcaagagaggaaacaaccctttttttgatgagttgtttttctacaatgtcaacatgaccccttctgaattgatggatgagatcatcagcatccgggtttataattctcactctctgcgggcagattgtctgatgggggaatttaagattgatgttggatttgtttatgatgaacctggccatgctgtcatgagaaagtggcttcttctcaatgacccggaagataccagttcaggttctaaaggttatatgaaagtcagcatgtttgtcctgggaaccggagatgagcctcctcctgagagacgagatcgtgataatgacagtgatgatgtggagagtaatttgttactccctgctggcattgccctccggtgggtgaccttcttgctgaaaatctaccgagctgaggacatcccccagatggatgatgccttctcacagacagtaaaggaaatatttggaggcaatgcagataagaaaaatctcgtggatccttttgtagaagtttcctttgctggaaaaaaggtttgtacaaacataattgagaaaaatgcaaacccagagtggaatcaggtcgtcaatcttcagatcaagtttccttcagtgtgtg

SEQ ID NO: 8268 - protein, 416 aa, Homo sapiens
MILPNSPPNRTDEKKKTKKVDNELNPVWNEILEFDLRGIPLDFSSSLGIIVKDFETIGQNKLIGTATVALKDLTGDQSRSLPYKLISLLNEKGQDTGATIDLVIGYDPPSAPHPNDLSGPSVPGMGGDGEEDEGDEDRLDNAVRGPGPKGPVGTVSEAQLARRLTKVKNSRRMLSNKPQDFQIRVRVIEGRQLSGNNIRPVVKVHVCGQTHRTRIKRGNNPFFDELFFYNVNMTPSELMDEIISIRVYNSHSLRADCLMGEFKIDVGFVYDEPGHAVMRKWLLLNDPEDTSSGSKGYMKVSMFVLGTGDEPPPERRDRDNDSDDVESNLLLPAGIALRWVTFLLKIYRAEDIPQMDDAFSQTVKEIFGGNADKKNLVDPFVEVSFAGKKVCTNIIEKNANPEWNQVVNLQIKFPSV

SEQ ID NO: 8269 - DNA, 780 bp, Homo sapiens
ttagatcatgtacaaaccttttttccagcaaaggaaacttctacaaaaggatccacgagatttttcttatctgcattgcctccaaatatttcctttactgtctgtgagaaggcatcatccactggaaggtaatagttatacagcagaaattaaattcaattcccagaaatttggcaaaattttaaaagttctcttatacatcaaaatagttgcaacaggctaggcgcagtggctcatgcctgtaatcccaggactttgagaggccaaggctggtggatcatgaggtcagaagagcaaggccatcctggtcaacatggtgaaaccccttctctattgaaaatacaaaaattagctggatagcaaacaccttgatttgataataacagttcacattttcatttgggataaaaggggttggaagtgctgactgctcatatctctttagcatcctctagaataaagagaagatatagaatagcaagagagagagtcaaatgggccaaaggcaggtactcaacaaggaacatgatcagcaaccaactagctgtgccatgagcctgctcaggtagctttcaactgggccagaatgaatgaaaataagcccatgaagccctttcagaagaaaaacatacgatagggacacgaatcactattaaagtttgatttttaacacatttcatcacacacataatcaacaattctggggcaagattaaatcagtacatactctgggggatgtcctcagctcggtagattttcagcaagaaggtcacccaccgg

SEQ ID NO: 8270 - protein, 71 aa, Homo sapiens
MYKPFFQQRKLLQKDPRDFSYLHCLQIFPLLSVRRHHPLEGNSYTAEIKFNSQKFGKILKVLLYIKIVATG

SEQ ID NO: 8271 - DNA, 726 bp, Homo sapiens
gggcctccccatacccacctttctctcaaaaatgtgtcaaatgggctggaggcagtgggtcatgcctataatcccagcactttggaaggccaaggtaggagcactgcttgaggccaaaagttcaagaccagcctgggcaacatagcaagactactgtctctatttaaaaaaaaaaaaaagaagaagaagaagaagaaagaaatacataaaataaggtaaattaaaatcctgatctctatttactttttagcttaactatagattgtagttgattaaatatattatttgtgattatgtcaaattttcttgaatttctctgaaacagactaggactatatcattttgacctagagcacctttctcccaattgaaagcaggcctgagtttgagaatcatcttttactctcactgaatgaactttgttgtattttttttcctccataaaagatcaagtttttgttttattttattttattttgagatagagcctcactctgtcacctaggctggaggctggcatatactggcttgatcttggctaactgcaagattcaagtgattctcatgcctcagcctcccaagtggccgggattacaggcatgagccactgcgcctagcctgttgcaactattttgatgtataagagaacttttaaaattttgccaaatttctgggaattgaatttaatttctgctgtataactattaccttccagtggatgatgcc

SEQ ID NO: 8272 - protein, 37 aa, Homo sapiens
MCQMGWRQWVMPIIPALWKAKVGALLEAKSSRPAWAT

SEQ ID NO: 8273 - DNA, 792 bp, Homo sapiens
ccttcactgggagagaacttctctcccagggcggtgcgacccggagctccagcgccctagtctccacttcgtttgctgaaacttgctttctaccagctaagaaccatgctgcgagtgattgtggaatctgccagcaatatccctaaaacgaaatttggcaagccggatcctattgtttctgtcatttttaaggatgagaaaaagaaaacaaagaaagttgataatgaattgaaccctgtctggaatgagattttggagtttgacttgaggggtataccactggacttttcatcttcccttgggattattgtgaaagattttgagacaattggacaaaataaattaattggcacggcgactgtagccctgaaggacctgactggtgaccagagcagatccctgccgtacaagctgatctccctgctaaatgaaaaagggcaagatactggggccaccattgacttggtgatcggctatgatccgccttctgctccacatccaaatgacctgagcgggcccagcgtgccaggcatgggaggtaagctgacccttctgaaggcccagccacccccagggggaggctgctaaagacacacaggagagtgtctggagaaaccctgccattgatcacaagcctgtagctccctgcccacccagacaggggccccgagaggcaggtggggctgcctgaattgggacattgcaattgtttatgaaatgcccttcaaggtagaggggaagggtgaaccaaccctttactgaacaacctcacggtgagcacaaaaagcacat

SEQ ID NO: 8274 - protein, 160 aa, Homo sapiens
MLRVIVESASNIPKTKFGKPDPIVSVIFKDEKKKTKKVDNELNPVWNEILEFDLRGIPLDFSSSLGIIVKDFETIGQNKLIGTATVALKDLTGDQSRSLPYKLISLLNEKGQDTGATIDLVIGYDPPSAPHPNDLSGPSVPGMGGKLTLLKAQPPPGGGC

SEQ ID NO: 8275 - DNA, 2672 bp, Homo sapiens
gccgcgggattcaaactcccggaagcggcatccacacctgatggtgtgactcggccgacgcgagcgccgcgcttcgcttcagctgctagctggcccaagggaggcgaccgcggagggtggcgaggggcggccaggacccgcagccccggggccgggccggtccggaccgccagggagggcaggtcagtgggcagatcgcgtccgcgggattcaatctctgcccgctctgataacagtccttttccctggcgctcacttcgtgcctggcacccggctgggcgcctcaagaccgttgtctcttcgatcgcttctttggacttggcgaccatttcagagatgtcttccagaagtaccaaagatttaattaaaagtaagtggggatcgaagcctagtaactccaaatccgaaactacattagaaaaattaaagggagaaattgcacacttaaagacatcagtggatgaaatcacaagtgggaaaggaaagctgactgataaagagagacacagacttttggagaaaattcgagtccttgaggctgagaaggagaagaatgcttatcaactcacagagaaggacaaagaaatacagcgactgagagaccaactgaaggccagatatagtactaccacattgcttgaacagctggaagagacaacgagagaaggagaaaggagggagcaggtgttgaaagccttatctgaagagaaagacgtattgaaacaacagttgtctgctgcaacctcacgaattgctgaacttgaaagcaaaaccaatacactccgtttatcacagactgtggctccaaactgcttcaactcatcaataaataatattcatgaaatggaaatacagctgaaagatgctctggagaaaaatcagcagtggctcgtgtatgatcagcagcgggaagtctatgtaaaaggacttttagcaaagatctttgagttggaaaagaaaacggaaacagctgctcattcactcccacagcagacaaaaaagcctgaatcagaaggttatcttcaagaagagaagcagaaatgttacaacgatctcttggcaagtgcaaaaaaagatcttgaggttgaacgacaaaccataactcagctgagttttgaactgagtgaatttcgaagaaaatatgaagaaacccaaaaagaagttcacaatttaaatcagctgttgtattcacaaagaagggcagatgtgcaacatctggaagatgataggcataaaacagagaagatacaaaaactcagggaagagaatgatattgctaggggaaaacttgaagaagagaagaagagatccgaagagctcttatctcaggtccagtttctttacacatctctgctaaagcagcaagaagaacaaacaagggtagctctgttggaacaacagatgcaggcatgtactttagactttgaaaatgaaaaactcgaccgtcaacatgtgcagcatcaattgcatgtaattcttaaggagctccgaaaagcaagaaatcaaataacacagttggaatccttgaaacagcttcatgagtttgccatcacagagccattagtcactttccaaggagagactgaaaacagagaaaaagttgccgcctcaccaaaaagtcccactgctgcactcaatgaaagcctggtggaatgtcccaagtgcaatatacagtatccagccactgagcatcgcgatctgcttgtccatgtggaatactgttcaaagtagcaaaataagtatttgttttgatattaaaagattcaatactgtattttctgttagcttgtgggcattttgaattatatatttcacattttgcataaaactgcctatctacctttgacactccagcatgctagtgaatcatgtatcttttaggctgctgtgcatttctcttggcagtgatacctccctgacatggttcatcatcaggctgcaatgacagaatgtggtgagcagcgtctactgagactactaacattttgcactgtcaaaatacttggtgaggaaaagatagctcaggttattgctaatgggttaatgcaccagcaagcaaaatattttatgttttgggggttttgaaaaatcaaagataattaaccaaggatcttaactgtgttcgcattttttatccaagcacttagaaaacctacaatcctaattttgatgtccattgttaagaggtggtgatagatactattttttttttcatattgtatagcggttattagaaaagttggggattttcttgatctttattgctgcttaccattgaaacttaacccagctgtgttccccaactctgttctgcgcacgaaacagtatctgtttgaggcataatcttaagtggccacacacaatgttttctcttatgttatctggcagtaactgtaacttgaattacattagcacattctgcttagctaaaattgttaaaataaactttaataaacccatgtagccctctcatttgattgacagtattttagttatttttggcattcttaaagctgggcaatgtaatgatcagatctttgtttgtctgaacaggtatttttatacatgctttttgtaaaccaaaaacttttaaatttcttcaggttttctaacatgcttaccactgggctactgtaaatgagaaaagaataaaattatttaatgttttaata

SEQ ID NO: 8276 - protein, 464 aa, Homo sapiens
MSSRSTKDLIKSKWGSKPSNSKSETTLEKLKGEIAHLKTSVDEITSGKGKLTDKERHRLLEKIRVLEAEKEKNAYQLTEKDKEIQRLRDQLKARYSTTTLLEQLEETTREGERREQVLKALSEEKDVLKQQLSAATSRIAELESKTNTLRLSQTVAPNCFNSSINNIHEMEIQLKDALEKNQQWLVYDQQREVYVKGLLAKIFELEKKTETAAHSLPQQTKKPESEGYLQEEKQKCYNDLLASAKKDLEVERQTITQLSFELSEFRRKYEETQKEVHNLNQLLYSQRRADVQHLEDDRHKTEKIQKLREENDIARGKLEEEKKRSEELLSQVQFLYTSLLKQQEEQTRVALLEQQMQACTLDFENEKLDRQHVQHQLHVILKELRKARNQITQLESLKQLHEFAITEPLVTFQGETENREKVAASPKSPTAALNESLVECPKCNIQYPATEHRDLLVHVEYCSK

SEQ ID NO: 8277 - DNA, 2345 bp, Homo sapiens
gatggtgtgactcggccgacgcgagcgccgcgcttcgcttcagctgctagctggcccaagggagggcaggtcagtgggcagatcgcgtccgcgggattcaatctctgcccgctctgataacagtccttttccctggcgctcacttcgtgcctggcacccggctgggcgcctcaagaccgttgtctcttcgatcgcttctttggacttggcgaccatttcagagatgtcttccagaagtaccaaagatttaattaaaagtaagtggggatcgaagcctagtaactccaaatccgaaactacattagaaaaattaaagggagaaattgcacacttaaagacatcagtggatgaaatcacaagtgggaaaggaaagctgactgataaagagagacacagacttttggagaaaattcgagtccttgaggctgagaaggagaagaatgcttatcaactcacagagaaggacaaagaaatacagcgactgagagaccaactgaaggccagatatagtactaccacattgcttgaacagctggaagagacaacgagagaaggagaaaggagggagcaggtgttgaaagccttatctgaagagaaagacgtattgaaacaacagttgtctgctgcaacctcacgaattgctgaacttgaaagcaaaaccaatacactccgtttatcacagactgtggctccaaactgcttcaactcatcaataaataatattcatgaaatggaaatacagctgaaagatgctctggagaaaaatcagcagtggctcgtgtatgatcagcagcgggaagtctatgtaaaaggacttttagcaaagatctttgagttggaaaagaaaacggaaacagctgctcattcactcccacagcagacaaaaaagcctgaatcagaaggttatcttcaagaagagaagcagaaatgttacaacgatctcttggcaagtgcaaaaaaagatcttgaggttgaacgacaaaccataactcagctgagttttgaactgagtgaatttcgaagaaaatatgaagaaacccaaaaagaagttcacaatttaaatcagctgttgtattcacaaagaagggcagatgtgcaacatctggaagatgataggcataaaacagagaagatacaaaaactcagggaagagaatgatattgctaggggaaaacttgaagaagagaagaagagatccgaagagctcttatctcaggtccagtttctttacacatctctgctaaagcagcaagaagaacaaacaagggtagctctgttggaacaacagatgcaggcatgtactttagactttgaaaatgaaaaactcgaccgtcaacatgtgcagcatcaattgcatgtaattcttaaggagctccgaaaagcaagaaatcaaataacacagttggaatccttgaaacagcttcatgagtttgccatcacagagccattagtcactttccaaggagagactgaaaacagagaaaaagttgccgcctcaccaaaaagtcccactgctgcactcaatgaaagcctggtggaatgtcccaagtgcaatatacagtatccagccactgagcatcgcgatctgcttgtccatgtggaatactgttcaaagtagcaaaataagtatttgttttgatattaaaagattcaatactgtattttctgttagcttgtgggcattttgaattatatatttcacattttgcataaaactgcctatctacctttgacactccagcatgctagtgaatcatgtatcttttaggctgctgtgcatttctcttggcagtgatacctccctgacatggttcatcatcaggctgcaatgacagaatgtggtgagcagcgtctactgagactactaacattttgcactgtcaaaatacttggtgaggaaaagatagctcaggttattgctaatgggttaatgcaccagcaagcaaaatattttatgttttgggggttttgaaaaatcaaagataattaaccaaggatcttaactgtgttcgcattttttatccaagcacttagaaaacctacaatcctaattttgatgtccattgttaagaggtggtgatagatactattttttttttcatattgtatagcggttattagaaaagttggggattttcttgatctttattgctgcttaccattgaaacttaacccagctgtgttccccaactctgttctgcgcacgaaacagtatctgtttgaggcataatcttaagtggccacacacaatgttttctcttatgttatctggcagtaactgtaacttgaattacattagcacattctgcttagctaaaattgttaaaataaactttaataaaccc

SEQ ID NO: 8278 - protein, 464 aa, Homo sapiens; identical to SEQ ID NO: 8276

SEQ ID NO: 8279 - DNA, 461 bp, Homo sapiens
acagataggcgcagagaggccaagtgacttgcccaaggtcttttgttaggacggctttttccgattggcaggcactttcgttgtgtgttcctcaaacatctttattttagaagtgagaaaacttgtgcctttttttgcagtttctcttttcctgtctgtctcctcaagtgagattttatgtgggaatttttaaagattggcgtcgccttgtagaagatgcggcttgtaattgaggccttgtaccatttactggatggaagcgcttgtttggtcacctgtccagcatgacttaggtcacttcagctaatcaaccaatcatttcttttcttttttctttttttttgagatggagtctcgctctgtcaccaaggctggagttgcagtgatctgagatagtgccactgcactccagcctgggcgacagagcgagactctgccgcccctaacgccccgcccccgcc

SEQ ID NO: 8280 - protein, 30 aa, Homo sapiens
VTSANQPIISFLFSFFLRWSLALSPRLELQ

SEQ ID NO: 8281 - DNA, 2940 bp, Homo sapiens
catgactggcccttcttgtctttctctgtgcttcctggcatgtcttcttaggtcatatccattatttcctttaagattacttccagaaggtcttccttggtttaacttatgtcactcattctttctttctcctgccacattaattgtcctgtgttgccatgcatttatgttgctctgtttttgttctgtggtactttcataaagtatctttttttcccattagcttgtggaccgttgctacagagttgcatgaaggactggcactttaacctttttttactccttcttcccacaaaactagcactgtcaaaatagaacagtaaattaggaaataaattcccttttttcctttgagtagtttacagtctgactagataaaacttagtgaaacaattagcacataaaactttctgtaattaaatgttagactgtgtgctgctggttcgaagtgcctcaggtactgtagaaatggttttgaatgtgtcttcttatgttgtatgattatagaagcagagaagattgcacaagtggcaaaaattcggtttcagcagaaagtgatggaaaaagaaactgaaaagcgcatttctgaaatcgaagatgctgcattcctggcccgagagaaagcgaaagcagatgctgaatattatgctgcacacaaatatgccacctcaaacaagcacaagttgaccccggaatatctggagctcaaaaagtaccaggccattgcttctaacagtaagatctattttggcagcaacatccctaacatgttcgtggactcctcatgtgctttgaaatattcagatattaggactggaagagaaagctcactcccctctaaggaggctcttgaaccctctggagagaacgtcatccaaaacaaagagagcacaggttgatgcaagaggtggaaatgttctccatatcaagatgtggcccaaggggttaagtgggaacaatcattatacggactcttcagatttacagagaacttacacttcatctgttccacctctcctgcgatagtcctgggtgctccactgattggaggatagagccagctgtctgacacacaaatggtcttttcagccacagtcttatcaagtatcctatatgtattcctttctaaactgctactcatgaatgaggaaagtctgatgctaagatactgcctgcactggaatgttaaacactaaatatataacaagctgtgttttcctaagctgagatctgttgaataatgtttacattcgtcccccggggaaatgtatgctcagccaccattcaagagatgactgagaaggagatggtaagttcaagaagactgattgcacctgggacccaggccctttctttgggatccagtcccagccttcatccatgtgattaagatccaggccgctgaagttccccaggaaatgatcttccacttgagcaaccttttacttgatacgatttgcacctttctgttttcctgcagtcagggtggtggcctgcagggacctgagctttgctacccaaccagattcctcatagagattcctaatcactagtttcttgtattcataaactcagagatacagagggcttggtttgaagttggggtgagatgaaacctttgctctgagccaaagctctggggccttgcattccctgcattgggttgatgactgtcagcatcactgccgcaggccatgcttgactaaggtacctggttttagccacagccacctccttgtatgttacctttcagctctggccaagagtgggacagggttttaaccacaaataggagcagcatgcaattcctagtgacttgctgcacagtattgtatcataattacaggaagtttttatttttaaaactggatctggggtatattcatttgccccatcacctctgtctaaaggcccaagtcctagggctgccatggtcacaagcacactgatgctccttaagattgtttatctggagcccacatagtgtggaacaaaaagtcacctagaaagcatccttggtcatcattgtctccttcccacctggcccagagatgcttaaatccaagttgtttctccagctgtcacctcccccaggagatcaggattccactgacgtcctgggcagccagtgaatttaattttccatgagaaacaacagagttaacctgtggcattaggagacctacttcatgtggaccctttttttccttcagtttaacttttctggagcagtgtgctgcgtagttcggcctgagtttgtgcagcttgttaagacaactcttgtgtacgctatgttgaagctcaacaaaaaagtcatgggaccacttctagaaatctttcagctgtcaggcctgtcagtctcatgacagtttgttggttgtgccaaacactttatttgggaaaggaaagcccagatttgaatgggtctttcccctgggccttatcctatagaggcatttgtaatatggagaaaataatttttcatttttgctcatttaattctataaattctctttataaatgaattttgtgttctttagttctccttaaaagaacttttgaattataaaaataaaatctttacctgtcgaattgttgctgcagatgattgttgtggaaaatctggatcattgacctctgtgctttcattcctagagatgttttatagttacatgagcaaaagctgttgccccaaagtgatggccctggaggcggggctgaggaacagggaaatgccgctgtgaagtcttaaagcacttctgcttaaactcccatgtgtgaggagtgtgcctccctgtgccctctcagctctgaggctggccgtctttcggggtgttccttttggcaaatatacactgtaatcttgagtctaaatttatatgttgaaatgctaccttttttaaaataagaaactaaataaaattattttactatcagtga

SEQ ID NO: 8282 - protein, 133 aa, Homo sapiens [sequence omitted]

SEQ ID NO: 8283 - DNA, 5399 bp, Homo sapiens
agttggaatgcattttaagaatttcaaggctgtttttgagctttgttatttttaacacattaccatatggttgtgataattcaactttttattttaaaatctggcaagagacatcatcttttaaaaaataatggcctttgctgtttctgccagcttaatcttccagatgagttttcattatcgatattttcaagctatatcaggcacctaagtggtcatatacatgttgttttgttttgttttgttttgagacagggtctccctctgttgcccaggctggagtgcagtggcatgatcataggtcactgcagccttgaactcctgggctcaagtgattctcctgccttagcctcccaagtagctaggagtacaggtacacacccccacatctggctaatttttttattttttgtagagatgggcctttgccgtgttgcccaggctggtctcaaactcctggcctcatgcaatcctccaatataagttaaaaatagaaacatagtttatggctttactttatcatatcagcctttttggtttttagaatttctgatttaggggagaaactcatatcctaagttaaattaataccaatggatttaatgaattttaatgctgttcaatatgtagtcttttttttttttaatcattgaggaatgtgattgattcttggtagatttatcttatatctacaacttgaattcactgccttctagtaatttttgggttactatttttacagtcactattatatttttttcctttccatatatttatataccatttttcttcttgaaaaactactctggcaaattagaatgatgaaaatggtcatctttgattttttttttcctatgttatttaagggagtgactatattatagactggcttttgatatataatatatgcttaaaacccaggggtcagtttcaatacatatattcctttcattagccatttttttcctccattcactctatgtatgtgagtgggatgggggcattattttattatttgaggttaagagcagaggtttaataggcaaaagaaacagaaaggagaatagctctctctcctgtgagggagaggggtgcctgagtgggacttcccacttttacttttaaaatctcttttgatgcaacttactcatggtatctgtacagtaagtgtttatgttttcacatatttgaaaatctgtgagatttcccaagattggcaagcacaatgtagtatgttcttcagcctcattcagcaaaataggagtcttcaaaagacagtcctggccgagtgtggtggctcacgcctgtaatcccagcactttgggaggccgaggtggttggatcacctgagttcaggagttcgagaccagcttgaccaacacagtgaaaccctgtctctactaaaaaacaaaaaattagctggacatggtggcaggcacctataatcccagctactggggaggctgaggtaggagaaatggcgtgaactcaggaggcgaagcttgcagtgagtcgagatagtgccactgcactccagcctgggtgacagagtgagactccatctcaaaaaaaaaaaaaaaaaaagattgcttctggtgacggaaaaatgaatattgtgtgttttctgctctcaaataaatcatagtattcagactgtcatttgatgtctttatcaatgttatcagaggaaaggggaaactttgaggggaagtgttttggggaaactattggagttacttttcagatgattctggatctttcttaattttatggactattggaattccagaattaaaagctaccttgggatgatccagtataaccttgcacctgatagtagtgttttcttataccatttctgccacgtggttacccagtagctacttgtacatgcttagtaatatgccagccatttccattacaggtttagtaccccttatccgaaatgcttgggaccagaagtattttaaattttggatttgtaaagattctggaatatttgcatagacataatgagatatctcagggatgggacccaggtctaaatataaaatttatttatgttcttccttgttggtatagtggttagttttttttttttaaggtattttatttatgtcccatatacacctatagcctgaaggtaactttataaaatattttaaataattttgtgcatgaaacaaagtttaccttaagtgcttatgtgtggaattttccacttgtgtcataatgtgggctctcaaaaagtttcagattttggagcattttggatttcaaattttcagatcagaaatgctcaacctgtattagacactggaagccttagaaaattctccttactgtaagccccagtttactacctaataactaccacctagttatatcttctgtgcaacaaatatggtcactgcacatgggtgcccacctgaggagggcaggggctgaaacccagcttcattctgcatgtcaaaccatgcacctgcaggactgtagaaacggctggtgccgttttctaattggcacagagctgctgtatggactagctggaggtctaacagcaaaggaagtattgatatattcccttccaaatcacaggctttacacaatacaactaggagaagaaagccaaactaaaattcaaatgtactaaatttttttcctatctctgggtgactttgggcaaatcattgaatctttcaacctcagatttattataagtaaaataaagtaacacctctcttaacctaccttaatgggtccaaaagctcatgttgacaaaacggttctctgactcactgtagggtcagaattactggctgtgactgcacataggagaatcatttctaatttttataacattttgcttcacagggaggctgagaagacaaaactccttatagctgcacagaaacaaaaggttgtggaaaaagaagctgagacagagaggaaaaaggcagttatagaagcagagaagattgcacaagtggcaaaaattcggtttcagcagaaagtgatggaaaaagaaactgaaaagcgcatttctgaaatcgaagatgctgcattcctggcccgagagaaagcgaaagcagatgctgaatattatgctgcacacaaatatgccacctcaaacaagcacaagttgaccccggaatatctggagctcaaaaagtaccaggccattgcttctaacagtaagatctattttggcagcaacatccctaacatgttcgtggactcctcatgtgctttgaaatattcagatattaggactggaagagaaagctcactcccctctaaggaggctcttgaaccctctggagagaacgtcatccaaaacaaagagagcacaggttgatgcaagaggtggaaatgttctccatatcaagatgtggcccaaggggttaagtgggaacaatcattatacggactcttcagatttacagagaacttacacttcatctgttccacctctcctgcgatagtcctgggtgctccactgattggaggatagagccagctgtctgacacacaaatggtcttttcagccacagtcttatcaagtatcctatatgtattcctttctaaactgctactcatgaatgaggaaagtctgatgctaagatactgcctgcactggaatgttaaacactaaatatataacaagctgtgttttcctaagctgagatctgttgaataatgtttacattcgtcccccggggaaatgtatgctcagccaccattcaagagatgactgagaaggagatggtaagttcaagaagactgattgcacctgggacccaggccctttctttgggatccagtcccagccttcatccatgtgattaagatccaggccgctgaagttccccaggaaatgatcttccacttgagcaaccttttacttgatacgatttgcacctttctgttttcctgcagtcagggtggtggcctgcagggacctgagctttgctacccaaccagattcctcatagagattcctaatcactagtttcttgtattcataaactcagagatacagagggcttggtttgaagttggggtgagatgaaacctttgctctgagccaaagctctggggccttgcattccctgcattgggttgatgactgtcagcatcactgccgcaggccatgcttgactaaggtacctggttttagccacagccacctccttgtatgttacctttcagctctggccaagagtgggacagggttttaaccacaaataggagcagcatgcaattcctagtgacttgctgcacagtattgtatcataattacaggaagtttttatttttaaaactggatctggggtatattcatttgccccatcacctctgtctaaaggcccaagtcctagggctgccatggtcacaagcacactgatgctccttaagattgtttatctggagcccacatagtgtggaacaaaaagtcacctagaaagcatccttggtcatcattgtctccttcccacctggcccagagatgcttaaatccaagttgtttctccagctgtcacctcccccaggagatcaggattccactgacgtcctgggcagccagtgaatttaattttccatgagaaacaacagagttaacctgtggcattaggagacctacttcatgtggaccctttttttccttcagtttaacttttctggagcagtgtgctgcgtagttcggcctgagtttgtgcagcttgttaagacaactcttgtgtacgctatgttgaagctcaacaaaaaagtcatgggaccacttctagaaatctttcagctgtcaggcctgtcagtctcatgacagtttgttggttgtgccaaacactttatttgggaaaggaaagcccagatttgaatgggtctttcccctgggccttatcctatagaggcatttgtaatatggagaaaataatttttcatttttgctcatttaattctataaattctctttataaatgaattttgtgttctttagttctccttaaaagaacttttgaattataaaaataaaatctttacctgtcgaattgttgctgcagatgattgttgtggaaaatctggatcattgacctctgtgctttcattcctagagatgttttatagttacatgagcaaaagctgttgccccaaagtgatggccctggaggcggggctgaggaacagggaaatgccgctgtgaagtcttaaagcacttctgcttaaactcccatgtgtgaggagtgtgcctccctgtgccctctcagctctgaggctggccgtctttcggggtgttccttttggcaaatatacactgtaatcttgagtctaaatttatatgttgaaatgctaccttttttaaaataagaaactaaataaaattattttactatcagtga

SEQ ID NO: 8284 - protein, 113 aa, Homo sapiens [sequence omitted]

SEQ ID NO: 8285 - DNA, 3203 bp, Homo sapiens
cgggagtcggctgcacgtgcgggcgggggcgatgcgtcactgatcggtgaggcgcggccgaggggtcggctttcctcgcgagcctgcggctgggcttcttctcagaggaacgagaatgaatatgactcaagcccgggttctggtggctgcagtggtggggttggtggctgtcctgctctacgcctccatccacaagattgaggagggccatctggctgtgtactacaggggaggagctttactaactagccccagtggaccaggctatcatatcatgttgcctttcattactacgttcagatctgtgcagacaacactacaaactgatgaagttaaaaatgtgccttgtggaacaagtggtggggtcatgatctatattgaccgaatagaagtggttaatatgttggctccttatgcagtgtttgatatcgtgaggaactatactgcagattatgacaagaccttaatcttcaataaaatccaccatgagctgaaccagttctgcagtgcccacacacttcaggaagtttacattgaattgtttgatcaaatagatgaaaacctgaagcaagctctgcagaaagacttaaacctcatggccccaggtctcactatacaggctgtgcgtgttacaaaacccaaaatcccagaagccataagaagaaattttgagttaatggaggctgagaagacaaaactccttatagctgcacagaaacaaaaggttgtggaaaaagaagctgagacagagaggaaaaaggcagttatagaagcagagaagattgcacaagtggcaaaaattcggtttcagcagaaagtgatggaaaaagaaactgaaaagcgcatttctgaaatcgaagatgctgcattcctggcccgagagaaagcgaaagcagatgctgaatattatgctgcacacaaatatgccacctcaaacaagcacaagttgaccccggaatatctggagctcaaaaagtaccaggccattgcttctaacagtaagatctattttggcagcaacatccctaacatgttcgtggactcctcatgtgctttgaaatattcagatattaggactggaagagaaagctcactcccctctaaggaggctcttgaaccctctggagagaacgtcatccaaaacaaagagagcacaggttgatgcaagaggtggaaatgttctccatatcaagatgtggcccaaggggttaagtgggaacaatcattatacggactcttcagatttacagagaacttacacttcatctgttccacctctcctgcgatagtcctgggtgctccactgattggaggatagagccagctgtctgacacacaaatggtcttttcagccacagtcttatcaagtatcctatatgtattcctttctaaactgctactcatgaatgaggaaagtctgatgctaagatactgcctgcactggaatgttaaacactaaatatataacaagctgtgttttcctaagctgagatctgttgaataatgtttacattcgtcccccggggaaatgtatgctcagccaccattcaagagatgactgagaaggagatggtaagttcaagaagactgattgcacctgggacccaggccctttctttgggatccagtcccagccttcatccatgtgattaagatccaggccgctgaagttccccaggaaatgatcttccacttgagcaaccttttacttgatacgatttgcacctttctgttttcctgcagtcagggtggtggcctgcagggacctgagctttgctacccaaccagattcctcatagagattcctaatcactagtttcttgtattcataaactcagagatacagagggcttggtttgaagttggggtgagatgaaacctttgctctgagccaaagctctggggccttgcattccctgcattgggttgatgactgtcagcatcactgccgcaggccatgcttgactaaggtacctggttttagccacagccacctccttgtatgttacctttcagctctggccaagagtgggacagggttttaaccacaaataggagcagcatgcaattcctagtgacttgctgcacagtattgtatcataattacaggaagtttttatttttaaaactggatctggggtatattcatttgccccatcacctctgtctaaaggcccaagtcctagggctgccatggtcacaagcacactgatgctccttaagattgtttatctggagcccacatagtgtggaacaaaaagtcacctagaaagcatccttggtcatcattgtctccttcccacctggcccagagatgcttaaatccaagttgtttctccagctgtcacctcccccaggagatcaggattccactgacgtcctgggcagccagtgaatttaattttccatgagaaacaacagagttaacctgtggcattaggagacctacttcatgtggaccctttttttccttcagtttaacttttctggagcagtgtgctgcgtagttcggcctgagtttgtgcagcttgttaagacaactcttgtgtacgctatgttgaagctcaacaaaaaagtcatgggaccacttctagaaatctttcagctgtcaggcctgtcagtctcatgacagtttgttggttgtgccaaacactttatttgggaaaggaaagcccagatttgaatgggtctttcccctgggccttatcctatagaggcatttgtaatatggagaaaataatttttcatttttgctcatttaattctataaattctctttataaatgaattttgtgttctttagttctccttaaaagaacttttgaattataaaaataaaatctttacctgtcgaattgttgctgcagatgattgttgtggaaaatctggatcattgacctctgtgctttcattcctagagatgttttatagttacatgagcaaaagctgttgccccaaagtgatggccctggaggcggggctgaggaacagggaaatgccgctgtgaagtcttaaagcacttctgcttaaactcccatgtgtgaggagtgtgcctccctgtgccctctcagctctgaggctggccgtctttcggggtgttccttttggcaaatatacactgtaatcttgagtctaaatttatatgttgaaatgctaccttttttaaaataagaaactaaataaaattattttactatcagtga

SEQ ID NO: 8286 - protein, 348 aa, Homo sapiens
MNMTQARVLVAAVVGLVAVLLYASIHKIEEGHLAVYYRGGALLTSPSGPGYHIMLPFITTFRSVQTTLQTDEVKNVPCGTSGGVMIYIDRIEVVNMLAPYAVFDIVRNYTADYDKTLIFNKIHHELNQFCSAHTLQEVYIELFDQIDENLKQALQKDLNLMAPGLTIQAVRVTKPKIPEAIRRNFELMEAEKTKLLIAAQKQKVVEKEAETERKKAVIEAEKIAQVAKIRFQQKVMEKETEKRISEIEDAAFLAREKAKADAEYYAAHKYATSNKHKLTPEYLELKKYQAIASNSKIYFGSNIPNMFVDSSCALKYSDIRTGRESSLPSKEALEPSGENVIQNKESTG

SEQ ID NO: 8287 - DNA, 2534 bp, Homo sapiens
ggcggcggttggctcggcgcgggagtcggctgcacgtgcgggcgggggcgatgcgtcactgatcggaggaacgagaatgaatatgactcaagcccgggttctggtggctgcagtggtggggttggtggctgtcctgctctacgcctccatccacaagattgaggagggccatctggctgtgtactacaggggaggagctttactaactagccccagtggaccaggctatcatatcatgttgcctttcattactacgttcagatctgtgcagcacaagttgaccccggaatatctggagctcaaaaagtaccaggccattgcttctaacagtaagatctattttggcagcaacatccctaacatgttcgtggactcctcatgtgctttgaaatattcagatattaggactggaagagaaagctcactcccctctaaggaggctcttgaaccctctggagagaacgtcatccaaaacaaagagagcacaggttgatgcaagaggtggaaatgttctccatatcaagatgtggcccaaggggttaagtgggaacaatcattatacggactcttcagatttacagagaacttacacttcatctgttccacctctcctgcgatagtcctgggtgctccactgattggaggatagagccagctgtctgacacacaaatggtcttttcagccacagtcttatcaagtatcctatatgtattcctttctaaactgctactcatgaatgaggaaagtctgatgctaagatactgcctgcactggaatgttaaacactaaatatataacaagctgtgttttcctaagctgagatctgttgaataatgtttacattcgtcccccggggaaatgtatgctcagccaccattcaagagatgactgagaaggagatggtaagttcaagaagactgattgcacctgggacccaggccctttctttgggatccagtcccagccttcatccatgtgattaagatccaggccgctgaagttccccaggaaatgatcttccacttgagcaaccttttacttgatacgatttgcacctttctgttttcctgcagtcagggtggtggcctgcagggacctgagctttgctacccaaccagattcctcatagagattcctaatcactagtttcttgtattcataaactcagagatacagagggcttggtttgaagttggggtgagatgaaacctttgctctgagccaaagctctggggccttgcattccctgcattgggttgatgactgtcagcatcactgccgcaggccatgcttgactaaggtacctggttttagccacagccacctccttgtatgttacctttcagctctggccaagagtgggacagggttttaaccacaaataggagcagcatgcaattcctagtgacttgctgcacagtattgtatcataattacaggaagtttttatttttaaaactggatctggggtatattcatttgccccatcacctctgtctaaaggcccaagtcctagggctgccatggtcacaagcacactgatgctccttaagattgtttatctggagcccacatagtgtggaacaaaaagtcacctagaaagcatccttggtcatcattgtctccttcccacctggcccagagatgcttaaatccaagttgtttctccagctgtcacctcccccaggagatcaggattccactgacgtcctgggcagccagtgaatttaattttccatgagaaacaacagagttaacctgtggcattaggagacctacttcatgtggaccctttttttccttcagtttaacttttctggagcagtgtgctgcgtagttcggcctgagtttgtgcagcttgttaagacaactcttgtgtacgctatgttgaagctcaacaaaaaagtcatgggaccacttctagaaatctttcagctgtcaggcctgtcagtctcatgacagtttgttggttgtgccaaacactttatttgggaaaggaaagcccagatttgaatgggtctttcccctgggccttatcctatagaggcatttgtaatatggagaaaataatttttcatttttgctcatttaattctataaattctctttataaatgaattttgtgttctttagttctccttaaaagaacttttgaattataaaaataaaatctttacctgtcgaattgttgctgcagatgattgttgtggaaaatctggatcattgacctctgtgctttcattcctagagatgttttatagttacatgagcaaaagctgttgccccaaagtgatggccctggaggcggggctgaggaacagggaaatgccgctgtgaagtcttaaagcacttctgcttaaactcccatgtgtgaggagtgtgcctccctgtgccctctcagctctgaggctggccgtctttcggggtgttccttttggcaaatatacactgtaatcttgagtctaaatttatatgttgaaatgctaccttttttaaaataagaaactaaataaaattattttactatcagtga

SEQ ID NO: 8288 - protein, 138 aa, Homo sapiens
MNMTQARVLVAAVVGLVAVLLYASIHKIEEGHLAVYYRGGALLTSPSGPGYHIMLPFITTFRSVQHKLTPEYLELKKYQAIASNSKIYFGSNIPNMFVDSSCALKYSDIRTGRESSLPSKEALEPSGENVIQNKESTG

SEQ ID NO: 8289 - DNA, 3171 bp, Homo sapiens
ggctgttggcggcggttggctcggcgcgggagtcggctgcacgtgcgggcgggggcgatgcgtcactgatcggaggaacgagaatgaatatgactcaagcccgggttctggtggctgcagtggtggggttggtggctgtcctgctctacgcctccatccacaagattgaggagggccatctggctgtgtactacaggggaggagctttactaactagccccagtggaccaggctatcatatcatgttgcctttcattactacgttcagatctgtgcagacaacactacaaactgatgaagttaaaaatgtgccttgtggaacaagtggtggggtcatgatctatattgaccgaatagaagtggttaatatgttggctccttatgcagtgtttgatatcgtgaggaactatactgcagattatgacaagaccttaatcttcaataaaatccaccatgagctgaaccagttctgcagtgcccacacacttcaggaagtttacattgaattgtttgatcaaatagatgaaaacctgaagcaagctctgcagaaagacttaaacctcatggccccaggtctcactatacaggctgtgcgtgttacaaaacccaaaatcccagaagccataagaagaaattttgagttaatggaggctgagaagacaaaactccttatagctgcacagaaacaaaaggttgtggaaaaagaagctgagacagagaggaaaaaggcagttatagaagcagagaagattgcacaagtggcaaaaattcggtttcagcagaaagtgatggaaaaagaaactgaaaagcgcatttctgaaatcgaagatgctgcattcctggcccgagagaaagcgaaagcagatgctgaatattatgctgcacacaaatatgccacctcaaacaagcacaagttgaccccggaatatctggagctcaaaaagtaccaggccattgcttctaacagtaagatctattttggcagcaacatccctaacatgttcgtggactcctcatgtgctttgaaatattcagatattaggactggaagagaaagctcactcccctctaaggaggctcttgaaccctctggagagaacgtcatccaaaacaaagagagcacaggttgatgcaagaggtggaaatgttctccatatcaagatgtggcccaaggggttaagtgggaacaatcattatacggactcttcagatttacagagaacttacacttcatctgttccacctctcctgcgatagtcctgggtgctccactgattggaggatagagccagctgtctgacacacaaatggtcttttcagccacagtcttatcaagtatcctatatgtattcctttctaaactgctactcatgaatgaggaaagtctgatgctaagatactgcctgcactggaatgttaaacactaaatatataacaagctgtgttttcctaagctgagatctgttgaataatgtttacattcgtcccccggggaaatgtatgctcagccaccattcaagagatgactgagaaggagatggtaagttcaagaagactgattgcacctgggacccaggccctttctttgggatccagtcccagccttcatccatgtgattaagatccaggccgctgaagttccccaggaaatgatcttccacttgagcaaccttttacttgatacgatttgcacctttctgttttcctgcagtcagggtggtggcctgcagggacctgagctttgctacccaaccagattcctcatagagattcctaatcactagtttcttgtattcataaactcagagatacagagggcttggtttgaagttggggtgagatgaaacctttgctctgagccaaagctctggggccttgcattccctgcattgggttgatgactgtcagcatcactgccgcaggccatgcttgactaaggtacctggttttagccacagccacctccttgtatgttacctttcagctctggccaagagtgggacagggttttaaccacaaataggagcagcatgcaattcctagtgacttgctgcacagtattgtatcataattacaggaagtttttatttttaaaactggatctggggtatattcatttgccccatcacctctgtctaaaggcccaagtcctagggctgccatggtcacaagcacactgatgctccttaagattgtttatctggagcccacatagtgtggaacaaaaagtcacctagaaagcatccttggtcatcattgtctccttcccacctggcccagagatgcttaaatccaagttgtttctccagctgtcacctcccccaggagatcaggattccactgacgtcctgggcagccagtgaatttaattttccatgagaaacaacagagttaacctgtggcattaggagacctacttcatgtggaccctttttttccttcagtttaacttttctggagcagtgtgctgcgtagttcggcctgagtttgtgcagcttgttaagacaactcttgtgtacgctatgttgaagctcaacaaaaaagtcatgggaccacttctagaaatctttcagctgtcaggcctgtcagtctcatgacagtttgttggttgtgccaaacactttatttgggaaaggaaagcccagatttgaatgggtctttcccctgggccttatcctatagaggcatttgtaatatggagaaaataatttttcatttttgctcatttaattctataaattctctttataaatgaattttgtgttctttagttctccttaaaagaacttttgaattataaaaataaaatctttacctgtcgaattgttgctgcagatgattgttgtggaaaatctggatcattgacctctgtgctttcattcctagagatgttttatagttacatgagcaaaagctgttgccccaaagtgatggccctggaggcggggctgaggaacagggaaatgccgctgtgaagtcttaaagcacttctgcttaaactcccatgtgtgaggagtgtgcctccctgtgccctctcagctctgaggctggccgtctttcggggtgttccttttggcaaatatacactgtaatcttgagtctaaatttatatgttgaaatgctaccttttttaaaataagaaactaaataaaattattttactatcagtga

SEQ ID NO: 8290 - protein, 348 aa, Homo sapiens; identical to SEQ ID NO: 8286

SEQ ID NO: 8291 - DNA, 1563 bp, Homo sapiens
gtggccctcagtaatatcaaagaagctgacaatactgtcatgttcatgcagggaaaaaggcagaaagaaatatggcatctccttaaaattgcctgtacacagagttctgcccggtcccttgtaggatccagtctagaagggagacttcagcacaaatgatagaagaaaatttgaactgccttggccatttaagcactattattcatgaggcaaatgaggaacagggcaatagtatgatgaatcttgattggagttggttaacagaatgagttgtcacttgttcactgtccccaaacctatggaagttgttgctatacatgttggaaatgtgtttttcccccatgaaaccattcttcagacatcagtcaatggaagaaatggctatgaacagaaactacatttctactatgatcagaagaacatgattttacaagtataacagttttgagtaattcaagcctctaaacagacaggaatttagaaaaagtcaatgtacttgtttgaatatttgttttaataccacagctatttagaagcatcatcacgacacatttgccttcagtcttggtaaaacattacttatttaactgattaaaaataccttctatgtattagtgtcaacttttaacttttgggcgtaagaccaaatgtagttttgtatacagagaagaaaacctcaagtaataggcattttaagtaaaagtctacctgtgtttttttctaaaaaggctgctcacaagttctatttcttgaagaataaattctacctccttgtgttgcactgaacaggttctcttcctggcatcataaggagttggtgtaatcattttaaattccactgaaaatttaacagtatccccttctcatcgaagggattgtgtatctgtgcttctaatattagttggctttcataaatcatgttgttgtgtgtatatgtatttaagatgtacatttaataatatcaaagagaagatgcctgttaatttataatgtatttgaaaattacatgttttttcatttgtaaaaatgagtcatttgtttaaacaatctttcatgtcttgtcatacaaatttataaaggtctgcactcctttatctgtaattgtaattccaaaatccaaaaagctctgaaaacaaggtttccataagcttggtgacaaaattcatttgcttgcaatctaatctgaactgaccttgaatctttttatcccatttagtgtgaatattcctttattttgctgcttgatgatgagagggagggctgctgccacagactgtggtgagggctggttaatgtagtatggtatatgcacaaaactacttttctaaaatctaaaatttcataattctgaaacaacttgccccaagggtttcagagaaaggactgtggacctctatcatctgctaagtaatttagaagatattatttgtcttaaaaaatgtgaaatgcttttatattctaatagtttttcactttgtgtattaaatggtttttaaattactttcttgatctctattcattataaaaatcagattataataaaacagttgaatatggcttagg

SEQ ID NO: 8292 - protein, 39 aa, Homo sapiens
MFMQGKRQKEIWHLLKIACTQSSARSLVGSSLEGRLQHK

SEQ ID NO: 8293 - DNA, 1501 bp, Homo sapiens
gtggccctcagtaatatcaaagaagctgacaatactgtcatgttcatgcagggaaaaaggcagaaagaaatatggcatctccttaaaattgcctgtacacagagttctgcccggtcccttgtaggatccagtctagaagggagacttcagcacaaatgatagaagaaaatttgaactgccttggccatttaagcactattattcatgaggcaaatgaggaacagggcaatagtatgatgaatcttgattggagttggttaacagaatgagttgtcacttgttcactgtccccaaacctatggaagttgttgctatacatgttggaaatgtgtttttcccccatgaaaccattcttcagacatcagtcaatggaagaaatggctatgaacagaaactacatttctactatgatcagaagaacatgattttacaagtataacagttttgagtaattcaagcctctaaacagacaggaatttagaaaaagtcaatgtacttgtttgaatatttgttttaataccacagctatttagaagcatcatcacgacacatttgccttcagtcttggtaaaacattacttatttaactgattaaaaataccttctatgtattagtgtcaacttttaacttttgggcgtaagaccaaatgtagttttgtatacagagaagaaaacctcaagtaataggcattttaagtaaaagtctacctgtgtttttttctaaaaaggctgctcacaagttctatttcttgaagaataaattctacctccttgtgttgcactgaacaggttctcttcctggcatcataaggagttggtgtaatcattttaaattccactgaaaatttaacagtatccccttctcatcgaagggattgtgtatctgtgcttctaatattagttggctttcataaatcatgttgttgtgtgtatatgtatttaagatgtacatttaataatatcaaagagaagatgcctgttaatttataatgtatttgaaaattacatgttttttcatttgtaaaaatgagtcatttgtttaaacaatctttcatgtcttgtcatacaaatttataaaggtctgcactcctttatctgtaattgtaattccaaaatccaaaaagctctgaaaacaaggtttccataagcttggtgacaaaattcatttgcttgcaatctaatctgaactgaccttgaatctttttatcccatttagtgtgaatattcctttattttgctgcttgatgatgagagggagggctgctgccacagactgtggtgagggctggttaatgtagtatggtatatgcacaaaactacttttctaaaatctaaaatttcataattctgaaacaacttgccccaagggtttcagagaaaggactgtggacctctatcatctgctaagtaatttagaagatattatttgtcttaaaaaatgtgaaatgcttttatattctaatagtttttcactttgtgtattaaatggtttttaaattac

SEQ ID NO: 8294 - protein, 39 aa, Homo sapiens; identical to SEQ ID NO: 8292

SEQ ID NO: 8295 - DNA, 4846 bp, Homo sapiens
gactcccagttttctggctaatgaatcagataccacagatacacagtgatagcatttgtttaggttatattttttaaaactttgaggcagccctgtcaacataccatgaagctcagaaataaactgctacccaggtagcttctttgagtgtcaccttgagtgacaaactgtaacaagattgtgtctgtcattggggcctattatataatcacacttgatttgtggcctctattgtcttttctagcttagagttgacttgaatctcttgttcatctgaaatggttaaaaccagctttcttcattatcctggagaaggctaaagttctgagggctttcactgtcttaaggagctagttatatgagaaagctcttggcttggtccatggtatttaggaaggaatgctgtttggagaagaacctttttggagccttgcatttgattgttggtgaggaggagacaacagagatgtgtggggaataaagttgggctatgggggaagtatttggagtgatagataacaaaggacacaacgttttttaaacctcctttgatgctcatcatttcctttttggtaaaatgggggtaacaaaagtagtcttctcacatgactgctgtgaggattaaatgggaaaattataagcagagagtagcaaatattattattattgcatttaggcttaattattgtccaaagaatataccagcatgatgcataagcaactttcaactcctttagccattttctgaaatataacaattaatgatttttttttaaaatcgaggtcacattttaaactgtagaacccattgtgaccaacagccatcccatttgagggtatctggctgctgccagttggctttaagatgtcatactgccctcaaatggaactttcaggatgtctacaggtccctttactagttggtttcaatgagcttttttcaaagtttttctgggttgtaaacagacggataaacatgaaattccaagcaacctagttcaagggcctccttcctttaggtaatgaaagtttgatgaattgtcctactgtttctaaatatgtggttaatcatccaagaaaaattgttcccttggccagaggctgcatttgtgtctagggcttgggttagtatgggttaaagatagccaagactattgttctcaagcacaggcaactaaggtctcttactgataaatttatatatacattatacacctgcaaactttattttttatatataactagattttatttataggtaatctttatatcttttatcttaacccaatttttaatttaaatggagatgtttattaattaaaattagtttcagagtttcagggatttttgaggaattttttgtttggaggctgatatgttacagaagaaaggttatatccactgactgatgtcttttatagatcactcctacagtgacagcacagagatggtgaaaatcattgtgcacactgtgcagagtcaggaccgtgtgctcaaggagctgtttggtcatttgaggtaggaaaattgcttcatttcctactgaaaaaccaggatacgtttatcttgttcctctcaaagtacaaaagccctctttggtaaagtatacttacccaggaagaattctgaaggtaccttgggtagcttggccatagctatctgcatttatgtgtccttttgtatgcattactttggagataagtcattaaatctgatgctgattgtggttcatttcctcagctgggttttgggaatatggtgtacagtcttggggcatgtgaaagtgtctgacactgatttaatctctccagcaagttgttgggctgtaagcagaagattattgatctactccctaaggtggaagtggccctcagtaatatcaaagaagctgacaatactgtcatgttcatgcagggaaaaaggcagaaagaaatatggcatctccttaaaattgcctgtgtaagtaattattaatgaattatttaatgtgacattgagttgctattattccttgcaaaggggatttttatcagcatgaggtgggccctcttgaagacatgtatattttgcattgggatgacatccatgttccttgcttggtgtccagactagcaattgagatgcaggacttattatcatctctcctttccaatttctctgttgttatactcctcttagcccttgactactgtggtattccaacctaacttggggatagatgtacctgcctagataatgaaattgaccatctattcaactgggttttttttttctttcttcaactaaaatggtataagatgagtggatatatttggttttagtcaatgaagaaagggtccaaggacaggttactaatggtgtgtaaaggtgggaatagttttgtactgaaatactctggttgtgcatataagtagtaacggaaatgtaagtcttaggaatatgataagaaattgtgtgaatcaacagagatgcttgcctgtaatcttttgatgtttttttcttttccttcagacacagagttctgcccggtcccttgtaggatccagtctagaaggtgcagtaacccctcagacatcagcatggctgcccccgacttcagcagaacatgatcattctctgtcatgtgtggtaactcctcaagatgggtgggtttactttgtaacaatagatagctgtgttttcatagcagtggtataggaatgaggcagtagttgttaaggtagtcttctgtgccttcagaccagggttgagtcctgactatccctttgtaataatcttaggcaacttacttgacttttttgatgttcatatttcctcacctgtaaaacaggaatgtctcatagaactgctgtggaaatttgattagacaatgtatataaagtgcttgggaaataaatgttcagcaaatgttgcgtattattagctcaaatgttgcttattattagctaagtccaagttctaagtcctttcttttattggcttattactttcttttactcaaaccttactccttcattaacagtttatgagaaattatgctatcattttgcatttatcattttggggatccttgattacccttctaataaatttttgagatctattttataactttgtatttctaagattagacttttttcagtgttttaaatcagttttgcaagaactcagattccaagccctatattttattaattcctactcttttgctaaaagctgaatgactatccatttctgttattttctcagcttaagatgtgccgtatccaaagccagtggctctttgctagcttgtgtattgtcgcttttctcacaactcatggagacctctacagcaccagcatttcctggaagctctgcccataattagttttgcagaagtgcagccatgttacatcactgctcaggaggtcatgcagttgcacattctgtactctacttttatgagagaaaagcacatggcaggaaggcaagctgatatcagggagacttcagcacaaatgatagaagaaaatttgaactgccttggccatttaagcactattattcatgaggcaaatgaggaacagggcaatagtatgatgaatcttgattggagttggttaacagaatgagttgtcacttgttcactgtccccaaacctatggaagttgttgctatacatgttggaaatgtgtttttcccccatgaaaccattcttcagacatcagtcaatggaagaaatggctatgaacagaaactacatttctactatgatcagaagaacatgattttacaagtataacagttttgagtaattcaagcctctaaacagacaggaatttagaaaaagtcaatgtacttgtttgaatatttgttttaataccacagctatttagaagcatcatcacgacacatttgccttcagtcttggtaaaacattacttatttaactgattaaaaataccttctatgtattagtgtcaacttttaacttttgggcgtaagaccaaatgtagttttgtatacagagaagaaaacctcaagtaataggcattttaagtaaaagtctacctgtgtttttttctaaaaaggctgctcacaagttctatttcttgaagaataaattctacctccttgtgttgcactgaacaggttctcttcctggcatcataaggagttggtgtaatcattttaaattccactgaaaatttaacagtatccccttctcatcgaagggattgtgtatctgtgcttctaatattagttggctttcataaatcatgttgttgtgtgtatatgtatttaagatgtacatttaataatatcaaagagaagatgcctgttaatttataatgtatttgaaaattacatgttttttcatttgtaaaaatgagtcatttgtttaaacaatctttcatgtcttgtcatacaaatttataaaggtctgcactcctttatctgtaattgtaattccaaaatccaaaaagctctgaaaacaaggtttccataagcttggtgacaaaattcatttgcttgcaatctaatctgaactgaccttgaatctttttatcccatttagtgtgaatattcctttattttgctgcttgatgatgagagggagggctgctgccacagactgtggtgagggctggttaatgtagtatggtatatgcacaaaactacttttctaaaatctaaaatttcataattctgaaacaacttgccccaagggtttcagagaaaggactgtggacctctatcatctgctaagtaatttagaagatattatttgtcttaaaaaatgtgaaatgcttttatattctaatagtttttcactttgtgtattaaatggtttttaaattac

SEQ ID NO: 8296 - protein, 66 aa, Homo sapiens [sequence omitted]

SEQ ID NO: 8297 - DNA, 3533 bp, Homo sapiens
tcggcggcccggaaccggccttggaacaactgtggaacctgaggccgcttgccctcccgccccatggagcggcccccggggctgcggccgggcgcgggcgggccctgggagatgcgggagcggctgggcaccggcggcttcgggaacgtctgtctgtaccagcatcgggaacttgatctcaaaatagcaattaagtcttgtcgcctagagctaagtaccaaaaacagagaacgatggtgccatgaaatccagattatgaagaagttgaaccatgccaatgttgtaaaggcctgtgatgttcctgaagaattgaatattttgattcatgatgtgcctcttctagcaatggaatactgttctggaggagatctccgaaagctgctcaacaaaccagaaaattgttgtggacttaaagaaagccagatactttctttactaagtgatatagggtctgggattcgatatttgcatgaaaacaaaattatacatcgagatctaaaacctgaaaacatagttcttcaggatgttggtggaaagataatacataaaataattgatctgggatatgccaaagatgttgatcaaggaagtctgtgtacatcttttgtgggaacactgcagtatctggccccagagctctttgagaataagccttacacagccactgttgattattggagctttgggaccatggtatttgaatgtattgctggatataggccttttttgcatcatctgcagccatttacctggcatgagaagattaagaagaaggatccaaagtgtatatttgcatgtgaagagatgtcaggagaagttcggtttagtagccatttacctcaaccaaatagcctttgtagtttagtagtagaacccatggaaaactggctacagttgatgttgaattgggaccctcagcagagaggaggacctgttgaccttactttgaagcagccaagatgttttgtattaatggatcacattttgaatttgaagatagtacacatcctaaatatgacttctgcaaagataatttcttttctgttaccacctgatgaaagtcttcattcactacagtctcgtattgagcgtgaaactggaataaatactggttctcaagaacttctttcagagacaggaatttctctggatcctcggaaaccagcctctcaatgtgttctagatggagttagaggctgtgatagctatatggtttatttgtttgataaaagtaaaactgtatatgaagggccatttgcttccagaagtttatctgattgtgtaaattatattgtacaggacagcaaaatacagcttccaattatacagctgcgtaaagtgtgggctgaagcagtgcactatgtgtctggactaaaagaagactatagcaggctctttcagggacaaagggcagcaatgttaagtcttcttagatataatgctaacttaacaaaaatgaagaacactttgatctcagcatcacaacaactgaaagctaaattggagttttttcacaaaagcattcagcttgacttggagagatacagcgagcagatgacgtatgggatatcttcagaaaaaatgctaaaagcatggaaagaaatggaagaaaaggccatccactatgctgaggttggtgtcattggatacctggaggatcagattatgtctttgcatgctgaaatcatggagctacagaagagcccctatggaagacgtcagggagacttgatggaatctctggaacagcgtgccattgatctatataagcagttaaaacacagaccttcagatcactcctacagtgacagcacagagatggtgaaaatcattgtgcacactgtgcagagtcaggaccgtgtgctcaaggagctgtttggtcatttgagcaagttgttgggctgtaagcagaagattattgatctactccctaaggtggaagtggccctcagtaatatcaaagaagctgacaatactgtcatgttcatgcagggaaaaaggcagaaagaaatatggcatctccttaaaattgcctgtacacagagttctgcccggtcccttgtaggatccagtctagaaggtgcagtaacccctcagacatcagcatggctgcccccgacttcagcagaacatgatcattctctgtcatgtgtggtaactcctcaagatggggagacttcagcacaaatgatagaagaaaatttgaactgccttggccatttaagcactattattcatgaggcaaatgaggaacagggcaatagtatgatgaatcttgattggagttggttaacagaatgagttgtcacttgttcactgtccccaaacctatggaagttgttgctatacatgttggaaatgtgtttttcccccatgaaaccattcttcagacatcagtcaatggaagaaatggctatgaacagaaactacatttctactatgatcagaagaacatgattttacaagtataacagttttgagtaattcaagcctctaaacagacaggaatttagaaaaagtcaatgtacttgtttgaatatttgttttaataccacagctatttagaagcatcatcacgacacatttgccttcagtcttggtaaaacattacttatttaactgattaaaaataccttctatgtattagtgtcaacttttaacttttgggcgtaagaccaaatgtagttttgtatacagagaagaaaacctcaagtaataggcattttaagtaaaagtctacctgtgtttttttctaaaaaggctgctcacaagttctatttcttgaagaataaattctacctccttgtgttgcactgaacaggttctcttcctggcatcataaggagttggtgtaatcattttaaattccactgaaaatttaacagtatccccttctcatcgaagggattgtgtatctgtgcttctaatattagttggctttcataaatcatgttgttgtgtgtatatgtatttaagatgtacatttaataatatcaaagagaagatgcctgttaatttataatgtatttgaaaattacatgttttttcatttgtaaaaatgagtcatttgtttaaacaatctttcatgtcttgtcatacaaatttataaaggtctgcactcctttatctgtaattgtaattccaaaatccaaaaagctctgaaaacaaggtttccataagcttggtgacaaaattcatttgcttgcaatctaatctgaactgaccttgaatctttttatcccatttagtgtgaatattcctttattttgctgcttgatgatgagagggagggctgctgccacagactgtggtgagggctggttaatgtagtatggtatatgcacaaaactacttttctaaaatctaaaatttcataattctgaaacaacttgccccaagggtttcagagaaaggactgtggacctctatcatctgctaagtaatttagaagatattatttgtcttaaaaaatgtgaaatgcttttatattctaatagtttttcactttgtgtattaaatggtttttaaattac

SEQ ID NO: 8298 - protein, 745 aa, Homo sapiens; identical to SEQ ID NO: 1205

SEQ ID NO: 8299 - DNA, 829 bp, Homo sapiens
tggcatctccttaaaattgcctgtacacagagttctgcccggtcccttgtaggatccagtctagaaggtgcagtaacccctcagacatcagcatggctgcccccgacttcagcagaacatgatcattctctgtcatgtgtggtaactcctcaagatgggtgggtttactttgtaacaatagatagctgtgttttcatagcagtggtataggaatgaggcagtagttgttaaggtagtcttctgtgccttcagaccagggttgagtcctgactatccctttgtaataatcttaggcaacttacttgacttttttgatgttcatatttcctcacctgtaaaacaggaatgtctcatagaactgctgtggaaatttgattagacaatgtatataaagtgcttgggaaataaatgttcagcaaatgttgcgtattattagctcaaatgttgcttattattagctaagtccaagttctaagtcctttcttttattggcttattactttcttttactcaaaccttactccttcattaacagtttatgagaaattatgctatcattttgcatttatcattttggggatccttgattacccttctaataaatttttgagatctattttataactttgtatttctaagattagacttttttcagtgttttaaatcagttttgcaagaactcagattccaagccctatattttattaattcctactcttttgctaaaagctgaatgactatccatttctgttattttctcagcttaagatgtgccgtatccaaagccagtggctctttgctagcttgtgtattgtcgcttttctcacaa

SEQ ID NO: 8300 - protein, 31 aa, Homo sapiens
MTIHFCYFLSLRCAVSKASGSLLACVLSLFS

SEQ ID NO: 8301 - DNA, 799 bp, Homo sapiens
taagttctcccagggcgctgccagagccctgccggctaagggatggggaaacaaacaggtggggctgtaatctcgtaattcccagtcaaaagaggtaggaagggatgctgaggacccagggatactgatgattgggctgacccagaagtggccatctttgtggaaaccaggctggagtgcaatggtgtgatctcagctcactgcaacctccacctccagggttcaagcaattctactgcctcagcctcccgagtagctggcattacaggcgcatgcaaccacgcccagctaattttttgcatttttagtagagacggggtttcaccgtgttggctaggctggtctcaaactcctgatctcaggtcatctgcctgcctcagcctcccaaagtgctgcaatcacaggcatgagccacctggcctgttttttaaaaagcctaagcctgttgaccccaggctccacaatcttcaattttccgagtctcagtttttttttcatgagtaaaatagaggtaatacctacctcacagagattttgtgaagattaaatgaaacagtgtctggaccataagtgcccaatataaagtcatccagagtaaagtcatagggctcaaagtctttccggaagcggcgagccagggtctcctcgtcttccttgctgatctgacactgcctccagtcagacttatcaggaacattaaggatggcttcactggccaggacctccctgcagaaatagcacaaagaagtcaaaatggaaactatcagcctgagctctcctcaacatcacccaaaggagg

SEQ ID NO: 8302 - protein, 46 aa, Homo sapiens
MSHLACFLKSLSLLTPGSTIFNFPSLSFFFMSKIEVIPTSQRFCED

SEQ ID NO: 8303 - DNA, 2703 bp, Homo sapiens
caaagctaattccctgcccttcagcagaaacctgaaggaaacaagcataagacaaaaggaaattcctgctttacgtagtggaaaacaaactttgttagcttatttccaagtaataccttctcttagaatagagttcataaataatgctgtgggtgagagatcacttaattggttgttaacagaatctggggatgttctgggagcaagaataactttgagcaaacttcatattacttaagaagggtgtggttatgcccttcctcaaactgccacttccttgactgaagcaaaataaaggattatatgctggtgatgaagtccttgaatactctataccagatattctgtggatcctaggagccctgaagcctagcttttcgctttgattttctgaattgactatgactgtctggacccgtgaactacagatgcactacgtaacaaactagaggctgggcgcagtggctcacgcgtgcactttgggaggctgaggcgggcggatcacgagatcaggagtttgagaccagcctggccaacatggtgaaaccccgtctctactaaaaatacaaaaattagccaggtgtggtggcacgtgcctgtaatcccagctactagggaggctgaggcaggagaatcacttcttgaacccaggatgcagaggttgcagtgagccgagattgtgccactgtactctagcagcctgggtgacaaagcaagactccatctcaaaaaaaaaaaacaaaccaaaactagaagcccagtctgtgggctccagagggagagcttactttccaaaaaaggttttaataatttgtgttttgggtattgatatggaggagttaccttttaatctctggcttccaacagttgttcctatttctacattcatagtagttcagctcccttatttgttaagattttttctctgattgccatacttatgaaattcaatgtgcagttccttctgtccacatctgtattcatgtataaatttcaaagacatttcaaaatgtcttattatttatttgcatttcttgataacttttggtctgtatggatgactaagtttttgtttactagggagaagtggataccaaaaaatgtggttctgctttggtttccagtcttgccacgggcttgaaaccaagataccattttgctgctttggaaaagacctattatgagaggcttccatatcgtgctaccttgccctggccaaaggaggcttatctgatgaccatgtcctcatcctgcctattggacactaccagtcagtggtggagctttcagcagaggtggtagaagaggtggagaagtataaggccactctgagacggttctttaagagtcgagggaaatggtgtgttgtatttgagagaaattataagagccatcacctccagctacaggtcattcctgtcccaatcagctgctctactactgatgacattaaagatgccttcattacccaggcacaggagcagcagatagagctgttggaaatcccagagcactctgacatcaagcagattgcacagccaggagcagcatatttttatgttgaacttgacacaggagaaaagcttttccacagaattaaaaagaattttcctttgcagtttggaagggaggtcctggccagtgaagccatccttaatgttcctgataagtctgactggaggcagtgtcagatcagcaaggaagacgaggagaccctggctcgccgcttccggaaagactttgagccctatgactttactctggatgactaaaacaaagggaagaactttttatgaactccacaggaagtagtaaagcttttttttttttttaattaaaagaattttttttgagacaaagtctcgctctgtcacccaagcaggattgcagtggcataactgtggctcactgtagcctcaacctcctgggctctagagttcctcccacctcagcctcatgagtagctgggaccacaggcgcatgctaccatgcctggcaaacttttttgattttttatagagacaggagggtctccctgtgttgcccaggctggtctgtaatgcctaggctcaagggatcctctgccttggcttcttaacctgctgggattacaagcatgagacaccattcctggcctagaagcctatttttaaagaaactacaatctcccatggggactgtttccctgcctcttttgtgcagtcccatggaacttgcctacagcaagaggcctaagattgaatctttttggggaaaagtcattctaggatgaaaatcctatgttaaggccgggcgcagtggctcacgcctgtaatcccagtactttgggaagccgaggcaggtggatcacctgaggtgaggagtttgagaccagcctggccaacatggtgaaaccccgtctttactaaagctacaaaaattagctgggcgtggtgccaggcacttgtaatcccagctactcaggaggctgaggcaggagaattgcttgagcctgggaggtggaggttgcagtgagccaagatcgctccattgcactccagcctgggtgacagtgaaactccatctcaaaaataaaagaataaaagtatgtctgtcatccagctcctatgtctgttatccagctccaagtacagcttgtgtatatcaacattttcaaaaacctttaaactaccaaatgaaatccagatgtttttccatggttga

SEQ ID NO: 8304 - protein, 84 aa, Homo sapiens
MLNLTQEKSFSTELKRIFLCSLEGRSWPVKPSLMFLISLTGGSVRSARKTRRPWLAASGKTLSPMTLLWMTKTKGRTFYELHRK

SEQ ID NO: 8305 - DNA, 1614 bp, Homo sapiens
gacagatggcacagaaaccgctgcgcctcttggcttgtggagatgttgaaggaaagtttgatattttattcaatagagttcaagcaattcagaagaaaagtggaaactttgatctgctgttgtgtgtaggaaatttctttggctccacccaagatgctgaatgggaggagtataagactggcatcaagaaagggagaagtggataccaaaaaatgtggttctgctttggtttccagtcttgccacgggcttgaaaccaagataccattttgctgctttggaaaagacctattatgagaggcttccatatcgaaaccatatcattctacaggaaaatgcacagcatgccacccggtttatagctctggcaaatgttggaaatccagaaaagaaaaagtatctttacgcgttcagtattgttcccatgaagctaatggatgcagcagaactggtaaaacagcctccggatgtcactgaaaacccttacagaaaatctgggcaggaagcatccataggaaagcaaattcttgcccctgtggaagaatcagcctgtcagtttttctttgatttaaatgaaaagcagggaaggaagcgttcatccacaggtagagatagcaaatcttctcctcatccaaagcagcctcgcaaacctcctcagcctccaggaccctgctggttttgccttgctagccctgaagtggaaaaacatttggtggtcaacatcggcacacattgctaccttgccctggccaaaggaggcttatctgatgaccatgtcctcatcctgcctattggacactaccagtcagtggtggagctttcagcagaggtggtagaagaggtggagaagtataaggccactctgagacggttctttaagagtcgagggaaatggtgtgttgtatttgagagaaattataagagccatcacctccagctacaggtcattcctgtcccaatcagctgctctactactgatgacattaaagatgccttcattacccaggcacaggagcagcagatagagctgttggaaatcccagagcactctgacatcaagcagattgcacagccaggagcagcatatttttatgttgaacttgacacaggagaaaagcttttccacagaattaaaaagaattttcctttgcagtttggaagggaggtcctggccagtgaagccatccttaatgttcctgataagtctgactggaggcagtgtcagatcagcaaggaagacgaggagaccctggctcgccgcttccggaaagactttgagccctatgactttactctggatgactaaaacaaagggaagaactttttatgaactccacaggaagtagtaaagcttttttttttttttaattaaaagaattttttttgagacaaagtctcgctctgtcacccaagcaggattgcatgagccaagatcgctccattgcactccagcctgggtgacagtgaaactccatctcaaaaataaaagaataaaagtatgtctgtcatccagctcctatgtctgttatccagctccaagtacagcttgtgtatatcaacattttcaaaaacctttaaactaccaaatgaaatccagatgtttttccatggttga

SEQ ID NO: 8306 - protein, 383 aa, Homo sapiens
MLNGRSIRLASRKGEVDTKKCGSALVSSLATGLKPRYHFAALEKTYYERLPYRNHIILQENAQHATRFIALANVGNPEKKKYLYAFSIVPMKLMDAAELVKQPPDVTENPYRKSGQEASIGKQILAPVEESACQFFFDLNEKQGRKRSSTGRDSKSSPHPKQPRKPPQPPGPCWFCLASPEVEKHLVVNIGTHCYLALAKGGLSDDHVLILPIGHYQSVVELSAEVVEEVEKYKATLRRFFKSRGKWCVVFERNYKSHHLQLQVIPVPISCSTTDDIKDAFITQAQEQQIELLEIPEHSDIKQIAQPGAAYFYVELDTGEKLFHRIKKNFPLQFGREVLASEAILNVPDKSDWRQCQISKEDEETLARRFRKDFEPYDFTLDD

SEQ ID NO: 8307 - DNA, 2659 bp, Homo sapiens
ttccggggagcgcggattcgcattcccaattttaggtggcagtcgcaacccatactattcggacagatggcacagaaaccgctgcgcctgtgagtgaccgtgaatggaagcctctctccctgtgtctctttcgtcttggcttgtggagatgttgaaggaaagtttgatattttattcaatagagttcaagcaattcagaagaaaagtggaaactttgatctgctgttgtgtgtaggaaatttctttggctccacccaagatgctgaatgggaggagtataagactggcatcaagaaagctcctattcagacatatgtgcttggtgctaataaccaggaaacagtaaaatatttccaggatgctgatggatgtgaattagctgaaaacattacttatctgggtcgtaaaggtatcttcactggaagctcggggctgcagattgtgtacctcagtgggacagaatccttaaatgagccagtaccaggttatagttttagtcccaaggatgtgtcttctctgagaatgatgctgtgtacaacctcccagtttaagggtgttgatatcttgctcacatccccatggcccaagtgtgtggggaactttgggaattcttctggagaagtggataccaaaaaatgtggttctgctttggtttccagtcttgccacgggcttgaaaccaagataccattttgctgctttggaaaagacctattatgagaggcttccatatcgaaaccatatcattctacaggaaaatgcacagcatgccacccggtttatagctctggcaaatgttggaaatccagaaaagaaaaagtatctttacgcgttcagtattgttcccatgaagctaatggatgcagcagaactggtaaaacagcctccggatgtcactgaaaacccttacagaaaatctgggcaggaagcatccataggaaagcaaattcttgcccctgtggaagaatcagcctgtcagtttttctttgatttaaatgaaaagcagggaaggaagcgttcatccacaggtagagatagcaaatcttctcctcatccaaagcagcctcgcaaacctcctcagcctccaggaccctgctggttttgccttgctagccctgaagtggaaaaacatttggtggtcaacatcggcacacattgctaccttgccctggccaaaggaggcttatctgatgaccatgtcctcatcctgcctattggacactaccagtcagtggtggagctttcagcagaggtggtagaagaggtggagaagtataaggccactctgagacggttctttaagagtcgagggaaatggtgtgttgtatttgagagaaattataagagccatcacctccagctacaggtcattcctgtcccaatcagctgctctactactgatgacattaaagatgccttcattacccaggcacaggagcagcagatagagctgttggaaatcccagagcactctgacatcaagcagattgcacagccaggagcagcatatttttatgttgaacttgacacaggagaaaagcttttccacagaattaaaaagaattttcctttgcagtttggaagggaggtcctggccagtgaagccatccttaatgttcctgataagtctgactggaggcagtgtcagatcagcaaggaagacgaggagaccctggctcgccgcttccggaaagactttgagccctatgactttactctggatgactaaaacaaagggaagaactttttatgaactccacaggaagtagtaaagcttttttttttttttaattaaaagaattttttttgagacaaagtctcgctctgtcacccaagcaggattgcagtggcataactgtggctcactgtagcctcaacctcctgggctctagagttcctcccacctcagcctcatgagtagctgggaccacaggcgcatgctaccatgcctggcaaacttttttgattttttatagagacaggagggtctccctgtgttgcccaggctggtctgtaatgcctaggctcaagggatcctctgccttggcttcttaacctgctgggattacaagcatgagacaccattcctggcctagaagcctatttttaaagaaactacaatctcccatggggactgtttccctgcctcttttgtgcagtcccatggaacttgcctacagcaagaggcctaagattgaatctttttggggaaaagtcattctaggatgaaaatcctatgttaaggccgggcgcagtggctcacgcctgtaatcccagtactttgggaagccgaggcaggtggatcacctgaggtgaggagtttgagaccagcctggccaacatggtgaaaccccgtctttactaaagctacaaaaattagctgggcgtggtgccaggcacttgtaatcccagctactcaggaggctgaggcaggagaattgcttgagcctgggaggtggaggttgcagtgagccaagatcgctccattgcactccagcctgggtgacagtgaaactccatctcaaaaataaaagaataaaagtatgtctgtcatccagctcctatgtctgttatccagctccaagtacagcttgtgtatatcaacattttcaaaaacctttaaactaccaaatgaaatccagatgtttttccatggttga

SEQ ID NO: 8308 - protein, 401 aa, Homo sapiens
MMLCTTSQFKGVDILLTSPWPKCVGNFGNSSGEVDTKKCGSALVSSLATGLKPRYHFAALEKTYYERLPYRNHIILQENAQHATRFIALANVGNPEKKKYLYAFSIVPMKLMDAAELVKQPPDVTENPYRKSGQEASIGKQILAPVEESACQFFFDLNEKQGRKRSSTGRDSKSSPHPKQPRKPPQPPGPCWFCLASPEVEKHLVVNIGTHCYLALAKGGLSDDHVLILPIGHYQSVVELSAEVVEEVEKYKATLRRFFKSRGKWCVVFERNYKSHHLQLQVIPVPISCSTTDDIKDAFITQAQEQQIELLEIPEHSDIKQIAQPGAAYFYVELDTGEKLFHRIKKNFPLQFGREVLASEAILNVPDKSDWRQCQISKEDEETLARRFRKDFEPYDFTLDD

SEQ ID NO: 8309 - DNA, 2003 bp, Homo sapiens
cggtcgcatttttccggggagcgcggattcgcattcccaattttaggtggcagtcgcaacccatactattcggacagatggcacagaaaccgctgcgcctcttggcttgtggagatgttgaaggaaagtttgatattttattcaatagagttcaagcaattcagaagaaaagtggaaactttgatctgctgttgtgtgtaggaaatttctttggctccacccaagatgctgaatgggaggagtataagactggcatcaagaaagctcctattcagacatatgtgcttggtgctaataaccaggaaacagtaaaatatttccaggatgctgatggatgtgaattagctgaaaacattacttatctgggtcgtaaaggtatcttcactggaagctcggggctgcagattgtgtacctcagtgggacagaatccttaaatgagccagtaccaggttatagttttagtcccaaggatgtgtcttctctgagaatgatgctgtgtacaacctcccagtttaagggtgttgatatcttgctcacatccccatggcccaagtgtgtggggaactttgggaattcttctggagaagtggataccaaaaaatgtggttctgctttggtttccagtcttgccacgggcttgaaaccaagataccattttgctgctttggaaaagacctattatgagaggcttccatatcgaaaccatatcattctacaggaaaatgcacagcatgccacccggtttatagctctggcaaatgttggaaatccagaaaagaaaaagtatctttacgcgttcagtattgttcccatgaagctaatggatgcagcagaactggtaaaacagcctccggatgtcactgaaaacccttacagaaaatctgggcaggaagcatccataggaaagcaaattcttgcccctgtggaagaatcagcctgtcagtttttctttgatttaaatgaaaagcagggaaggaagcgttcatccacaggtagagatagcaaatcttctcctcatccaaagcagcctcgcaaacctcctcagcctccaggaccctgctggttttgccttgctagccctgaagtggaaaaacatttggtggtcaacatcggcacacattgctaccttgccctggccaaaggaggcttatctgatgaccatgtcctcatcctgcctattggacactaccagtcagtggtggagctttcagcagaggtggtagaagaggtggagaagtataaggccactctgagacggttctttaagagtcgagggaaatggtgtgttgtatttgagagaaattataagagccatcacctccagctacaggtcattcctgtcccaatcagctgctctactactgatgacattaaagatgccttcattacccaggcacaggagcagcagatagagctgttggaaatcccagagcactctgacatcaagcagattgcacagccaggagcagcatatttttatgttgaacttgacacaggagaaaagcttttccacagaattaaaaagaattttcctttgcagtttggaagggaggtcctggccagtgaagccatccttaatgttcctgataagtctgactggaggcagtgtcagatcagcaaggaagacgaggagaccctggctcgccgcttccggaaagactttgagccctatgactttactctggatgactaaaacaaagggaagaactttttatgaactccacaggaagtagtaaagcttttttttttttttaattaaaagaattttttttgagacaaagtctcgctctgtcacccaagcaggattgcatgagccaagatcgctccattgcactccagcctgggtgacagtgaaactccatctcaaaaataaaagaataaaagtatgtctgtcatccagctcctatgtctgttatccagctccaagtacagcttgtgtatatcaacattttcaaaaacctttaaactaccaaatgaaatccagatgtttttccatggttga

SEQ ID NO: 8310 - protein, 538 aa, Homo sapiens; identical to SEQ ID NO: 1207

SEQ ID NO: 8311 - DNA, 2420 bp, Homo sapiens
gattgttgcgcggtcgcatttttccggggagcgcggattcgcattcccaattttaggtggcagtcgcaacccatactattcggacagatggcacagaaaccgctgcgcctcttggcttgtggagatgttgaaggaaagtttgatattttattcaatagagttcaagcaattcagaagaaaagtggaaactttgatctgctgttgtgtgtaggaaatttctttggctccacccaagatgctgaatgggaggagtataagactggcatcaagaaagctcctattcagacatatgtgcttggtgctaataaccaggaaacagtaaaatatttccaggatgctgatggatgtgaattagctgaaaacattacttatctggggagaagtggataccaaaaaatgtggttctgctttggtttccagtcttgccacgggcttgaaaccaagataccattttgctgctttggaaaagacctattatgagaggcttccatatcgaaaccatatcattctacaggaaaatgcacagcatgccacccggtttatagctctggcaaatgttggaaatccagaaaagaaaaagtatctttacgcgttcagtattgttcccatgaagctaatggatgcagcagaactggtaaaacagcctccggatgtcactgaaaacccttacagaaaatctgggcaggaagcatccataggaaagcaaattcttgcccctgtggaagaatcagcctgtcagtttttctttgatttaaatgaaaagcagggaaggaagcgttcatccacaggtagagatagcaaatcttctcctcatccaaagcagcctcgcaaacctcctcagcctccaggaccctgctggttttgccttgctagccctgaagtggaaaaacatttggtggtcaacatcggcacacattgctaccttgccctggccaaaggaggcttatctgatgaccatgtcctcatcctgcctattggacactaccagtcagtggtggagctttcagcagaggtggtagaagaggtggagaagtataaggccactctgagacggttctttaagagtcgagggaaatggtgtgttgtatttgagagaaattataagagccatcacctccagctacaggtcattcctgtcccaatcagctgctctactactgatgacattaaagatgccttcattacccaggcacaggagcagcagatagagctgttggaaatcccagagcactctgacatcaagcagattgcacagccaggagcagcatatttttatgttgaacttgacacaggagaaaagcttttccacagaattaaaaagaattttcctttgcagtttggaagggaggtcctggccagtgaagccatccttaatgttcctgataagtctgactggaggcagtgtcagatcagcaaggaagacgaggagaccctggctcgccgcttccggaaagactttgagccctatgactttactctggatgactaaaacaaagggaagaactttttatgaactccacaggaagtagtaaagcttttttttttttttaattaaaagaattttttttgagacaaagtctcgctctgtcacccaagcaggattgcagtggcataactgtggctcactgtagcctcaacctcctgggctctagagttcctcccacctcagcctcatgagtagctgggaccacaggcgcatgctaccatgcctggcaaacttttttgattttttatagagacaggagggtctccctgtgttgcccaggctggtctgtaatgcctaggctcaagggatcctctgccttggcttcttaacctgctgggattacaagcatgagacaccattcctggcctagaagcctatttttaaagaaactacaatctcccatggggactgtttccctgcctcttttgtgcagtcccatggaacttgcctacagcaagaggcctaagattgaatctttttggggaaaagtcattctaggatgaaaatcctatgttaaggccgggcgcagtggctcacgcctgtaatcccagtactttgggaagccgaggcaggtggatcacctgaggtgaggagtttgagaccagcctggccaacatggtgaaaccccgtctttactaaagctacaaaaattagctgggcgtggtgccaggcacttgtaatcccagctactcaggaggctgaggcaggagaattgcttgagcctgggaggtggaggttgcagtgagccaagatcgctccattgcactccagcctgggtgacagtgaaactccatctcaaaaataaaagaataaaagtatgtctgtcatccagctcctatgtctgttatccagctccaagtacagcttgtgtatatcaacattttcaaaaacctttaaactaccaaatgaaatccagatgtttttccatggttga

SEQ ID NO: 8312 - protein, 293 aa, Homo sapiens
MKLMDAAELVKQPPDVTENPYRKSGQEASIGKQILAPVEESACQFFFDLNEKQGRKRSSTGRDSKSSPHPKQPRKPPQPPGPCWFCLASPEVEKHLVVNIGTHCYLALAKGGLSDDHVLILPIGHYQSVVELSAEVVEEVEKYKATLRRFFKSRGKWCVVFERNYKSHHLQLQVIPVPISCSTTDDIKDAFITQAQEQQIELLEIPEHSDIKQIAQPGAAYFYVELDTGEKLFHRIKKNFPLQFGREVLASEAILNVPDKSDWRQCQISKEDEETLARRFRKDFEPYDFTLDD

SEQ ID NO: 8313 - DNA, 1899 bp, Homo sapiens
cggtcgcatttttccggggagcgcggattcgcattcccaattttaggtggcagtcgcaacccatactattcggacagatggcacagaaaccgctgcgcctcttggcttgtggagatgttgaaggaaagtttgatattttattcaatagagttcaagcaattcagaagaaaagtggaaactttgatctgctgttgtgtgtaggaaatttctttggctccacccaagatgctgaatgggaggagtataagactggcatcaagaaagctcctattcagacatatgtgcttggtgctaataaccaggaaacagtaaaatatttccaggatgctgatggatgtgaattagctgaaaacattacttatctgggtcgtaaaggtatcttcactggaagctcggggctgcagattgtgtacctcagtgggacagaatccttaaatgagccagtaccaggttatagttttagtcccaaggatgtgtcttctctgagaatgatgctgtgtacaacctcccagtttaagggtgttgatatcttgctcacatccccatggcccaagtgtgtggggaactttgggaattcttctggagaagtggataccaaaaaatgtggttctgctttggtttccagtcttgccacgggcttgaaaccaagataccattttgctgctttggaaaagacctattatgagaggcttccatatcgaaaccatatcattctacaggaaaatgcacagcatgccacccggtttatagctctggcaaatgttggaaatccagaaaagaaaaagtatctttacgcgttcagtattgttcccatgaagctaatggatgcagcagaactggtaaaacagcctccggatgtcactgaaaacccttacagaaaatctgggcaggaagcatccataggaaagcaaattcttgcccctgtggaagaatcagcctgtcagtttttctttgatttaaatgaaaagcagggaaggaagcgttcatccacaggtagagatagcaaatcttctcctcatccaaagcagcctcgcaaacctcctcagcctccaggaccctgctggttttgccttgctagccctgaagtggaaaaacatttggtggtcaacatcggcacacattgctaccttgccctggccaaaggaggcttatctgatgaccatgtcctcatcctgcctattggacactaccagtcagtggtggagctttcagcagaggtggtagaagaggtggagaagtataaggccactctgagacggttctttaagagtcgagggaaatggtgtgttgtatttgagagaaattataagagccatcacctccagctacaggtcattcctgtcccaatcagctgctctactactgatgacattaaagatgccttcattacccaggcacaggagcagcagatagagctgttggaaatcccagagcactctgacatcaagcagattgcacagccaggagcagcatatttttatgttgaacttgacacaggagaaaagcttttccacagaattaaaaagaattttcctttgcagtttggaagggaggtcctggccagtgaagccatccttaatgttcctgataagtctgactggaggcagtgtcagatcagcaaggaagacgaggagaccctggctcgccgcttccggaaagactttgagccctatgactttactctggatgactaaaacaaagggaagaactttttatgaactccacaggaagtagtaaagcttttttttttttttaattaaaagaattttttttgagacaaagtctcgctctgtcacccaagcaggattgcatgagccaagatcgctccattgcactccagcctgggtgacagtgaaactccatctcaaaaataaaagaataaaagtatgtctgtcatcc

SEQ ID NO: 8314 - protein, 538 aa, Homo sapiens; identical to SEQ ID NO: 1207

SEQ ID NO: 8315 - DNA, 2041 bp, Homo sapiens
gcagtgaaggacttgaaattatggcagatggagaatggagccgacttgatggaatgaaggcaagtggagggatgtcggaacaggctgctttggctggattagcaccgggtgtaggcgggacacttagtcattctcccttggcccagacgatgccgccgtggagacagctgaggaagcaaaggagcctgctgaagctgacatcactgagctctgccgggacatgttctccaaaatggccacttacctgactggggaactgacggccaccagtgaagactataagctcctggaaaatatgaataaactcaccagcttgaagtatcttgaaatgaaagatattgctataaacattagtaggaacttaaaggacttaaaccagaaatatgctggactgcagccttatctggatcagatcaatgtcattgaagagcaggtagcagctcttgagcaggcagcttacaagttggatgcatattcaaaaaaactggaagccaagtacaagaagctggagaagcgatgagaaacttatttctatgggacagagtcttttttttttaatgtggaagaatgtcttataaaacctgaatcctgaggctgatgaattgtgaaaattcctcaaaaggaaattatgctggtcatcacaggaacatctcaacgttcgagtaaactggaggactgtggctattcctgaaccttctttgagacagaatccctcagaatctcacacttataacttcctaccttttacttgaatgctttgccatattcaggacagagactctcacaaagttcagaaaacagctggacttaccagtaaaatcaaatgagaggacctattttctctggtagtggttgattactacattattttcttaagtggctggttttttagttactatgtaaatggtcgtttttctgttaatgatgctaatgtgttgtaaacaagattctaaatttaaaaaggaaaacaaaacaaacttgttctttgcagcttatcaccttgtgaatgtcggtaacttacttttccataatattgcaaataacataaaatcttaaaataattccaagctgagtcttctagattgagcagaaatggtgaaaggagtattgataacttggcgtatgtgatgggcccctcttgtttattttctatgtgagtcacattgacatgcgatcagtttgggaaatgtgatgaaaacaaagactagatgggtatgtgtgtttatgtgttgggtagggaggtgacgattgccactcataaaataaaggattttataaaataccttcctactgtgtatgtaggatttggggggatcttagggacctaatcgacttctttgcacactaaaaacatcagacaatgggacatactgactgaccagtctaggttgaaagataggcagccttacccagaacacaacattagcagctgggaaggtgtctgaggtccccaattacatatcccaaagagtttcttacttctgtttctgtcatttcccctctgttccagacagtcatcatttatcctctgttcttcctggactgttgctgtggtctcttctcatcttaactgtcccttccaaccaccctccacactgctgccagagcaatcttaaaaatgtaaactggccctattactcctgcttagaaccctgtagtgacttatcatggcctctgaaaaatctagactttcattatgcatacaagtcccttgtgtttttttgtttgtttatagacagggtctctattgtcacccaggctggagtgtggtggtgtgataatagctcaccttgacctcctaggctcaactgatcttcccacctcagcctcctgaatagctgggactaccagcacgctccaccatgccttgctaattattttttatacagatggagtctcactatgttgtccaggctggtcttgaactggcctcaagtgattctcttaccacagcctgccagagtgctgagattgtaggcatgaaccaccgtgcctaacataaggcccctatttaaacatttttcttaaataaaaaacaaaa

SEQ ID NO: 8316 - protein, 99 aa, Homo sapiens; identical to SEQ ID NO: 1210

SEQ ID NO: 8317 - DNA, 2111 bp, Homo sapiens
acacccagtgcgcatgcgcagcaccccggcccggaaacagcgcggggtccgctatggcggcggcagccgagggcgtactggcgacccggagtgatgagcccgcccgagacgatgccgccgtggagacagctgaggaagcaaaggagcctgctgaagctgacatcactgagctctgccgggacatgttctccaaaatggccacttacctgactggggaactgacggagctcagagattgatcagagcacaagaaacagatttcggagtcactttcgtagtggtgtgattggacgctgtgcaggatgagattgccaaggaagagcttagaagtagccaccagtgaagactataagctcctggaaaatatgaataaactcaccagcttgaagtatcttgaaatgaaagatattgctataaacattagtaggaacttaaaggacttaaaccagaaatatgctggactgcagccttatctggatcagatcaatgtcattgaagagcaggtagcagctcttgagcaggcagcttacaagttggatgcatattcaaaaaaactggaagccaagtacaagaagctggagaagcgatgagaaacttatttctatgggacagagtcttttttttttaatgtggaagaatgtcttataaaacctgaatcctgaggctgatgaattgtgaaaattcctcaaaaggaaattatgctggtcatcacaggaacatctcaacgttcgagtaaactggaggactgtggctattcctgaaccttctttgagacagaatccctcagaatctcacacttataacttcctaccttttacttgaatgctttgccatattcaggacagagactctcacaaagttcagaaaacagctggacttaccagtaaaatcaaatgagaggacctattttctctggtagtggttgattactacattattttcttaagtggctggttttttagttactatgtaaatggtcgtttttctgttaatgatgctaatgtgttgtaaacaagattctaaatttaaaaaggaaaacaaaacaaacttgttctttgcagcttatcaccttgtgaatgtcggtaacttacttttccataatattgcaaataacataaaatcttaaaataattccaagctgagtcttctagattgagcagaaatggtgaaaggagtattgataacttggcgtatgtgatgggcccctcttgtttattttctatgtgagtcacattgacatgcgatcagtttgggaaatgtgatgaaaacaaagactagatgggtatgtgtgtttatgtgttgggtagggaggtgacgattgccactcataaaataaaggattttataaaataccttcctactgtgtatgtaggatttggggggatcttagggacctaatcgacttctttgcacactaaaaacatcagacaatgggacatactgactgaccagtctaggttgaaagataggcagccttacccagaacacaacattagcagctgggaaggtgtctgaggtccccaattacatatcccaaagagtttcttacttctgtttctgtcatttcccctctgttccagacagtcatcatttatcctctgttcttcctggactgttgctgtggtctcttctcatcttaactgtcccttccaaccaccctccacactgctgccagagcaatcttaaaaatgtaaactggccctattactcctgcttagaaccctgtagtgacttatcatggcctctgaaaaatctagactttcattatgcatacaagtcccttgtgtttttttgtttgtttatagacagggtctctattgtcacccaggctggagtgtggtggtgtgataatagctcaccttgacctcctaggctcaactgatcttcccacctcagcctcctgaatagctgggactaccagcacgctccaccatgccttgctaattattttttatacagatggagtctcactatgttgtccaggctggtcttgaactggcctcaagtgattctcttaccacagcctgccagagtgctgagattgtaggcatgaaccaccgtgcctaacataaggcccctatttaaacatttttcttaaataaaaaacaaaa

SEQ ID NO: 8318 - protein, 95 aa, Homo sapiens
MRLPRKSLEVATSEDYKLLENMNKLTSLKYLEMKDIAINISRNLKDLNQKYAGLQPYLDQINVIEEQVAALEQAAYKLDAYSKKLEAKYKKLEKR

SEQ ID NO: 8319 - DNA, 2003 bp, Homo sapiens
acacccagtgcgcatgcgcagcaccccggcccggaaacagcgcggggtccgctatggcggcggcagccgagggcgtactggcgacccggagtgatgagcccgcccgagacgatgccgccgtggagacagctgaggaagcaaaggagcctgctgaagctgacatcactgagctctgccgggacatgttctccaaaatggccacttacctgactggggaactgacggccaccagtgaagactataagctcctggaaaatatgaataaactcaccagcttgaagtatcttgaaatgaaagatattgctataaacattagtaggaacttaaaggacttaaaccagaaatatgctggactgcagccttatctggatcagatcaatgtcattgaagagcaggtagcagctcttgagcaggcagcttacaagttggatgcatattcaaaaaaactggaagccaagtacaagaagctggagaagcgatgagaaacttatttctatgggacagagtcttttttttttaatgtggaagaatgtcttataaaacctgaatcctgaggctgatgaattgtgaaaattcctcaaaaggaaattatgctggtcatcacaggaacatctcaacgttcgagtaaactggaggactgtggctattcctgaaccttctttgagacagaatccctcagaatctcacacttataacttcctaccttttacttgaatgctttgccatattcaggacagagactctcacaaagttcagaaaacagctggacttaccagtaaaatcaaatgagaggacctattttctctggtagtggttgattactacattattttcttaagtggctggttttttagttactatgtaaatggtcgtttttctgttaatgatgctaatgtgttgtaaacaagattctaaatttaaaaaggaaaacaaaacaaacttgttctttgcagcttatcaccttgtgaatgtcggtaacttacttttccataatattgcaaataacataaaatcttaaaataattccaagctgagtcttctagattgagcagaaatggtgaaaggagtattgataacttggcgtatgtgatgggcccctcttgtttattttctatgtgagtcacattgacatgcgatcagtttgggaaatgtgatgaaaacaaagactagatgggtatgtgtgtttatgtgttgggtagggaggtgacgattgccactcataaaataaaggattttataaaataccttcctactgtgtatgtaggatttggggggatcttagggacctaatcgacttctttgcacactaaaaacatcagacaatgggacatactgactgaccagtctaggttgaaagataggcagccttacccagaacacaacattagcagctgggaaggtgtctgaggtccccaattacatatcccaaagagtttcttacttctgtttctgtcatttcccctctgttccagacagtcatcatttatcctctgttcttcctggactgttgctgtggtctcttctcatcttaactgtcccttccaaccaccctccacactgctgccagagcaatcttaaaaatgtaaactggccctattactcctgcttagaaccctgtagtgacttatcatggcctctgaaaaatctagactttcattatgcatacaagtcccttgtgtttttttgtttgtttatagacagggtctctattgtcacccaggctggagtgtggtggtgtgataatagctcaccttgacctcctaggctcaactgatcttcccacctcagcctcctgaatagctgggactaccagcacgctccaccatgccttgctaattattttttatacagatggagtctcactatgttgtccaggctggtcttgaactggcctcaagtgattctcttaccacagcctgccagagtgctgagattgtaggcatgaaccaccgtgcctaacataaggcccctatttaaacatttttcttaaataaaaaacaaaa

SEQ ID NO: 8320 - protein, 142 aa, Homo sapiens; identical to SEQ ID NO: 1212

SEQ ID NO: 8321 - DNA, 1287 bp, Homo sapiens
gcagtgaaggacttgaaattatggcagatggagaatggagccgacttgatggaatgaaggcaagtggagggatgtcggaacaggctgctttggctggattagcaccgggtgtaggcgggacacttagtcattctcccttggcccagacgatgccgccgtggagacagctgaggaagcaaaggagcctgctgaagctgacatcactgagctctgccgggacatgttctccaaaatggccacttacctgactggggaactgacggccaccagtgaagactataagctcctggaaaatatgaataaactcaccagcttgaagtatcttgaaatgaaagatattgctataaacattagtaggaacttaaaggacttaaaccagaaatatgctggactgcagccttatctggatcagatcaatgtcattgaagagcaggtagcagctcttgagcaggcagcttacaagttggatgcatattcaaaaaaactggaagccaagtacaagaagctggagaagcgatgagaaacttatttctatgggacagagtcttttttttttaatgtggaagaatgtcttataaaacctgaatcctgaggctgatgaattgtgaaaattcctcaaaaggaaattatgctggtcatcacaggaacatctcaacgttcgagtaaactggaggactgtggctattcctgaaccttctttgagacagaatccctcagaatctcacacttataacttcctaccttttacttgaatgctttgccatattcaggacagagactctcacaaagttcagaaaacagctggacttaccagtaaaatcaaatgagaggacctattttctctggtagtggttgattactacattattttcttaagtggctggttttttagttactatgtaaatggtcgtttttctgttaatgatgctaatgtgttgtaaacaagattctaaatttaaaaaggaaaacaaaacaaacttgttctttgcagcttatcaccttgtgaatgtcggtaacttacttttccataatattgcaaataacataaaatcttaaaataattccaagctgagtcttctagattgagcagaaatggtgaaaggagtattgataacttggcgtatgtgatgggcccctcttgtttattttctatgtgagtcacattgacatgcgatcagtttgggaaatgtgatgaaaacaaagactagatgggtatgtgtgtttatgtgttgggtagggaggtgacgattgccactcataaaataaaggattttataaaataccttc

SEQ ID NO: 8322 - protein, 99 aa, Homo sapiens; identical to SEQ ID NO: 1210

SEQ ID NO: 8323 - DNA, 1249 bp, Homo sapiens
acacccagtgcgcatgcgcagcaccccggcccggaaacagcgcggggtccgctatggcggcggcagccgagggcgtactggcgacccggagtgatgagcccgcccgagacgatgccgccgtggagacagctgaggaagcaaaggagcctgctgaagctgacatcactgagctctgccgggacatgttctccaaaatggccacttacctgactggggaactgacggccaccagtgaagactataagctcctggaaaatatgaataaactcaccagcttgaagtatcttgaaatgaaagatattgctataaacattagtaggaacttaaaggacttaaaccagaaatatgctggactgcagccttatctggatcagatcaatgtcattgaagagcaggtagcagctcttgagcaggcagcttacaagttggatgcatattcaaaaaaactggaagccaagtacaagaagctggagaagcgatgagaaacttatttctatgggacagagtcttttttttttaatgtggaagaatgtcttataaaacctgaatcctgaggctgatgaattgtgaaaattcctcaaaaggaaattatgctggtcatcacaggaacatctcaacgttcgagtaaactggaggactgtggctattcctgaaccttctttgagacagaatccctcagaatctcacacttataacttcctaccttttacttgaatgctttgccatattcaggacagagactctcacaaagttcagaaaacagctggacttaccagtaaaatcaaatgagaggacctattttctctggtagtggttgattactacattattttcttaagtggctggttttttagttactatgtaaatggtcgtttttctgttaatgatgctaatgtgttgtaaacaagattctaaatttaaaaaggaaaacaaaacaaacttgttctttgcagcttatcaccttgtgaatgtcggtaacttacttttccataatattgcaaataacataaaatcttaaaataattccaagctgagtcttctagattgagcagaaatggtgaaaggagtattgataacttggcgtatgtgatgggcccctcttgtttattttctatgtgagtcacattgacatgcgatcagtttgggaaatgtgatgaaaacaaagactagatgggtatgtgtgtttatgtgttgggtagggaggtgacgattgccactcataaaataaaggattttataaaataccttc

SEQ ID NO: 8324 - protein, 142 aa, Homo sapiens; identical to SEQ ID NO: 1212

SEQ ID NO: 8325 - DNA, 1357 bp, Homo sapiens
acacccagtgcgcatgcgcagcaccccggcccggaaacagcgcggggtccgctatggcggcggcagccgagggcgtactggcgacccggagtgatgagcccgcccgagacgatgccgccgtggagacagctgaggaagcaaaggagcctgctgaagctgacatcactgagctctgccgggacatgttctccaaaatggccacttacctgactggggaactgacggagctcagagattgatcagagcacaagaaacagatttcggagtcactttcgtagtggtgtgattggacgctgtgcaggatgagattgccaaggaagagcttagaagtagccaccagtgaagactataagctcctggaaaatatgaataaactcaccagcttgaagtatcttgaaatgaaagatattgctataaacattagtaggaacttaaaggacttaaaccagaaatatgctggactgcagccttatctggatcagatcaatgtcattgaagagcaggtagcagctcttgagcaggcagcttacaagttggatgcatattcaaaaaaactggaagccaagtacaagaagctggagaagcgatgagaaacttatttctatgggacagagtcttttttttttaatgtggaagaatgtcttataaaacctgaatcctgaggctgatgaattgtgaaaattcctcaaaaggaaattatgctggtcatcacaggaacatctcaacgttcgagtaaactggaggactgtggctattcctgaaccttctttgagacagaatccctcagaatctcacacttataacttcctaccttttacttgaatgctttgccatattcaggacagagactctcacaaagttcagaaaacagctggacttaccagtaaaatcaaatgagaggacctattttctctggtagtggttgattactacattattttcttaagtggctggttttttagttactatgtaaatggtcgtttttctgttaatgatgctaatgtgttgtaaacaagattctaaatttaaaaaggaaaacaaaacaaacttgttctttgcagcttatcaccttgtgaatgtcggtaacttacttttccataatattgcaaataacataaaatcttaaaataattccaagctgagtcttctagattgagcagaaatggtgaaaggagtattgataacttggcgtatgtgatgggcccctcttgtttattttctatgtgagtcacattgacatgcgatcagtttgggaaatgtgatgaaaacaaagactagatgggtatgtgtgtttatgtgttgggtagggaggtgacgattgccactcataaaataaaggattttataaaataccttc

SEQ ID NO: 8326 - protein, 95 aa, Homo sapiens; identical to SEQ ID NO: 8318

SEQ ID NO: 8327 - DNA, 3051 bp, Homo sapiens
cagcatcgccttttcctcccgtttctccttccactcccagctccacatcctcctcctattctcccctctcccctcttcaaacccccaccttccagttccctcacctcccctttcggctggtcccctggggcttgcagcaagagggagagagagctcctgacaggattgatggtccttccccaccctgtcctctcatccgctccctccccagcaggcacagacatccccctacaaaaggcaggagcccaggctgtgtggaaacagctgctctcagacgcctttccatttgctctctgctggctaggctgggctgtgcctctgctccctcttcctctagctgagagtgggcacctggggtaccgggcccccccacctcattccccatgaatgctgtgggaagtcctgaggggcaggagctgcaaaagctggggagtggagcctgggacaaccccgcctacagtggtcccccttccccacacgggacgctgagagtctgcaccatctccagcacggggcctctccagccccaacccaagaagcctgaagatgaaccccaggagacggcatacaggacccaggtgtccagctgctgcctccatatctgtcaaggcatcagaggactttggggaacaaccctgactgagaacacagctgagaaccgggaactttatatcaagaccaccctgagggagctgttggtatatattgtgttcctggtggacatctgtctactgacctatggaatgacaagctccagtgcttattactacaccaaagtgatgtctgagctcttcttacatactccatcagacactggagtctcctttcaggccatcagcagcatggcggacttctgggattttgcccagggcccactactggacagtttgtattggaccaaatggtacaacaaccagagcctgggccatggctcccactccttcatctactatgagaacatgctgctgggggttccgaggctgcggcagctaaaggtccgcaatgactcctgtgtggtgcatgaagacttccgggaggacattctgagctgctatgatgtctactctccagacaaagaagaacaactcccctttgggcccttcaatggcacagcgtggacataccactcgcaggatgagttggggggcttctcccactggggcaggctcacaagctacagcggaggtggctactacctggaccttccaggatcccgacagggtagtgcagaggctctccgggcccttcaggaggggctgtggctggacaggggcactcgagtggtgttcatcgacttctcagtctacaatgccaatatcaatcttttctgtgtcctgaggctggtggtggagtttccagctacaggaggtgccatcccatcctggcaaatccgcacagtcaagctgatccgctatgtcagcaactgggacttctttatcgttggctgtgaggtcatcttctgcgtcttcatcttctactatgtggtggaagagatcctggagctccacattcaccggcttcgctacctcagcagcatctggaacatactggacctggtggtcatcttgctctccattgtggctgtgggcttccacatattccgaaccctcgaggtgaatcggctcatggggaagctcctgcagcagccaaacacgtatgcagactttgagttcctcgccttctggcagacacagtacaacaacatgaatgctgtcaacctcttcttcgcctggatcaagatattcaagtacatcagcttcaacaaaaccatgacccagctctcctccacgctggcccgctgtgccaaggacatcctgggcttcgccgtcatgttcttcattgttttcttcgcctatgcccaactcggctacctgcttttcgggacccaagtggaaaactttagcactttcatcaagtgcattttcactcagttccggataatcctcggggactttgactacaatgctatcgacaatgccaaccgcatcctgggccctgcctactttgtcacctatgtcttcttcgtcttcttcgtgctcctgaacatgttcctggccatcatcaatgacacatattcagaggtcaaggaggagctggctggacagaaggatgagctgcaactttctgacctcctgaaacagggctacaacaagaccctactaagactgcgtctgaggaaggagagggtttcggatgtgcagaaggtcctgcagggtggggagcaggagatccagtttgaggatttcaccaacaccttaagggaactgggacacgcagagcatgaaatcactgagctcacggccaccttcaccaagtttgacagagatgggaatcgtattctggatgagaaggaacaggaaaaaatgcgacaggacctggaggaagagagggtggccctcaacactgagattgagaaactaggccgatctattgtgagcagcccacaaggcaaatcgggtccagaggctgccagagcaggaggctgggtttcaggagaagaattctacatgctcacaaggagagttctgcagctggagactgtcctggaaggagtagtgtcccagattgatgctgtaggctcaaagctgaaaatgctggagaggaaggggtggctggctccctccccaggcgtgaaggaacaagctatttggaagcacccgcagccagccccagctgtgaccccagacccctggggagtccagggtgggcaggagagtgaggttccctataaaagagaagaggaagccttagaggagaggagactctcccgtggtgagattccaacgttgcagaggagttaagtgtgaggcactcccggagcaaagtctatgaaggatcttctgcaagaggctgcctcctggtccactgaacctggaaactgagtgggctttaaccaggagataaaaatggagcctgaagggaatcaggcaaggaaatgaactcaggattcagagatctttgaattaatatgtggtgggttctgacattattcttccataagaccatgtgggtttccatggtggctatcaataaaactccttaggaaaactt

SEQ ID NO: 8328 - protein, 805 aa, Homo sapiens; identical to SEQ ID NO: 1214

SEQ ID NO: 8329 - DNA, 423 bp, Homo sapiens
gcctctccagccccaacccaagaagcctgaagatgaaccccaggagacggcatacaggacccaggtgtccagctgctgcctccatatctgtcaaggcatcagagaggttccctataaaagagaagaggaagccttagaggagaggagactctcccgtggtgagattccaacgttgcagaggagttaagtgtgaggcactcccggagcaaagtctatgaaggatcttctgcaagaggctgcctcctggtccactgaacctggaaactgagtgggctttaaccaggagataaaaatggagcctgaagggaatcaggcaaggaaatgaactcaggattcagagatctttgaattaatatgtggtgggttctgacattattcttccataagaccatgtgggtttccatggtggctatcaataaaact

SEQ ID NO: 8330 - protein, 34 aa, Homo sapiens
MNPRRRHTGPRCPAAASISVKASERFPIKEKRKP

SEQ ID NO: 8331 - DNA, 468 bp, Homo sapiens
aattttggaatcttctttgtggaaaccgtcaggaaacactgacatgtgttttcacccagcagcaggcgaaagggcttggatgtggaataagaatagctggcagatgattgagctataggctccagaggaaaggtacactccagaccagctccagagaacgagagaagacttcccggaggagacggtgctaaatccgaagggaccattaaggatgactagcgggatattgatgaagcttaaggtctcatgcccaggatgctttcttataggccaaatggtatcactccattctactggtgtcagctgcttgaaatagtgtagacacagagaattctgggacccgtgtcgctcagaaacaatgtcaaagtcctggctgaaggtatctacattacccacgaattgctgtatatgagtggaatgtacaagcatggatgcaacagcaagagaactaaatttgttttgtgcttc

SEQ ID NO: 8332 - protein, 34 aa, Homo sapiens
MTSGILMKLKVSCPGCFLIGQMVSLHSTGVSCLK

SEQ ID NO: 8333 - DNA, 1940 bp, Homo sapiens
ggaggcggggcttcccgcgtcccccaagctccagatcctggggtggctgccacgtctccctgccacgcgcctggggggacggaagacgggacggagatgttagtggtgggcgccccccgagggttcaccactgtttcctgagaaacttccccagtgcccacccacccgttctccgtgtgcccgagggccggtcctgggctaggctccgcgccccagccccaaaccgggtccccagccccttccagagagaaagctcccgacgcgggatgccgggcagaggcccagcggcgggtggaagagaagctgagaaggagaaacagaggggagggggagcgaggagctggcggcagagggaacagcagattgcgccgagccaatggcaacggcaggacgaggtggcaccaaattcccttcggccaatgacgagccggagtttacagaagcctcattagcatttccccagaggcaggggcaggggcagaggccgggtggtgtggtgtcggtgtcggcagcatccccggcgccctgctgcggtcgccgcgagcctcggcctctgtctcctccccctcccgcccttacctccacgcgggaccgcccgcgccagtcaactcctcgcactttgcccctgcttggcagcggataaaagggggctgaggaaataccggacacggtcacccgttgccagctctagcctttaaattcccggctcggggacctccacgcaccgcggctagcgccgacaaccagctagcgtgcaaggcgccgcggctcagcgcgtaccggcgggcttcgaaaccgcagtcctccggcgaccccgaactccgctccggagcctcagccccctggaaagtgatcccggcatccgagagccaagatgccggcccacttgctgcaggacgatatctctagctcctataccaccaccaccaccattacagcgcctccctccagggtcctgcagaatggaggagataagttggagacgatgcccctctacttggaagacgacattcgccctgatataaaagatgatatatatgaccccacctacaaggataaggaaggcccaagccccaaggttgaatatgtctggagaaacatcatccttatgtctctgctacacttgggagccctgtatgggatcactttgattcctacctgcaagttctacacctggctttggggggtattctactattttgtcagtgccctgggcataacagcaggagctcatcgtctgtggagccaccgctcttacaaagctcggctgcccctacggctctttctgatcattgccaacacaatggcattccagaatgatgtctatgaatgggctcgtgaccaccgtgcccaccacaagttttcagaaacacatgctgatcctcataattcccgacgtggctttttcttctctcacgtgggttggctgcttgtgcgcaaacacccagctgtcaaagagaaggggagtacgctagacttgtctgacctagaagctgagaaactggtgatgttccagaggaggtactacaaacctggcttgctgatgatgtgcttcatcctgcccacgcttgtgccctggtatttctggggtgaaacttttcaaaacagtgtgttcgttgccactttcttgcgatatgctgtggtgcttaatgccacctggctggtgaacagtgctgcccacctcttcggatatcgtccttatgacaagaacattagcccccgggagaatatcctggtttcacttggagctgtgggtgagggcttccacaactaccaccactcctttccctatgactactctgccagtgagtaccgctggcacatcaacttcaccacattcttcattgattgcatggccgccctcggtctggcctatgaccggaagaaagtctccaaggccgccatcttggccaggattaaaagaaccggagatggaaact

SEQ ID NO: 8334 - protein, 354 aa, Homo sapiens
MPAHLLQDDISSSYTTTTTITAPPSRVLQNGGDKLETMPLYLEDDIRPDIKDDIYDPTYKDKEGPSPKVEYVWRNIILMSLLHLGALYGITLIPTCKFYTWLWGVFYYFVSALGITAGAHRLWSHRSYKARLPLRLFLIIANTMAFQNDVYEWARDHRAHHKFSETHADPHNSRRGFFFSHVGWLLVRKHPAVKEKGSTLDLSDLEAEKLVMFQRRYYKPGLLMMCFILPTLVPWYFWGETFQNSVFVATFLRYAVVLNATWLVNSAAHLFGYRPYDKNISPRENILVSLGAVGEGFHNYHHSFPYDYSASEYRWHINFTTFFIDCMAALGLAYDRKKVSKAAILARIKRTGDG

SEQ ID NO: 8335 - DNA, 2114 bp, Homo sapiens
ggaggcggggcttcccgcgtcccccaagctccagatcctggggtggctgccacgtctccctgccacgcgcctggggggacggaagacgggacggagatgttagtggtgggcgccccccgagggttcaccactgtttcctgagaaacttccccagtgcccacccacccgttctccgtgtgcccgagggccggtcctgggctaggctccgcgccccagccccaaaccgggtccccagccccttccagagagaaagctcccgacgcgggatgccgggcagaggcccagcggcgggtggaagagaagctgagaaggagaaacagaggggagggggagcgaggagctggcggcagagggaacagcagattgcgccgagccaatggcaacggcaggacgaggtggcaccaaattcccttcggccaatgacgagccggagtttacagaagcctcattagcatttccccagaggcaggggcaggggcagaggccgggtggtgtggtgtcggtgtcggcagcatccccggcgccctgctgcggtcgccgcgagcctcggcctctgtctcctccccctcccgcccttacctccacgcgggaccgcccgcgccagtcaactcctcgcactttgcccctgcttggcagcggataaaagggggctgaggaaataccggacacggtcacccgttgccagctctagcctttaaattcccggctcggggacctccacgcaccgcggctagcgccgacaaccagctagcgtgcaaggcgccgcggctcagcgcgtaccggcgggcttcgaaaccgcagtcctccggcgaccccgaactccgctccggagcctcagccccctggaaagtgatcccggcatccgagagccaagatgccggcccacttgctgcaggacgatatctctagctcctataccaccaccaccaccattacagcgcctccctccagggtcctgcagaatggaggagataagttggagacgatgcccctctacttggaagacgacattcgccctgatataaaagatgatatatatgaccccacctacaaggataaggaaggcccaagccccaaggttgaatatgtctggagaaacatcatccttatgtctctgctacacttgggagccctgtatgggatcactttgattcctacctgcaagttctacacctggctttggggggtattctactattttgtcagtgccctgggcataacagcaggagctcatcgtctgtggagccaccgctcttacaaagctcggctgcccctacggctctttctgatcattgccaacacaatggcattccagaatgatgtctatgaatgggctcgtgaccaccgtgcccaccacaagttttcagaaacacatgctgatcctcataattcccgacgtggctttttcttctctcacgtgggttggctgcttgtgcgcaaacacccagctgtcaaagagaaggggagtacgctagacttgtctgacctagaagctgagaaactggtgatgttccagaggaggtactacaaacctggcttgctgatgatgtgcttcatcctgcccacgcttgtgccctggtatttctggggtgaaacttttcaaaacagtgtgttcgttgccactttcttgcgatatgctgtggtgcttaatgccacctggctggtgaacagtgctgcccacctcttcggatatcgtccttatgacaagaacattagcccccgggagaatatcctggtttcacttggagctgtgggtgagggcttccacaactaccaccactcctttccctatgactactctgccagtgagtaccgctggcacatcaacttcaccacattcttcattgattgcatggccgccctcggtctggcctatgaccggaagaaagtctccaaggccgccatcttggccaggattaaaagaaccggagatggaaactacaagagtggctgagtttggggtccctcaggttcctttttcaaaaaccagccaggcagaggttttaatgtctgtttattaactactgaataatgctaccaggatgctaaagatgatgatgttaacccattccagtacagtattcttttaaaattcaaaagtattgaaagccaac

SEQ ID NO: 8336 - protein, 359 aa, Homo sapiens; identical to SEQ ID NO: 1216

SEQ ID NO: 8337 - DNA, 5855 bp, Homo sapiens
ggaggcggggcttcccgcgtcccccaagctccagatcctggggtggctgccacgtctccctgccacgcgcctggggggacggaagacgggacggagatgttagtggtgggcgccccccgagggttcaccactgtttcctgagaaacttccccagtgcccacccacccgttctccgtgtgcccgagggccggtcctgggctaggctccgcgccccagccccaaaccgggtccccagccccttccagagagaaagctcccgacgcgggatgccgggcagaggcccagcggcgggtggaagagaagctgagaaggagaaacagaggggagggggagcgaggagctggcggcagagggaacagcagattgcgccgagccaatggcaacggcaggacgaggtggcaccaaattcccttcggccaatgacgagccggagtttacagaagcctcattagcatttccccagaggcaggggcaggggcagaggccgggtggtgtggtgtcggtgtcggcagcatccccggcgccctgctgcggtcgccgcgagcctcggcctctgtctcctccccctcccgcccttacctccacgcgggaccgcccgcgccagtcaactcctcgcactttgcccctgcttggcagcggataaaagggggctgaggaaataccggacacggtcacccgttgccagctctagcctttaaattcccggctcggggacctccacgcaccgcggctagcgccgacaaccagctagcgtgcaaggcgccgcggctcagcgcgtaccggcgggcttcgaaaccgcagtcctccggcgaccccgaactccgctccggagcctcagccccctggaaagtgatcccggcatccgagagccaagatgccggcccacttgctgcaggacgatatctctagctcctataccaccaccaccaccattacagcgcctccctccagggtcctgcagaatggaggagataagttggagacgatgcccctctacttggaagacgacattcgccctgatataaaagatgatatatatgaccccacctacaaggataaggaaggcccaagccccaaggttgaatatgtctggagaaacatcatccttatgtctctgctacacttgggagccctgtatgggatcactttgattcctacctgcaagttctacacctggctttggggggtattctactattttgtcagtgccctgggcataacagcaggagctcatcgtctgtggagccaccgctcttacaaagctcggctgcccctacggctctttctgatcattgccaacacaatggcattccagaatgatgtctatgaatgggctcgtgaccaccgtgcccaccacaagttttcagaaacacatgctgatcctcataattcccgacgtggctttttcttctctcacgtgggttggctgcttgtgcgcaaacacccagctgtcaaagagaaggggagtacgctagacttgtctgacctagaagctgagaaactggtgatgttccagaggaggtactacaaacctggcttgctgatgatgtgcttcatcctgcccacgcttgtgccctggtatttctggggtgaaacttttcaaaacagtgtgttcgttgccactttcttgcgatatgctgtggtgcttaatgccacctggctggtgaacagtgctgcccacctcttcggatatcgtccttatgacaagaacattagcccccgggagaatatcctggtttcacttggagctgtgggtgagggcttccacaactaccaccactcctttccctatgactactctgccagtgagtaccgctggcacatcaacttcaccacattcttcattgattgcatggccgccctcggtctggcctatgaccggaagaaagtctccaaggccgccatcttggccaggattaaaagaaccggagatggaaactacaagagtggctgagtttggggtccctcaggttcctttttcaaaaaccagccaggcagaggttttaatgtctgtttattaactactgaataatgctaccaggatgctaaagatgatgatgttaacccattccagtacagtattcttttaaaattcaaaagtattgaaagccaacaactctgcctttatgatgctaagctgatattatttcttctcttatcctctctctcttctaggcccattgtcctccttttcactttattgctatcgccctcctttcccttattgcctcccaggcaagcagctggtcagtctttgctcagtgtccagcttccaaagcctagacaacctttctgtagcctaaaacgaatggtctttgctccagataactctctttccttgagctgttgtgagctttgaagtaggtggcttgagctagagataaaacagaatcttctgggtagtcccctgttgattatcttcagcccaggcttttgctagatggaatggaaaagcaacttcatttgacacaaagcttctaaagcaggtaaattgtcgggggagagagttagcatgtatgaatgtaaggatgagggaagcgaagcaagaggaacctctcgccatgatcagacatacagctgcctacctaatgaggacttcaagccccaccacatagcatgcttcctttctctcctggctcggggtaaaaagtggctgcggtgtttggcaatgctaattcaatgccgcaacatatagttgaggccgaggataaagaaaagacattttaagtttgtagtaaaagtggtctctgctggggaagggttttcttttctttttttctttaataacaaggagatttcttagttcatatatcaagaagtcttgaagttgggtgtttccagaattggtaaaaacagcagctcatagaattttgagtattccatgagctgctcattacagttctttcctctttctgctctgccatcttcaggatattggttcttcccctcatagtaataagatggctgtggcatttccaaacatccaaaaaaagggaaggatttaaggaggtgaagtcgggtcaaaaataaaatatatatacatatatacattgcttagaacgttaaactattagagtatttcccttccaaagagggatgtttggaaaaaactctgaaggagaggaggaattagttgggatgccaatttcctctccactgctggacatgagatggagaggctgagggacaggatctataggcagcttctaagagcgaacttcacataggaagggatctgagaacacgttgccaggggcttgagaaggttactgagtgagttattgggagtcttaataaaataaactagatattaggtccattcattaattagttccagtttctccttgaaatgagtaaaaactagaaggcttctctccacagtgttgtgccccttcactcatttttttttgaggagaagggggtctctgttaacatctagcctaaagtatacaactgcctggggggcagggttaggaatctcttcactaccctgattcttgattcctggctctaccctgtctgtcccttttctttgaccagatctttctcttccctgaacgttttcttctttccctggacaggcagcctcctttgtgtgtattcagaggcagtgatgacttgctgtccaggcagctccctcctgcacacagaatgctcagggtcactgaaccactgcttctcttttgaaagtagagctagctgccactttcacgtggcctccgcagtgtctccacctacacccctgtgctcccctgccacactgatggctcaagacaaggctggcaaaccctcccagaaacatctctggcccagaaagcctctctctccctccctctctcatgaggcacagccaagccaagcgctcatgttgagccagtgggccagccacagagcaaaagagggtttattttcagtcccctctctctgggtcagaaccagagggcatgctgaatgccccctgcttacttggtgagggtgccccgcctgagtcagtgctctcagctggcagtgcaatgcttgtagaagtaggaggaaacagttctcactgggaagaagcaagggcaagaacccaagtgcctcacctcgaaaggaggccctgttccctggagtcagggtgaactgcaaagctttggctgagacctgggatttgagataccacaaaccctgctgaacacagtgtctgttcagcaaactaaccagcattccctacagcctagggcagacaatagtatagaagtctggaaaaaaacaaaaacagaatttgagaaccttggaccactcctgtccctgtagctcagtcatcaaagcagaagtctggctttgctctattaagattggaaatgtacactaccaaacactcagtccactgttgagccccagtgctggaagggaggaaggcctttcttctgtgttaattgcgtagaggctacaggggttagcctggactaaaggcatccttgtcttttgagctattcacctcagtagaaaaggatctaagggaagatcactgtagtttagttctgttgacctgtgcacctaccccttggaaatgtctgctggtatttctaattccacaggtcatcagatgcctgcttgataatatataaacaataaaaacaactttcacttcttcctattgtaatcgtgtgccatggatctgatctgtaccatgaccctacataaggctggatggcacctcaggctgagggccccaatgtatgtgtggctgtgggtgtgggtgggagtgtgtctgctgagtaaggaacacgattttcaagattctaaagctcaattcaagtgacacattaatgataaactcagatctgatcaagagtccggatttctaacagtccttgctttggggggtgtgctgacaacttagctcaggtgccttacatcttttctaatcacagtgttgcatatgagcctgccctcactccctctgcagaatccctttgcacctgagaccctactgaagtggctggtagaaaaaggggcctgagtggaggattatcagtatcacgatttgcaggattcccttctgggcttcattctggaaacttttgttagggctgcttttcttaagtgcccacatttgatggagggtggaaataatttgaatgtatttgatttataagttttttttttttttttgggttaaaagatggttgtagcatttaaaatggaaaattttctccttggtttgctagtatcttgggtgtattctctgtaagtgtagctcaaataggtcatcatgaaaggttaaaaaagcgaggtggccatgttatgctggtggttaaggccagggcctctccaaccactgtgccactgacttgctgtgtgaccctgggcaagtcacttaactataaggtgcctcagttttccttctgttaaaatggggataataatactgacctacctcaaagggcagttttgaggcatgactaatgctttttagaaagcattttgggatccttcagcacaggaattctcaagacctgagtattttttataataggaatgtccaccatgaacttgatacgtccgtgtgtcccagatgctgtcattagtctatatggttctccaagaaactgaatgaatccattggagaagcggtggataactagccagacaaaatttgagaatacataaacaacgcattgccacggaaacatacagaggatgccttttctgtgattgggtgggattttttccctttttatgtgggatatagtagttacttgtgacaagaataattttggaataatttctattaatatcaactctgaagctaattgtactaatctgagattgtgtttgttcataataaaagtgaagtgaatctgattgcactg

SEQ ID NO: 8338 - protein, 359 aa, Homo sapiens; identical to SEQ ID NO: 1216

SEQ ID NO: 8339 - DNA, 4121 bp, Homo sapiens
gcggcggtcgggggacaccagctgcgtcggagcgcccagaacgccccgcgctccgccgagccccgctccacgcagacccgcgggcgggagggagccacgcacatcgccgccgcggccgtctccgcggggcggtaaccgagcctgcctcggagccgccgaacgcccacgccagcgaccctgactctatggccccgggggagcgcgccggagccgccgcgccgcccacccccagccggaaccctagcgtcccggggagcaagcggggagccccgggcgtccccggccccggcccagggccctgcttgtggcccccgctcccgccacggggcatgggaggcaggtagcccagcctgcgccaggacacccgtggcgggcggaacccgccaaggaccgcgaagtccagagaaaggaagctgaggagctgcccgcccgcccccggctgcagccccagcagggccctcccccggtggcgcgcacccgcgcgcgcacactcgcacaccgcacctcagcgcctgcccggcctcgcccccacccgcgagcgccgaacctcctggggccggatgccatgggtaacaacttctccagtatcccctcgctgccccgaggaaacccgagccgcgcgccgcggggccacccccagaacctcaaagactctatcgggggccccttccccgtcacttctcaccgatgccaccacaagcagaagcactgtccggcagtgctgcccagcggggggctcccagccacgccgctgctcttccacccgcacaccaagggctcccagatcctcatggacctcagccacaaggctgtcaagaggcaggccagcttctgcaacgccatcaccttcagcaaccgcccggtcctcatctacgagcaagtcaggctgaagatcaccaagaagcagtgctgctggagcggggccctgcggctgggcttcaccagcaaggacccgtcccgcatccaccctgactcgctgcccaagtacgcctgccccgacctggtgtcccagagtggcttctgggccaaggcgctgcctgaggagtttgccaatgagggcaacatcatcgcattctgggtggacaagaagggccgtgtcttccaccgcatcaacgactcggctgttatgctgttcttcagcggggtccgcacggccgacccgctctgggccctggtggacgtctacggcctcacgcggggcgtccagctgcttgatagcgagctggtgctcccggactgtctgcggccgcgctccttcaccgccctgcggcggccgtcgctgcggcgcgaggcggacgacgcgcgcctctcggtgagcctatgcgacctcaacgtgccgggcgcggacggcgacgaggccgcgccggccgccggctgccccatcccgcagaactcactcaactcgcagcacagccgcgcgctgccggcgcagctcgacggcgacctgcgtttccacgccctgcgcgccggcgcgcacgtccgcatcctcgacgagcagacggtggcgcgcgtggagcacgggcgcgacgagcgcgcgctcgtcttcaccagccggcccgtgcgcgtggccgagaccatcttcgtcaaggtcacgcgctcgggtggcgcgcggcccggcgcgctgtcgttcggcgtcaccacgtgcgaccccggcacgctgcggccggccgacctgcctttcagccctgaggccctggtggaccgcaaggaattctgggccgtgtgccgcgtgcccgggcccctgcacagcggcgacatcctgggcctggtggtcaacgccgacggcgagctgcacctcagccacaatggcgcggccgccggcatgcagctgtgcgtggacgcctcgcagccgctttggatgctcttcggcctgcacgggaccatcacgcagatccgcatcctcggctccactatcctggccgagcggggtatcccatcactcccctgctcccctgcctccacgccaacctcgcccagtgccctgggcagccgcctgtctgaccccttgctcagcacgtgcagctctggccctctgggtagctctgctggtgggacagcccccaattcgccagtgagcctgcccgagtcgccagtgaccccaggtctgggccagtggagcgatgagtgcaccatttgctatgaacacgcggtggacacggtcatctacacatgtggccacatgtgcctctgctacgcctgtggcctgcgcctcaagaaggctctgcacgcctgctgccccatctgccgccgccccatcaaggacatcatcaagacctaccgcagctcctagcccgttgcggtggcccatcccgcatacccatcttctcgggcttcagcccagtcccagctgaggaacaagccagtggggccccttctcttcctcattttggaaacttttcctcctctattaaacatgggaaactgaagcccttgaaggtttggggagaggggggtatcaggcagggagggggcagaggcaaatcaccgggcagagggaggggaggagaggaggccgcactctccctgtctctcccgtctctgcacccagctcctctctgcatgctgagggctaaattgggatctcagcctgccctaatctttccccatctgaggcaggtttctaggaggtgtctgtagtccatgtggcacctttgtgagaattagaaaacatgtaccttcctctgggcagctgcagccctgagccaggacatgtggcctggctagtgcagcatggagtggattttaggctcatttgccctctcagccaactgcccttgagcagtgtacagcctgctcaacaaccgccctgggcaggccgctcctgagctgctgtctccctctctgacctatgcctaccttctctttcttcgttccctgcccactgggcatggcagctgggggtgagaggctggtggttgcctcccgtcctgggcaggctgcagcctcatgccatgtctctctcccactacctgatgggcacatggacaggctgcagagggctccaggttctgggcccctggctgagaaggggaggatcctgtcctggctgtagccttcctgccccaatcatctcgctggatgccattgcccaggggtagcccttcggtatgggctggggagaagggttggtcttctgccagggtccctaagaacaggtttgcagctaccctctctgaccttttccccatatcttgtgctgtccagggcctaggctgatagtcagagcctgtggcacacctgggatgggccagggccctgggtggggaggtgtgggttccctgggccaagaccagcctttttcctcagtttaattaatttatttatttggtttgtggttttgggttttttttgtttgtttgtttgtaggtgagttcccatcctctgggcccctagaaatgctgcctttgtgtgtggggtacctgggaaagggtgtggctgaggcagtcataatgcagtatcttcccctgactccagccacaaagctcatacccagccctaccaatcatgaactggaactccataaggaggggccaaattgggaggccttttggcaaacagtgtctattttacagagaggcaaaccaagcctccttagtgccctggggctgatggtcacccagagccatagagcacccttcctcctgggccagagctgggttatcatggttggcttaggtacctcaggtggcccaggaggtcccccctccataaggacgtcaaacttccaggagggccagtgttcctagtgtgggccaggaacaggacagggagaccttgtgatggcggggcagggagcctgttcgtagggaagatgaggaggcaagggctgcctctcacacctccaggttctctaagttctggggagggagcgccccacctgctgaggtcggtcctctcagccctgcctgccctggcctgggctctcccagcctcccagccctctgccccctcagatggctttttgtttttgtttttttttgcatccatcagagactgcacctctgtgtggcaggcagggcatgggttttagtcctggccactgaccagctgtgtggccctggccgagtcgtagccccctggagcccagcttccatttctataaaatggttgtttcgggagag

SEQ ID NO: 8340 - protein, 574 aa, Homo sapiens
MGNNFSSIPSLPRGNPSRAPRGHPQNLKDSIGGPFPVTSHRCHHKQKHCPAVLPSGGLPATPLLFHPHTKGSQILMDLSHKAVKRQASFCNAITFSNRPVLIYEQVRLKITKKQCCWSGALRLGFTSKDPSRIHPDSLPKYACPDLVSQSGFWAKALPEEFANEGNIIAFWVDKKGRVFHRINDSAVMLFFSGVRTADPLWALVDVYGLTRGVQLLDSELVLPDCLRPRSFTALRRPSLRREADDARLSVSLCDLNVPGADGDEAAPAAGCPIPQNSLNSQHSRALPAQLDGDLRFHALRAGAHVRILDEQTVARVEHGRDERALVFTSRPVRVAETIFVKVTRSGGARPGALSFGVTTCDPGTLRPADLPFSPEALVDRKEFWAVCRVPGPLHSGDILGLVVNADGELHLSHNGAAAGMQLCVDASQPLWMLFGLHGTITQIRILGSTILAERGIPSLPCSPASTPTSPSALGSRLSDPLLSTCSSGPLGSSAGGTAPNSPVSLPESPVTPGLGQWSDECTICYEHAVDTVIYTCGHMCLCYACGLRLKKALHACCPICRRPIKDIIKTYRSS

SEQ ID NO: 8341 - DNA, 4466 bp, Homo sapiens
gcggcggtcgggggacaccagctgcgtcggagcgcccagaacgccccgcgctccgccgagccccgctccacgcagacccgcgggcgggagggagccacgcacatcgccgccgcggccgtctccgcggggcggtaaccgagcctgcctcggagccgccgaacgcccacgccagcgaccctgactctatggccccgggggagcgcgccggagccgccgcgccgcccacccccagccggaaccctagcgtcccggggagcaagcggggagccccgggcgtccccggccccggcccagggccctgcttgtggcccccgctcccgccacggggcatgggaggcaggtagcccagcctgcgccaggacacccgtggcgggcggaacccgccaaggaccgcgaagtccagagaaaggaagctgaggagctgcccgcccgcccccggctgcagccccagcagggccctcccccggtggcgcgcacccgcgcgcgcacactcgcacaccgcacctcagcgcctgcccggcctcgcccccacccgcgagcgccgaacctcctggggccggatgccatgggtaacaacttctccagtatcccctcgctgccccgaggaaacccgagccgcgcgccgcggggccacccccagaacctcaaagactctatcgggggccccttccccgtcacttctcaccgatgccaccacaagcagaagcactgtccggcagtgctgcccagcggggggctcccagccacgccgctgctcttccacccgcacaccaagggctcccagatcctcatggacctcagccacaaggctgtcaagaggcaggccagcttctgcaacgccatcaccttcagcaaccgcccggtcctcatctacgagcaagtcaggctgaagatcaccaagaagcagtgctgctggagcggggccctgcggctgggcttcaccagcaaggacccgtcccgcatccaccctgactcgctgcccaagtacgcctgccccgacctggtgtcccagagtggcttctgggccaaggcgctgcctgaggagtttgccaatgagggcaacatcatcgcattctgggtggacaagaagggccgtgtcttccaccgcatcaacgactcggctgttatgctgttcttcagcggggtccgcacggccgacccgctctgggccctggtggacgtctacggcctcacgcggggcgtccagctgcttgatagcgagctggtgctcccggactgtctgcggccgcgctccttcaccgccctgcggcggccgtcgctgcggcgcgaggcggacgacgcgcgcctctcggtgagcctatgcgacctcaacgtgccgggcgcggacggcgacgaggccgcgccggccgccggctgccccatcccgcagaactcactcaactcgcagcacagccgcgcgctgccggcgcagctcgacggcgacctgcgtttccacgccctgcgcgccggcgcgcacgtccgcatcctcgacgagcagacggtggcgcgcgtggagcacgggcgcgacgagcgcgcgctcgtcttcaccagccggcccgtgcgcgtggccgagaccatcttcgtcaaggtcacgcgctcgggtggcgcgcggcccggcgcgctgtcgttcggcgtcaccacgtgcgaccccggcacgctgcggccggccgacctgcctttcagccctgaggccctggtggaccgcaaggaattctgggccgtgtgccgcgtgcccgggcccctgcacagcggcgacatcctgggcctggtggtcaacgccgacggcgagctgcacctcagccacaatggcgcggccgccggcatgcagctgtgcgtggacgcctcgcagccgctttggatgctcttcggcctgcacgggaccatcacgcagatccgcatcctcggctccactatcctggccgagcggggtatcccatcactcccctgctcccctgcctccacgccaacctcgcccagtgccctgggcagccgcctgtctgaccccttgctcagcacgtgcagctctggccctctgggtagctctgctggtgggacagcccccaattcgccagtgagcctgcccgagtcgccagtgaccccaggtctgggccagtggagcgatgagtgcaccatttgctatgaacacgcggtggacacggtcatctacacatgtggccacatgtgcctctgctacgcctgtggcctgcgcctcaagaaggctctgcacgcctgctgccccatctgccgccgccccatcaaggacatcatcaagacctaccgcagctcctagcccgttgcggtggcccatcccgcatacccatcttctcgggcttcagcccagtcccagctgaggaacaagccagtggggccccttctcttcctcattttggaaacttttcctcctctattaaacatgggaaactgaagcccttgaaggtttggggagaggggggtatcaggcagggagggggcagaggcaaatcaccgggcagagggaggggaggagaggaggccgcactctccctgtctctcccgtctctgcacccagctcctctctgcatgctgagggctaaattgggatctcagcctgccctaatctttccccatctgaggcaggtttctaggaggtgtctgtagtccatgtggcacctttgtgagaattagaaaacatgtaccttcctctgggcagctgcagccctgagccaggacatgtggcctggctagtgcagcatggagtggattttaggctcatttgccctctcagccaactgcccttgagcagtgtacagcctgctcaacaaccgccctgggcaggccgctcctgagctgctgtctccctctctgacctatgcctaccttctctttcttcgttccctgcccactgggcatggcagctgggggtgagaggctggtggttgcctcccgtcctgggcaggctgcagcctcatgccatgtctctctcccactacctgatgggcacatggacaggctgcagagggctccaggttctgggcccctggctgagaaggggaggatcctgtcctggctgtagccttcctgccccaatcatctcgctggatgccattgcccaggggtagcccttcggtatgggctggggagaagggttggtcttctgccagggtccctaagaacaggtttgcagctaccctctctgaccttttccccatatcttgtgctgtccagggcctaggctgatagtcagagcctgtggcacacctgggatgggccagggccctgggtggggaggtgtgggttccctgggccaagaccagcctttttcctcagtttaattaatttatttatttggtttgtggttttgggttttttttgtttgtttgtttgtaggtgagttcccatcctctgggcccctagaaatgctgcctttgtgtgtggggtacctgggaaagggtgtggctgaggcagtcataatgcagtatcttcccctgactccagccacaaagctcatacccagccctaccaatcatgaactggaactccataaggaggggccaaattgggaggccttttggcaaacagtgtctattttacagagaggcaaaccaagcctccttagtgccctggggctgatggtcacccagagccatagagcacccttcctcctgggccagagctgggttatcatggttggcttaggtacctcaggtggcccaggaggtcccccctccataaggacgtcaaacttccaggagggccagtgttcctagtgtgggccaggaacaggacagggagaccttgtgatggcggggcagggagcctgttcgtagggaagatgaggaggcaagggctgcctctcacacctccaggttctctaagttctggggagggagcgccccacctgctgaggtcggtcctctcagccctgcctgccctggcctgggctctcccagcctcccagccctctgccccctcagatggctttttgtttttgtttttttttgcatccatcagagactgcacctctgtgtggcaggcagggcatgggttttagtcctggccactgaccagctgtgtggccctggccgagtcgtagccccctggagcccagcttccatttctataaaatggttgtttcgggagagaggggcaggctttctgtgtgactcgggagttcttccgtgagggctgccagggggtggtgtgccaggacctcaggctgggcctttgtgctggccttgcagtgggtgtgtggggaagtcactgtcccactatgggtctccactacccagtcactgaccctgggagaccccttctgtgtgggagggagcgggggctggctagcgggccccccagccagggatcccagaggctgagggttggggagaggaagccatcatctcattacctctgtcagtgcaggggtggctgctgcttcccttgtgcacttgggtcgctgtgattgtgaataaaagtgatttcgtaccagc

SEQ ID NO: 8342 - protein, 574 aa, Homo sapiens; identical to SEQ ID NO: 8340

SEQ ID NO: 8343 - DNA, 4751 bp, Homo sapiens
gcggcggtcgggggacaccagctgcgtcggagcgcccagaacgccccgcgctccgccgagccccgctccacgcagacccgcgggcgggagggagccacgcacatcgccgccgcggccgtctccgcggggcggtaaccgagcctgcctcggagccgccgaacgcccacgccagcgaccctgactctatggccccgggggagcgcgccggagccgccgcgccgcccacccccagccggaaccctagcgtcccggggagcaagcggggagccccgggcgtccccggccccggcccagggccctgcttgtggcccccgctcccgccacggggcatgggaggcaggtagcccagcctgcgccaggacacccgtggcgggcggaacccgccaaggaccgcgaagtccagagaaaggaagctgaggagctgcccgcccgcccccggctgcagccccagcagggccctcccccggtggcgcgcacccgcgcgcgcacactcgcacaccgcacctcagcgcctgcccggcctcgcccccacccgcgagcgccgaacctcctggggccggatgccatgggtaacaacttctccagtatcccctcgctgccccgaggaaacccgagccgcgcgccgcggggccacccccagaacctcaaagactctatcgggggccccttccccgtcacttctcaccgatgccaccacaagcagaagcactgtccggcagtgctgcccagcggggggctcccagccacgccgctgctcttccacccgcacaccaagggctcccagatcctcatggacctcagccacaaggctgtcaagaggcaggccagcttctgcaacgccatcaccttcagcaaccgcccggtcctcatctacgagcaagtcaggctgaagatcaccaagaagcagtgctgctggagcggggccctgcggctgggcttcaccagcaaggacccgtcccgcatccaccctgactcgctgcccaagtacgcctgccccgacctggtgtcccagagtggcttctgggccaaggcgctgcctgaggagtttgccaatgagggcaacatcatcgcattctgggtggacaagaagggccgtgtcttccaccgcatcaacgactcggctgttatgctgttcttcagcggggtccgcacggccgacccgctctgggccctggtggacgtctacggcctcacgcggggcgtccagctgcttgatagcgagctggtgctcccggactgtctgcggccgcgctccttcaccgccctgcggcggccgtcgctgcggcgcgaggcggacgacgcgcgcctctcggtgagcctatgcgacctcaacgtgccgggcgcggacggcgacgaggccgcgccggccgccggctgccccatcccgcagaactcactcaactcgcagcacagccgcgcgctgccggcgcagctcgacggcgacctgcgtttccacgccctgcgcgccggcgcgcacgtccgcatcctcgacgagcagacggtggcgcgcgtggagcacgggcgcgacgagcgcgcgctcgtcttcaccagccggcccgtgcgcgtggccgagaccatcttcgtcaaggtcacgcgctcgggtggcgcgcggcccggcgcgctgtcgttcggcgtcaccacgtgcgaccccggcacgctgcggccggccgacctgcctttcagccctgaggccctggtggaccgcaaggaattctgggccgtgtgccgcgtgcccgggcccctgcacagcggcgacatcctgggcctggtggtcaacgccgacggcgagctgcacctcagccacaatggcgcggccgccggcatgcagctgtgcgtggacgcctcgcagccgctttggatgctcttcggcctgcacgggaccatcacgcagatccgcatcctcggctccactatcctggccgagcggggtatcccatcactcccctgctcccctgcctccacgccaacctcgcccagtgccctgggcagccgcctgtctgaccccttgctcagcacgtgcagctctggccctctgggtagctctgctggtgggacagcccccaattcgccagtgagcctgcccgagtcgccagtgaccccaggtctgggccagtggagcgatgagtgcaccatttgctatgaacacgcggtggacacggtcatctacacatgtggccacatgtgcctctgctacgcctgtggcctgcgcctcaagaaggctctgcacgcctgctgccccatctgccgccgccccatcaaggacatcatcaagacctaccgcagctcctagcccgttgcggtggcccatcccgcatacccatcttctcgggcttcagcccagtcccagctgaggaacaagccagtggggccccttctcttcctcattttggaaacttttcctcctctattaaacatgggaaactgaagcccttgaaggtttggggagaggggggtatcaggcagggagggggcagaggcaaatcaccgggcagagggaggggaggagaggaggccgcactctccctgtctctcccgtctctgcacccagctcctctctgcatgctgagggctaaattgggatctcagcctgccctaatctttccccatctgaggcaggtttctaggaggtgtctgtagtccatgtggcacctttgtgagaattagaaaacatgtaccttcctctgggcagctgcagccctgagccaggacatgtggcctggctagtgcagcatggagtggattttaggctcatttgccctctcagccaactgcccttgagcagtgtacagcctgctcaacaaccgccctgggcaggccgctcctgagctgctgtctccctctctgacctatgcctaccttctctttcttcgttccctgcccactgggcatggcagctgggggtgagaggctggtggttgcctcccgtcctgggcaggctgcagcctcatgccatgtctctctcccactacctgatgggcacatggacaggctgcagagggctccaggttctgggcccctggctgagaaggggaggatcctgtcctggctgtagccttcctgccccaatcatctcgctggatgccattgcccaggggtagcccttcggtatgggctggggagaagggttggtcttctgccagggtccctaagaacaggtttgcagctaccctctctgaccttttccccatatcttgtgctgtccagggcctaggctgatagtcagagcctgtggcacacctgggatgggccagggccctgggtggggaggtgtgggttccctgggccaagaccagcctttttcctcagtttaattaatttatttatttggtttgtggttttgggttttttttgtttgtttgtttgtaggtgagttcccatcctctgggcccctagaaatgctgcctttgtgtgtggggtacctgggaaagggtgtggctgaggcagtcataatgcagtatcttcccctgactccagccacaaagctcatacccagccctaccaatcatgaactggaactccataaggaggggccaaattgggaggccttttggcaaacagtgtctattttacagagaggcaaaccaagcctccttagtgccctggggctgatggtcacccagagccatagagcacccttcctcctgggccagagctgggttatcatggttggcttaggtacctcaggtggcccaggaggtcccccctccataaggacgtcaaacttccaggagggccagtgttcctagtgtgggccaggaacaggacagggagaccttgtgatggcggggcagggagcctgttcgtagggaagatgaggaggcaagggctgcctctcacacctccaggttctctaagttctggggagggagcgccccacctgctgaggtcggtcctctcagccctgcctgccctggcctgggctctcccagcctcccagccctctgccccctcagatggctttttgtttttgtttttttttgcatccatcagagactgcacctctgtgtggcaggcagggcatgggttttagtcctggccactgaccagctgtgtggccctggccgagtcgtagccccctggagcccagcttccatttctataaaatggttgtttcgggagagaggggcaggctttctgtgtgactcgggagttcttccgtgagggctgccagggggtggtgtgccaggacctcaggctgggcctttgtgctggccttgcagtgggtgtgtggggaagtcactgtcccactatgggtctccactacccagtcactgaccctgggagaccccttctgtgtgggagggagcgggggctggctagcgggccccccagccagggatcccagaggctgagggttggggagaggaagccatcatctcattacctctgtcagtgcaggggtggctgctgcttcccttgtgcacttgggtcgctgtgattgtgaataaaagtgatttcgtaccagcctgagggcggtgctgtgcgcagagcactggggaaggagggccagcgtgtgcgtgcacatgtgggggcaggctggggtgtggaggcctggtgtcctggatactaggggagtcatcaggagctgtggcccttccctgaggggtaattgcaggcctctgaggcttcaaggtgggctggggcaatcagggaagactccctggagtcgggggctggagcgtgacttgggtctagaatgccaggtgagccttgcaaattgggagaggctactgcatctgtgaggagcaggg

SEQ ID NO: 8344 - protein, 574 aa, Homo sapiens; identical to SEQ ID NO: 8340

SEQ ID NO: 8345 - DNA, 1102 bp, Homo sapiens
acctcagcgcctgcccggcctcgcccccacccgcgagcgccgaacctcctggggccggatgccatgggtaacaacttctccagtatcccctcgctgccccgaggaaacccgagccgcgcgccgcggggccacccccagaacctcaaagactctatcgggggccccttccccgtcacttctcaccgatgccaccacaagcagaagcactgtccggcagtgctgcccagcggggggctcccagccacgccgctgctcttccacccgcacaccaagggctcccagatcctcatggacctcagccacaaggctgtcaagaggcaggccagcttctgcaacgccatcaccttcagcaaccgcccggtcctcatctacgagcaagtcaggctgaaggtgggcctgccccctgcccccgcccccgcctcctgcttcctgctcccctcatggcatcccctgggcctctggactctgcccctcagccgctgcctgctgccacccccagcaccacaccctgcccctgcctttcctctctggtgaccctcttccctcttccttatgcctttctcaacctccctgtgtgacaaggaaggaaccgggagggcggtggccgtgggaaccccttgctgtcttcccagcagggagggctcctgggagggaactgtgctggaatggtgggcaggctgctgtgggatgctccagggagtccaccgcagggaggctgcccttggtctgattgaccaagtgggagagggtgggctgaggccaccccctgccacccagatcaccaagaagcagtgctgctggagcggggccctgcggctgggcttcaccagcaaggacccgtcccgcatccaccctgactcgctgcccaagtacgcctgccccgacctggtgtcccagagtggcttctgggccaaggcgctgcctgaggagtttgccaatgagggcaacatcatcgcattctgggtggacaagaagggccgtgtcttccaccgcatcaacgactcggctgttatgctgttcttcagcggggtccgcacggccgacccgctctgggccctggtggacgtctacggcctcacgcggggcgtccagctgcttggtg

SEQ ID NO: 8346 - protein, 156 aa, Homo sapiens
MGNNFSSIPSLPRGNPSRAPRGHPQNLKDSIGGPFPVTSHRCHHKQKHCPAVLPSGGLPATPLLFHPHTKGSQILMDLSHKAVKRQASFCNAITFSNRPVLIYEQVRLKVGLPPAPAPASCFLLPSWHPLGLWTLPLSRCLLPPPAPHPAPAFPLW

SEQ ID NO: 8347 - DNA, 786 bp, Homo sapiens
gcgtgggggcgcgggaggggcctcggccctgccatgccggtctccgcccgcgggggaggagacgggggaggaggaggggagcagccggccggggcgactcggtgaccagccggccggcccagcagaggtggctgcactgcccgtcgccggagatggggggacagatcacccggagcactctccacgactctatcgggggccccttccccgtcacttctcaccgatgccaccacaagcagaagcactgtccggcagtgctgcccagcggggggctcccagccacgccgctgctcttccacccgcacaccaagggctcccagatcctcatggacctcagccacaaggctgtcaagaggcaggccagcttctgcaacgccatcaccttcagcaaccgcccggtcctcatctacgagcaagtcaggctgaagatcaccaagaagcagtgctgctggagcggggccctgcggctgggcttcaccagcaaggacccgtcccgcatccaccctgactcgctgcccaagtacgcctgccccgacctggtgtcccagagtggcttctgggccaaggcgctgcctgaggagtttgccaatgagggcaacatcatcgcattctgggtggacaagaagggccgtgtcttccaccgcatcaacgactcggctgttatgctgttcttcagcggggtccgcacggccgacccgctctgggccctggtggacgtctacggcctcacgcggggcgtccagctgcttgatagcgagctggtgctcccggactgtctgcggccgc

SEQ ID NO: 8348 - protein, 210 aa, Homo sapiens
MGGQITRSTLHDSIGGPFPVTSHRCHHKQKHCPAVLPSGGLPATPLLFHPHTKGSQILMDLSHKAVKRQASFCNAITFSNRPVLIYEQVRLKITKKQCCWSGALRLGFTSKDPSRIHPDSLPKYACPDLVSQSGFWAKALPEEFANEGNIIAFWVDKKGRVFHRINDSAVMLFFSGVRTADPLWALVDVYGLTRGVQLLDSELVLPDCLR

SEQ ID NO: 8349 - DNA, 987 bp, Homo sapiens
actctatcgggggccccttccccgtcacttctcaccgatgccaccacaagcagaagcactgtccggcagtgctgcccagcggggggctcccagccacgccgctgctcttccacccgcacaccaagggctcccagatcctcatggacctcagccacaaggctgtcaagaggcaggccagcttctgcaacgccatcaccttcagcaaccgcccggtcctcatctacgagcaagtcaggctgaaggtgggcctgccccctgcccccgcccccgcctcctgcttcctgctcccctcatggcatcccctgggcctctggactctgcccctcagccgctgcctgctgccacccccagcaccacaccctgcccctgcctttcctctctggtgaccctcttccctcttccttatgcctttctcaacctccctgtgtgacaaggaaggaaccgggagggcggtggccgtgggaaccccttgctgtcttcccagcagggagggctcctgggagggaactgtgctggaatggtgggcaggctgctgtgggatgctccagggagtccaccgcagggaggctgcccttggtctgattgaccaagtgggagagggtgggctgaggccaccccctgccacccagatcaccaagaagcagtgctgctggagcggggccctgcggctgggcttcaccagcaaggacccgtcccgcatccaccctgactcgctgcccaagtacgcctgccccgacctggtgtcccagagtggcttctgggccaaggcgctgcctgaggagtttgccaatgagggcaacatcatcgcattctgggtggacaagaagggccgtgtcttccaccgcatcaacgactcggctgttatgctgttcttcagcggggtccgcacggccgacccgctctgggccctggtggacgtctacggcctcacgcggggcgtccagctgcttgatagcgagctggtgctcccggactgtctgcggccgc

SEQ ID NO: 8350 - protein, 193 aa, Homo sapiens
MPFSTSLCDKEGTGRAVAVGTPCCLPSREGSWEGTVLEWWAGCCGMLQGVHRREAALGLIDQVGEGGLRPPPATQITKKQCCWSGALRLGFTSKDPSRIHPDSLPKYACPDLVSQSGFWAKALPEEFANEGNIIAFWVDKKGRVFHRINDSAVMLFFSGVRTADPLWALVDVYGLTRGVQLLDSELVLPDCLR

SEQ ID NO: 8351 - DNA, 229 bp, Homo sapiens
ttacagggtgctccagagcatcccttggtgcctaccactgcctaggcactaagcgggggcaggtgggagacagaagaatcaaaaacccagcccctctcctggaataatgttttccctgggggacacatcatataactgatgcaaggtggcccaagttcaattctgcaatcaagtgtgacctgaagagtaaaactatagcgagctggtgctcccggactgtctgcggccg

SEQ ID NO: 8352 - protein, 39 aa, Homo sapiens
CFPWGTHHITDARWPKFNSAIKCDLKSKTIASWCSRTVC

SEQ ID NO: 8353 - DNA, 982 bp, Homo sapiens
cccgggccaagccatcggtccggcccaagccattcctaaaccgagcagagtcgcagagccaagagaagatggacatcagcactttacggcgccagctgagacccacaggccagctccgtggagggctcaagggctccaagagtgaggattcggagctgcccccgcagacggcctccgaggctcccagtgaggggtctaggagaagctcatccgacctcatcaccctcccagccaccactcccccatgtcccaccaagaaggaatgggaagggccagccacctcgtacatgacatgcagcgcctaccagaaggtccaggactcggagatcagcttccccgcgggcgtggaggtgcaggtgctggagaagcaggagagcgggtggtggtatgtgaggtttggggagctggagggctgggccccttcccactatttggtgctggatgagaacgagcaacctgacccctctggcaaagagctggacacagtgcccgccaagggcaggcagaacgaaggcaaatcagacagcctggagaagatcgagaggcgcgtccaagcactgaacaccgtcaaccagagcaagaaggccacgccccccatcccctccaaacctcccgggggcttcggcaagacctcaggcactccagcggtgaagatgaggaacggagtgcggcaggtggcggtcaggccccagtcggtgtttgtgtccccgccacccaaggacaacaacctgtcctgcgccctgcggaggaatgagtcactcacggccactgatggcctccgaggcgtccgacggaactcctcctttagcactgctcgctccgctgccgccgaggccaagggccgcctggccgaacgggcggcgcggcctcgtcgccgtccgcgcccggcacgttgaggtcgcataggctcaccgagaggcgcgcgtcgtccgcctcgcgccgcagcgacggccgccgcagggcggtgaaggagcgcggccgc

SEQ ID NO: 8354 - protein, 275 aa, Homo sapiens
MDISTLRRQLRPTGQLRGGLKGSKSEDSELPPQTASEAPSEGSRRSSSDLITLPATTPPCPTKKEWEGPATSYMTCSAYQKVQDSEISFPAGVEVQVLEKQESGWWYVRFGELEGWAPSHYLVLDENEQPDPSGKELDTVPAKGRQNEGKSDSLEKIERRVQALNTVNQSKKATPPIPSKPPGGFGKTSGTPAVKMRNGVRQVAVRPQSVFVSPPPKDNNLSCALRRNESLTATDGLRGVRRNSSFSTARSAAAEAKGRLAERAARPRRRPRPAR

SEQ ID NO: 8355 - DNA, 2433 bp, Homo sapiens
ggcatgcagctgtgcgtggacgcctcgcagccgctttggatgctcttcggcctgcacgggaccatcacgcagatccgcatcctcggtgagtgcccgcagctgcgcctgggcgtatgcctttcctggaggcggggacgatccgggtaggagacaaagggcgagctccccttcctccaggctcatgatggtgttgctaaggaatcacagacacctaaggctccactatcctggccgagcggggtatcccatcactcccctgctcccctgcctccacgccaacctcgcccagtgccctgggcagccgcctgtctgaccccttgctcagcacgtgcagctctggccctctgggtagctctgctggtgggacagcccccaattcgccagtgagcctgcccgagtcgccagtgaccccaggtctgggccagtggagcgatgagtgcaccatttgctatgaacacgcggtggacacggtcatctacacatgtggccacatgtgcctctgctacgcctgtggcctgcgcctcaagaaggctctgcacgcctgctgccccatctgccgccgccccatcaaggacatcatcaagacctaccgcagctcctagcccgttgcggtggcccatcccgcatacccatcttctcgggcttcagcccagtcccagctgaggaacaagccagtggggccccttctcttcctcattttggaaacttttcctcctctattaaacatgggaaactgaagcccttgaaggtttggggagaggggggtatcaggcagggagggggcagaggcaaatcaccgggcagagggaggggaggagaggaggccgcactctccctgtctctcccgtctctgcacccagctcctctctgcatgctgagggctaaattgggatctcagcctgccctaatctttccccatctgaggcaggtttctaggaggtgtctgtagtccatgtggcacctttgtgagaattagaaaacatgtaccttcctctgggcagctgcagccctgagccaggacatgtggcctggctagtgcagcatggagtggattttaggctcatttgccctctcagccaactgcccttgagcagtgtacagcctgctcaacaaccgccctgggcaggccgctcctgagctgctgtctccctctctgacctatgcctaccttctctttcttcgttccctgcccactgggcatggcagctgggggtgagaggctggtggttgcctcccgtcctgggcaggctgcagcctcatgccatgtctctctcccactacctgatgggcacatggacaggctgcagagggctccaggttctgggcccctggctgagaaggggaggatcctgtcctggctgtagccttcctgccccaatcatctcgctggatgccattgcccaggggtagcccttcggtatgggctggggagaagggttggtcttctgccagggtccctaagaacaggtttgcagctaccctctctgaccttttccccatatcttgtgctgtccagggcctaggctgatagtcagagcctgtggcacacctgggatgggccagggccctgggtggggaggtgtgggttccctgggccaagaccagcctttttcctcagtttaattaatttatttatttggtttgtggttttgggttttttttgtttgtttgtttgtaggtgagttcccatcctctgggcccctagaaatgctgcctttgtgtgtggggtacctgggaaagggtgtggctgaggcagtcataatgcagtatcttcccctgactccagccacaaagctcatacccagccctaccaatcatgaactggaactccataaggaggggccaaattgggaggccttttggcaaacagtgtctattttacagagaggcaaaccaagcctccttagtgccctggggctgatggtcacccagagccatagagcacccttcctcctgggccagagctgggttatcatggttggcttaggtacctcaggtggcccaggaggtcccccctccataaggacgtcaaacttccaggagggccagtgttcctagtgtgggccaggaacaggacagggagaccttgtgatggcggggcagggagcctgttcgtagggaagatgaggaggcaagggctgcctctcacacctccaggttctctaagttctggggagggagcgccccacctgctgaggtcggtcctctcagccctgcctgccctggcctgggctctcccagcctcccagccctctgccccctcagatggctttttgtttttgtttttttttgcatccatcagagactgcacctctgtgtggcaggcagggcatgggttttagtcctggccactgaccagctgtgtggccctggccgagtcgtagccccctggagcccagcttccatttctataaaatggttgtttcgggagag

SEQ ID NO: 8356 - protein, 43 aa, Homo sapiens
MMVLLRNHRHLRLHYPGRAGYPITPLLPCLHANLAQCPGQPPV

SEQ ID NO: 8357 - DNA, 2778 bp, Homo sapiens
ggcatgcagctgtgcgtggacgcctcgcagccgctttggatgctcttcggcctgcacgggaccatcacgcagatccgcatcctcggtgagtgcccgcagctgcgcctgggcgtatgcctttcctggaggcggggacgatccgggtaggagacaaagggcgagctccccttcctccaggctcatgatggtgttgctaaggaatcacagacacctaaggctccactatcctggccgagcggggtatcccatcactcccctgctcccctgcctccacgccaacctcgcccagtgccctgggcagccgcctgtctgaccccttgctcagcacgtgcagctctggccctctgggtagctctgctggtgggacagcccccaattcgccagtgagcctgcccgagtcgccagtgaccccaggtctgggccagtggagcgatgagtgcaccatttgctatgaacacgcggtggacacggtcatctacacatgtggccacatgtgcctctgctacgcctgtggcctgcgcctcaagaaggctctgcacgcctgctgccccatctgccgccgccccatcaaggacatcatcaagacctaccgcagctcctagcccgttgcggtggcccatcccgcatacccatcttctcgggcttcagcccagtcccagctgaggaacaagccagtggggccccttctcttcctcattttggaaacttttcctcctctattaaacatgggaaactgaagcccttgaaggtttggggagaggggggtatcaggcagggagggggcagaggcaaatcaccgggcagagggaggggaggagaggaggccgcactctccctgtctctcccgtctctgcacccagctcctctctgcatgctgagggctaaattgggatctcagcctgccctaatctttccccatctgaggcaggtttctaggaggtgtctgtagtccatgtggcacctttgtgagaattagaaaacatgtaccttcctctgggcagctgcagccctgagccaggacatgtggcctggctagtgcagcatggagtggattttaggctcatttgccctctcagccaactgcccttgagcagtgtacagcctgctcaacaaccgccctgggcaggccgctcctgagctgctgtctccctctctgacctatgcctaccttctctttcttcgttccctgcccactgggcatggcagctgggggtgagaggctggtggttgcctcccgtcctgggcaggctgcagcctcatgccatgtctctctcccactacctgatgggcacatggacaggctgcagagggctccaggttctgggcccctggctgagaaggggaggatcctgtcctggctgtagccttcctgccccaatcatctcgctggatgccattgcccaggggtagcccttcggtatgggctggggagaagggttggtcttctgccagggtccctaagaacaggtttgcagctaccctctctgaccttttccccatatcttgtgctgtccagggcctaggctgatagtcagagcctgtggcacacctgggatgggccagggccctgggtggggaggtgtgggttccctgggccaagaccagcctttttcctcagtttaattaatttatttatttggtttgtggttttgggttttttttgtttgtttgtttgtaggtgagttcccatcctctgggcccctagaaatgctgcctttgtgtgtggggtacctgggaaagggtgtggctgaggcagtcataatgcagtatcttcccctgactccagccacaaagctcatacccagccctaccaatcatgaactggaactccataaggaggggccaaattgggaggccttttggcaaacagtgtctattttacagagaggcaaaccaagcctccttagtgccctggggctgatggtcacccagagccatagagcacccttcctcctgggccagagctgggttatcatggttggcttaggtacctcaggtggcccaggaggtcccccctccataaggacgtcaaacttccaggagggccagtgttcctagtgtgggccaggaacaggacagggagaccttgtgatggcggggcagggagcctgttcgtagggaagatgaggaggcaagggctgcctctcacacctccaggttctctaagttctggggagggagcgccccacctgctgaggtcggtcctctcagccctgcctgccctggcctgggctctcccagcctcccagccctctgccccctcagatggctttttgtttttgtttttttttgcatccatcagagactgcacctctgtgtggcaggcagggcatgggttttagtcctggccactgaccagctgtgtggccctggccgagtcgtagccccctggagcccagcttccatttctataaaatggttgtttcgggagagaggggcaggctttctgtgtgactcgggagttcttccgtgagggctgccagggggtggtgtgccaggacctcaggctgggcctttgtgctggccttgcagtgggtgtgtggggaagtcactgtcccactatgggtctccactacccagtcactgaccctgggagaccccttctgtgtgggagggagcgggggctggctagcgggccccccagccagggatcccagaggctgagggttggggagaggaagccatcatctcattacctctgtcagtgcaggggtggctgctgcttcccttgtgcacttgggtcgctgtgattgtgaataaaagtgatttcgtaccagc

SEQ ID NO: 8358 - protein, 43 aa, Homo sapiens; identical to SEQ ID NO: 8356

SEQ ID NO: 8359 - DNA, 3063 bp, Homo sapiens
ggcatgcagctgtgcgtggacgcctcgcagccgctttggatgctcttcggcctgcacgggaccatcacgcagatccgcatcctcggtgagtgcccgcagctgcgcctgggcgtatgcctttcctggaggcggggacgatccgggtaggagacaaagggcgagctccccttcctccaggctcatgatggtgttgctaaggaatcacagacacctaaggctccactatcctggccgagcggggtatcccatcactcccctgctcccctgcctccacgccaacctcgcccagtgccctgggcagccgcctgtctgaccccttgctcagcacgtgcagctctggccctctgggtagctctgctggtgggacagcccccaattcgccagtgagcctgcccgagtcgccagtgaccccaggtctgggccagtggagcgatgagtgcaccatttgctatgaacacgcggtggacacggtcatctacacatgtggccacatgtgcctctgctacgcctgtggcctgcgcctcaagaaggctctgcacgcctgctgccccatctgccgccgccccatcaaggacatcatcaagacctaccgcagctcctagcccgttgcggtggcccatcccgcatacccatcttctcgggcttcagcccagtcccagctgaggaacaagccagtggggccccttctcttcctcattttggaaacttttcctcctctattaaacatgggaaactgaagcccttgaaggtttggggagaggggggtatcaggcagggagggggcagaggcaaatcaccgggcagagggaggggaggagaggaggccgcactctccctgtctctcccgtctctgcacccagctcctctctgcatgctgagggctaaattgggatctcagcctgccctaatctttccccatctgaggcaggtttctaggaggtgtctgtagtccatgtggcacctttgtgagaattagaaaacatgtaccttcctctgggcagctgcagccctgagccaggacatgtggcctggctagtgcagcatggagtggattttaggctcatttgccctctcagccaactgcccttgagcagtgtacagcctgctcaacaaccgccctgggcaggccgctcctgagctgctgtctccctctctgacctatgcctaccttctctttcttcgttccctgcccactgggcatggcagctgggggtgagaggctggtggttgcctcccgtcctgggcaggctgcagcctcatgccatgtctctctcccactacctgatgggcacatggacaggctgcagagggctccaggttctgggcccctggctgagaaggggaggatcctgtcctggctgtagccttcctgccccaatcatctcgctggatgccattgcccaggggtagcccttcggtatgggctggggagaagggttggtcttctgccagggtccctaagaacaggtttgcagctaccctctctgaccttttccccatatcttgtgctgtccagggcctaggctgatagtcagagcctgtggcacacctgggatgggccagggccctgggtggggaggtgtgggttccctgggccaagaccagcctttttcctcagtttaattaatttatttatttggtttgtggttttgggttttttttgtttgtttgtttgtaggtgagttcccatcctctgggcccctagaaatgctgcctttgtgtgtggggtacctgggaaagggtgtggctgaggcagtcataatgcagtatcttcccctgactccagccacaaagctcatacccagccctaccaatcatgaactggaactccataaggaggggccaaattgggaggccttttggcaaacagtgtctattttacagagaggcaaaccaagcctccttagtgccctggggctgatggtcacccagagccatagagcacccttcctcctgggccagagctgggttatcatggttggcttaggtacctcaggtggcccaggaggtcccccctccataaggacgtcaaacttccaggagggccagtgttcctagtgtgggccaggaacaggacagggagaccttgtgatggcggggcagggagcctgttcgtagggaagatgaggaggcaagggctgcctctcacacctccaggttctctaagttctggggagggagcgccccacctgctgaggtcggtcctctcagccctgcctgccctggcctgggctctcccagcctcccagccctctgccccctcagatggctttttgtttttgtttttttttgcatccatcagagactgcacctctgtgtggcaggcagggcatgggttttagtcctggccactgaccagctgtgtggccctggccgagtcgtagccccctggagcccagcttccatttctataaaatggttgtttcgggagagaggggcaggctttctgtgtgactcgggagttcttccgtgagggctgccagggggtggtgtgccaggacctcaggctgggcctttgtgctggccttgcagtgggtgtgtggggaagtcactgtcccactatgggtctccactacccagtcactgaccctgggagaccccttctgtgtgggagggagcgggggctggctagcgggccccccagccagggatcccagaggctgagggttggggagaggaagccatcatctcattacctctgtcagtgcaggggtggctgctgcttcccttgtgcacttgggtcgctgtgattgtgaataaaagtgatttcgtaccagcctgagggcggtgctgtgcgcagagcactggggaaggagggccagcgtgtgcgtgcacatgtgggggcaggctggggtgtggaggcctggtgtcctggatactaggggagtcatcaggagctgtggcccttccctgaggggtaattgcaggcctctgaggcttcaaggtgggctggggcaatcagggaagactccctggagtcgggggctggagcgtgacttgggtctagaatgccaggtgagccttgcaaattgggagaggctactgcatctgtgaggagcaggg

SEQ ID NO: 8360 - protein, 43 aa, Homo sapiens; identical to SEQ ID NO: 8356

SEQ ID NO: 8361 - DNA, 494 bp, Homo sapiens
gagaagtgagccctgcctgggctccacacccagagagtccatacaaattctgctccgggaagagtcggggggtctattcaagtttctctgcagacaaaacttcccttcctccaggttttccttctttcctcctcagcagagaaactggagaaaggacattaaactcagtgcagtcgatttgagtgctgaaatatttccagaatcaatggtggtgctaaactatctccatgtttctagcatttttaatagtggagttggtttgtttttaatctcatcacaaaaatgcagtgcccttggggaagggaccagccccttggcctgccactttccaggtgtcctttatcactttgacgggactctttggtctgcagaaaatgctctgtcttggcatgcttctagactgtaagatttgggttttgttttgtattttatgtttacatgcatcttatatttccctgaaaactaaataaagttttgggcctttttaaccgaac

SEQ ID NO: 8362 - protein, 66 aa, Homo sapiens
MVVLNYLHVSSIFNSGVGLFLISSQKCSALGEGTSPLACHFPGVLYHFDGTLWSAENALSWHASRL

SEQ ID NO: 8363 - DNA, 6568 bp, Homo sapiens
attcttccccctccacaagccaaagtcgtttcatttggtttccactgtgtggactgtgctggagcttggcgcctgccagaaaaatttggggctaggcaagccccaggttgcagacatggtgaagcagagaaactgttcttctggttcctgcacaacctcagaggggcaaaaaccctccccaggaaggaggagggtgttcaggagccagacttttggagagaaggcagctcccagcctgctgggtgaccgccattctgcgtgtgttccccagctgggcagggctggaagccttacgtatgaagcatggagaagcagccattgtccccactatgggcagaggggggacccggctggccccttgggtcagactggagccaacaccgccagccaccccctctggcctgctggcaatgccacaggtgcccaagaagatggaggatccctgtgccaggagccaacctggtcttcccgagggtcagtgccccagtgaagacagaagcgagagaataaagttccctgtaggtcctctgtcacctttgggttgtgtttttcaattgttgacatttcagaggggaccctccagaagcccagccggcttcccccaaggactcccccttcgctgggagtggatttccacacgtgcctttgatttcggacagattgggcctcacactagagcaaatggctcgtgttctttgtcgaaggcctgtggtgagattgttttgtttccttttgttttgtgagtttgtttaaaattgaaattagttattttcttctgctggacagtattaaatagagcaggatgttgagttaatctgctagattgcagtactaatggtagtggtttagtgtcttcatgttaatattatttgtacttatttgaacaataatgataaagaagtggttcattattttttaattaatgcactttaaataaggtagaatggaaaaaacccagagagcaaagtgcattacttaaagatgcagtatatacttttctcatttttaaacagcacatatttattaagagaaaaaaagtaatttatgactatttaaaataaaatttaaaagtagagtgactgtcaggtaaagaaccttcaatgtagctatcttccagggggagggccctgcagcctcgctcctcagatgtctgcactgagccagttcagtcactagtgcgccagccaggccaggagggagtgcagagcatgtctgccaagcacagagcatctcagttggactggaccacagtgctcccgagagcctgcctttcctgcccttccccaccacctgcactgccccccacattctcccagccccccccaaggaccccctctccttgacccccagtgctgtaagtaatagagtcattaaaatgcaggactgaaagagacctcagaggtctctatcccatcccttcctgttactgcggcccaaggacaggaaacaacttttccaaaatcccacagctagttaatgacagatctccccactacattaatcccgtgctcctcctcactgccattatagtttattgtgtggtcatgtttacattgtgacatccagccccaaggatggctgggagttgctcaggcatccaggaaaagtggggaatgctgccatctggtgacagcatgtagatttgggcagtgaacagggattgccatgccccagtcttcgcacctcgccccctcaccccctaactcacagcacaaaccctgcaaacccaaagagaatattaatacttgaagcaagaagggtgcatgccagtccttctccgacatggccagggggtaccaggccttgtgcgcctggcctcctagccctagccagggcgagagggcctttcccttgagctactgagctgctttgtgatgctgaaggatactgccggcagcaggcagaggagggagggggcctagggctctgacccatctggaggaaaaccagatcggactaaaaaaggaaaaagaaaaacaaaatctccgcagtgtccaaacctagtttcccatgagttgcgactgaaaatgtgaaacgacactgtattgctgtatactgcaactttaaccataatgagcccttctgaggtcattattgaggttcatataatgcccgaagatgcagcatttggtgctttgttttcctttccgtttcaagacctttttcttttattgcaaggggaaaaaaatgtcatctccccccacctcatccctctttgtgacagcagacctggctgtgttgcccctctcctcctcactattctcaccaggccatgggactttgggggcagtgagagagagctggaaaggggcaaccctgagcagcaggtgtgccccatgccctgtgggtttcccctatgtccaatgactgtagacgggctgtcttgccaggcctcagccccgtctaccctaagcctggccccaaaggtttctctttcttcctccttgattttccatcttgacgaaggcattatatagaatcattttaatcactttcagatgttagagcagcgtattttacaggcatttatatccattgctttcctcagcaaggcatgttactacttttatcatctaaggaaaaaagacaagggaattccagtcaggcattattttcctattactagtgtttgcagaataggtgtaggactatttaagtttagaccttggtttggtagttcttgtttttaataaggggaaaaagataaaataacccctatttttcctgttattgtatttaactaatatattatttctttaaggttactcacttcccctacccctccaaataccttgcattctcaatcaaaaatggaaacaatctgagagacaggaaaagtgcaatattaccaagatggatgccagggctcattggggacaatggagggaataccagtggcgctcagagagcaagaggcagggagcggggtgctgaaggaatcctagctgtggaacaggtgggtgggttggtggagtttgatcttgtggcgttctcctctcccccttctttgggaagatgataggggtccctgccagatccacccagaagaaagggattcaggcatggggcccttgacctctaggccccagtccctggagcagaggcaggccctcgggagctgttccttgttttgatttctgttgtggtgcagccagctgctcagagagacctggcctaaaaatgactcccagcagccctctctcaccccagtgtcctgatatttgggctgtgatccttctggtgtatgtttgaatctttctaaaactgggtgccctcagttcagtttctaggcaggaagcctagaagtcaccagatctttttgggggatgtgagaaccttgagccgcgcacaccctggtgagacaccaattcccacaagcctgcagcagggcctggggctgagcctgggctgcccattcatctcagcgacttcagcctgagaagtgagccctgcctgggctccacacccagagagtccatacaaattctgctccgggaagagtcggggggtctattcaagtttctctgcagacaaaacttcccacaacaggtaccaatctggcctccttcctcagcaccggtagagaaagcaacagaatgggaagtttcctctgggttggagcctcagagctctgcccctcaaggtgacagggacgtccctgtggcttgttccctccacctccagtactgtatgcttgctacttcaaccccctatttggtgaatttctgcacagacacagatctctgtgcctggaatgggactgtgccctgtgcgggtctctcccttggcgtatatccatctagatatttagtctttgagaatctcaaagcagagctctctgggaagagaactgtccacattgctaaataattaagattccctcacttttttgagggccatgtgttgtgagagagagagagagagagagagtgtgtgtgtgtgtgtgtgtgtgtgtgtgtctgtgtatgcaagtgttggtaacttcccacttgaactaaataacatggggttagagaaaaaaaaataccaggcaagctgtctccattgaacaagtccttggcaatgggcaggtcccaagggactcacagcttctggcagcaagtgtgtcattcacacacatcattctggctggagagtgcaatgtgtcatttttttttctttttgtaattattttattaagtatttagttggaaatttcacactggcattaacaggtctagcataagtggcctaggcagtcatcccaggctccaaaatgaagatgtgcaaaagagatgccactgggaatagaaacactgagttggttcagttaggtcatcccctgcagacgtgtcatcgagcaggctgactcccacccctcagccatgccatgggtatgagaagccccttataatgaaagctgccagccctttcgtccttgtttcagagggtgggtcaggtggttggggtgagaacttgctcacggtgcacccaacaagacctgcaggtgcatataagtttagtcccaactgcagggccagaccaaacacttcctgggaagtgtgtggagggctgtgctagaccttcctgagtttctggctaaatcatcagccctgtttggtgcagtctcatgtctctgtggttcccaagctgcatgatcagagccagtgagaagacaggatcagtgacccacagctttggggaaaaacagccccactgttaacttccctcctgcaaacctgggtccccaggccataaggtgggcacactggtgcttacagactgggtggagagccctaccttccaaggtcttgatcccagcctgcctataaggttgggattagcatgcaatcccccttccccaatcctgtctttttaaaatctcaagtttgcacttaaccttgacaacagcaccctctcctactccagtcctagaactcagtggccttagagaatggggtcccctgcactgaaggtccccgccttgctcccagttccatcctggccaataggctgcgcctcaagaggtgaaagagaaaaaagggagggagggaggaagaattatttagaacaaaaggatggctcgagcacgttagaggcaagtgagaggcacgttggtgagaagagcatgtgcatgtttggggtagctggggcctactgtcccttcattagggaaggaggcttccagaagcggatgtcttctagaaagaaaaattgtgtgaaggctgaaaaggggcttggagttttgtctttgttgattagaaagaaggaagaagtcagctctgagtgtttcaggaagaagagagcaggtagaaagggaatttagtgatttaacacccaagggtccagccatagcaggttggaaaatcctccaaatttggccacagaaactggctaggaaaaaactgccactcattgggccacacgctgggtccccatcagttctcaatgaatggtcattgatttacttagcagagagaagtcaccagccacaaaccaatctttgagtttgcaggccctgattccagaatatatgcatccagctcccgggttctcagctggttttgcccacttccctttgactgtccaatccaaagccagtctctcaagttgtatggctcaaagagcagtgaccacaatgggtcatacagtagggacccacctccacaaattagaaccagagttcagactccattgggcacatctgggaggaaggcaacctcctttgtcgtcttgttggtaccagtcattctcaagtatctctgacacctgtggtggttcagtttgctgagcctgccacctggtatgaattagactgggtgtgatgaacattcatccatggatataccctaccattttgcgttgccttataaccaaggcacactccccataagagtttactgcagagaaagaacagcaaaacagccaccctccttgaatttacaactcattatctgcaacaggttttctttaaatccaagacacaggatgggaaatgggtttccccaccaggtactcagaggtctgcaggaagtgactcccgggcaaggcagacttcagtaatccctgaagcgtgagcatgtggactgcatggctgggtggggactggtggatgtctctggagctccagaaccttggagaattcctcatggaattcccctcccagctcttagtgggctctgtggggtcaggaggagcccttcctccaggttttccttctttcctcctcagcagagaaactggagaaaggacattaaactcagtgcagtcgatttgagtgctgaaatatttccagaatcaatggtggtgctaaactatctccatgtttctagcatttttaatagtggagttggtttgtttttaatctcatcacaaaaatgcagtgcccttggggaagggaccagccccttggcctgccactttccaggtgtcctttatcactttgacgggactctttggtctgcagaaaatgctctgtcttggcatgcttctagactgtaagatttgggttttgttttgtattttatgtttacatgcatcttatatttccctgaaaactaaataaagttttgggcctttttaaccgaac

SEQ ID NO: 8364 - protein, 148 aa, Homo sapiens
MKHGEAAIVPTMGRGGTRLAPWVRLEPTPPATPSGLLAMPQVPKKMEDPCARSQPGLPEGQCPSEDRSERIKFPVGPLSPLGCVFQLLTFQRGPSRSPAGFPQGLPLRWEWISTRAFDFGQIGPHTRANGSCSLSKACGEIVLFPFVL

SEQ ID NO: 8365 - DNA, 10998 bp, Homo sapiens
cacaaatctgtgattacctggcgggtgaaccgctccggtggcggggagagcgggctcccagcgctgggtaggggccgggttccggcgagcgccatcccggagcgtcagtttcccagtttgggaagtgaggagaacctgcctcgcccttccccgccaaggcttagggaagggactatggcagttccaagaggaaatcagggtctcactctgttgctcaggctggattgcagtggcgtgatcatgcctcactgcagcctcgacctccctgggctcaagcaatcctcccacttcagcctccagagtagctgggaccacagtgtggctgtccagctgggctgagtcgcccaagaaggacgtgacaggtgccgacgccaccgccgagcccatgatcctggaacagtacgtggtggtgtccaactataagaagcaggagaactcggagctgagcctccaggccggggaggtggtggatgtcatcgagaagaacgagagcggctggtggttcgtgagcacttctgaggagcagggctgggtccctgccacctacctggaggcccagaatggtactcgggatgactccgacatcaacacctctaagactggagaagaggagaagtatgtcaccgtgcagccttacaccagccaaagcaaggacgagattggctttgagaagggcgtcacagtggaggtgatccggaagaatctggaaggctggtggtatatcagatacctgggcaaagagggctgggcgccagcatcctacctgaagaaggccaaggatgacctgccaacccggaagaagaacctggccggcccagtggagatcattgggaacatcatggagatcagcaacctgctgaacaagaaggcgtctggggacaaggaaactccaccagccgaaggcgagggccatgaggcccccattgccaagaaggagatcagcctgcccatcctctgcaatgcctccaatggcagtgccgtgggcgttcctgacaggactgtctccaggctggcccagggctctccagctgtggccaggattgcccctcagcgggcccagatcagctccccgaacctacggacaagacctccaccacgcagagaatccagcctggggttccaactgccaaagccaccagagcccccttctgttgaggtggagtactacaccattgccgaattccagtcgtgcatttccgatggcatcagctttcggggtggacagaaggcagaggtcattgataagaactcaggtggctggtggtacgtgcagatcggtgagaaggagggctgggcccccgcatcatacatcgataagcgcaagaagcccaacctgagccgccgcacaagcacgctgacccggcccaaggtgcccccgccagcaccccccagcaagcccaaggaggccgaggagggccctacgggggccagtgagagccaggactccccgcggaagctcaagtatgaggagcctgagtatgacatccctgcattcggctttgactcagagcctgagctgagcgaggagcccgtggaggacagagcctcaggggagaggcggcctgcccagccccaccggccctcgccggcctcttctctgcagcgggcccgcttcaaggtgggtgagtcttcagaggatgtggccctggaagaggagaccatctatgagaatgagggcttccggccatatgcagaggacaccctgtcagccagaggctcctccggggacagcgactccccaggcagctcctcgctgtccctgaccaggaaaaactcccccaaatcaggctcccccaagtcatcatcactcctaaagctcaaggcagagaagaatgcccaggcagaaatggggaagaaccactcctcagcctccttttcctcatccatcaccatcaacaccacttgctgctcctcctcttcctcctcctcctcttccttgtccaaaaccagtggcgacctgaagccccgctctgcttcggacgcaggcatccgcggcactcccaaggtcagggcaaagaaggatgctgatgcgaacgctgggctgacctcctgtccccgggccaagccatcggtccggcccaagccattcctaaaccgagcagagtcgcagagccaagagaagatggacatcagcactttacggcgccagctgagacccacaggccagctccgtggagggctcaagggctccaagagtgaggattcggagctgcccccgcagacggcctccgaggctcccagtgaggggtctaggagaagctcatccgacctcatcaccctcccagccaccactcccccatgtcccaccaagaaggaatgggaagggccagccacctcgtacatgacatgcagcgcctaccagaaggtccaggactcggagatcagcttccccgcgggcgtggaggtgcaggtgctggagaagcaggagagcgggtggtggtatgtgaggtttggggagctggagggctgggccccttcccactatttggtgctggatgagaacgagcaacctgacccctctggcaaagagctggacacagtgcccgccaagggcaggcagaacgaaggcaaatcagacagcctggagaagatcgagaggcgcgtccaagcactgaacaccgtcaaccagagcaagaaggccacgccccccatcccctccaaacctcccgggggcttcggcaagacctcaggcactccagcggtgaagatgaggaacggagtgcggcaggtggcggtcaggccccagtcggtgtttgtgtccccgccacccaaggacaacaacctgtcctgcgccctgcggaggaatgagtcactcacggccactgatggcctccgaggcgtccgacggaactcctcctttagcactgctcgctccgctgccgccgaggccaagggccgcctggccgaacgggctgccagccagggttcagactcacccctactgcccgcccagcgcaacagcatacccgtgtcccctgtgcgccccaagcccatcgagaagtctcagttcatccacaataacctcaaagatgtgtacgtctctatcgcagactacgagggggatgaggagacagcaggcttccaggagggggtgtccatggaggttctggagaggaaccctaatggctggtggtactgccagatcctggatggtgtgaagcccttcaaaggctgggtgccttccaactaccttgagaaaaagaactagcagagggcctgggctcttccagcctcagtgtgcctctctggccgcccactggatgagcggtgagacgaacaaaagggaaaggaaaaaatgggggtggggggtggggggtggacaacattcaacactgcagaatgggtgacctcaaagatgccccctgtccaagccatcccacagctggaaggtaggggatgggggtgcccacactgagtgaggaagggaatggaccagggagtcccaggcctgggacccagagccaagaaagctgagatatcctgtgcaccatagggacttcaccaatggattacatgccatctgggacaggccatgtgggagaccccagttgtgcctttgctacagatctggaaaagacaaggtcatgggggcctccagtgtcctgcccctgcttggcccagttttgattgctggcatcttgccaccccaggtatccctggtattgtcctaagctgtatttgtgaattgtgctggtttcctgggcattgccacgcctaccacaggtgggtacattagaagccaccactggctttcaggcttgggggtgtcttctgagctcaagcctgcttctgggccaggccattgtcactgttagttgaagaaaaagcagttcccaggtgccagcaaagaccatctttcataactgtcactgtcttggccttgagaagagagcccgctctccgtggggcaccccatggaggacacagtaccagagtttacagagagggtgggcgaagccaccggtctcttcctaatctgcacagactattttgggtatttctgggcgggcagttcctttgcatgtttcgggagaggtttgttgatttggggcttatatgtcaggcctttggtttgcgtcttattttaggggttgtttgggggcctgggtggtcggcctcacatgggaaggggatgggtagtggatggggtttctgttgtatcttgtgggcgggtgattttgcttttgtttttgtttcacattcttccccctccacaagccaaagtcgtttcatttggtttccactgtgtggactgtgctggagcttggcgcctgccagaaaaatttggggctaggcaagccccaggttgcagacatggtgaagcagagaaactgttcttctggttcctgcacaacctcagaggggcaaaaaccctccccaggaaggaggagggtgttcaggagccagacttttggagagaaggcagctcccagcctgctgggtgaccgccattctgcgtgtgttccccagctgggcagggctggaagccttacgtatgaagcatggagaagcagccattgtccccactatgggcagaggggggacccggctggccccttgggtcagactggagccaacaccgccagccaccccctctggcctgctggcaatgccacaggtgcccaagaagatggaggatccctgtgccaggagccaacctggtcttcccgagggtcagtgccccagtgaagacagaagcgagagaataaagttccctgtaggtcctctgtcacctttgggttgtgtttttcaattgttgacatttcagaggggaccctccagaagcccagccggcttcccccaaggactcccccttcgctgggagtggatttccacacgtgcctttgatttcggacagattgggcctcacagccaccgattcagctgccagggtccctggactgggggttggtgttttctatagaggaggaaaggccctccctcaccctgctccccacccaggcagggcagcatgggacccagtgtctcagtgccttcaaaacccacccccacccctaccctaccccaccacaccccatcccagaggccttgcctgggcaaccctaagcccctgtccctcgccatacactgatgcctggcagctagagcaaatggctcgtgttctttgtcgaaggcctgtggtgagattgttttgtttccttttgttttgtgagtttgtttaaaattgaaattagttattttcttctgctggacagtattaaatagagcaggatgttgagttaatctgctagattgcagtactaatggtagtggtttagtgtcttcatgttaatattatttgtacttatttgaacaataatgataaagaagtggttcattattttttaattaatgcactttaaataaggtagaatggaaaaaacccagagagcaaagtgcattacttaaagatgcagtatatacttttctcatttttaaacagcacatatttattaagagaaaaaaagtaatttatgactatttaaaataaaatttaaaagtagagtgactgtcaggtaaagaaccttcaatgtagctatcttccagggggagggccctgcagcctcgctcctcagatgtctgcactgagccagttcagtcactagtgcgccagccaggccaggagggagtgcagagcatgtctgccaagcacagagcatctcagttggactggaccacagtgctcccgagagcctgcctttcctgcccttccccaccacctgcactgccccccacattctcccagccccccccaaggaccccctctccttgacccccagtgctgtaagtaatagagtcattaaaatgcaggactgaaagagacctcagaggtctctatcccatcccttcctgttactgcggcccaaggacaggaaacaacttttccaaaatcccacagctagttaatgacagatctccccactacattaatcccgtgctcctcctcactgccattatagtttattgtgtggtcatgtttacattgtgacatccagccccaaggatggctgggagttgctcaggcatccaggaaaagtggggaatgctgccatctggtgacagcatgtagatttgggcagtgaacagggattgccatgccccagtcttcgcacctcgccccctcaccccctaactcacagcacaaaccctgcaaacccaaagagaatattaatacttgaagcaagaagggtgcatgccagtccttctccgacatggccagggggtaccaggccttgtgcgcctggcctcctagccctagccagggcgagagggcctttcccttgagctactgagctgctttgtgatgctgaaggatactgccggcagcaggcagaggagggagggggcctagggctctgacccatctggaggaaaaccagatcggactaaaaaaggaaaaagaaaaacaaaatctccgcagtgtccaaacctagtttcccatgagttgcgactgaaaatgtgaaacgacactgtattgctgtatactgcaactttaaccataatgagcccttctgaggtcattattgaggttcatataatgcccgaagatgcagcatttggtgctttgttttcctttccgtttcaagacctttttcttttattgcaaggggaaaaaaatgtcatctccccccacctcatccctctttgtgacagcagacctggctgtgttgcccctctcctcctcactattctcaccaggccatgggactttgggggcagtgagagagagctggaaaggggcaaccctgagcagcaggtgtgccccatgccctgtgggtttcccctatgtccaatgactgtagacgggctgtcttgccaggcctcagccccgtctaccctaagcctggccccaaaggtttctctttcttcctccttgattttccatcttgacgaaggcattatatagaatcattttaatcactttcagatgttagagcagcgtattttacaggcatttatatccattgctttcctcagcaaggcatgttactacttttatcatctaaggaaaaaagacaagggaattccagtcaggcattattttcctattactagtgtttgcagaataggtgtaggactatttaagtttagaccttggtttggtagttcttgtttttaataaggggaaaaagataaaataacccctatttttcctgttattgtatttaactaatatattatttctttaaggttactcacttcccctacccctccaaataccttgcattctcaatcaaaaatggaaacaatctgagagacaggaaaagtgcaatattaccaagatggatgccagggctcattggggacaatggagggaataccagtggcgctcagagagcaagaggcagggagcggggtgctgaaggaatcctagctgtggaacaggtgggtgggttggtggagtttgatcttgtggcgttctcctctcccccttctttgggaagatgataggggtccctgccagatccacccagaagaaagggattcaggcatggggcccttgacctctaggccccagtccctggagcagaggcaggccctcgggagctgttccttgttttgatttctgttgtggtgcagccagctgctcagagagacctggcctaaaaatgactcccagcagccctctctcaccccagtgtcctgatatttgggctgtgatccttctggtgtatgtttgaatctttctaaaactgggtgccctcagttcagtttctaggcaggaagcctagaagtcaccagatctttttgggggatgtgagaaccttgagccgcgcacaccctggtgagacaccaattcccacaagcctgcagcagggcctggggctgagcctgggctgcccattcatctcagcgacttcagcctgagaagtgagccctgcctgggctccacacccagagagtccatacaaattctgctccgggaagagtcggggggtctattcaagtttctctgcagacaaaacttcccacaacaggtaccaatctggcctccttcctcagcaccggtagagaaagcaacagaatgggaagtttcctctgggttggagcctcagagctctgcccctcaaggtgacagggacgtccctgtggcttgttccctccacctccagtactgtatgcttgctacttcaaccccctatttggtgaatttctgcacagacacagatctctgtgcctggaatgggactgtgccctgtgcgggtctctcccttggcgtatatccatctagatatttagtctttgagaatctcaaagcagagctctctgggaagagaactgtccacattgctaaataattaagattccctcacttttttgagggccatgtgttgtgagagagagagagagagagagagtgtgtgtgtgtgtgtgtgtgtgtgtgtgtctgtgtatgcaagtgttggtaacttcccacttgaactaaataacatggggttagagaaaaaaaaataccaggcaagctgtctccattgaacaagtccttggcaatgggcaggtcccaagggactcacagcttctggcagcaagtgtgtcattcacacacatcattctggctggagagtgcaatgtgtcatttttttttctttttgtaattattttattaagtatttagttggaaatttcacactggcattaacaggtctagcataagtggcctaggcagtcatcccaggctccaaaatgaagatgtgcaaaagagatgccactgggaatagaaacactgagttggttcagttaggtcatcccctgcagacgtgtcatcgagcaggctgactcccacccctcagccatgccatgggtatgagaagccccttataatgaaagctgccagccctttcgtccttgtttcagagggtgggtcaggtggttggggtgagaacttgctcacggtgcacccaacaagacctgcaggtgcatataagtttagtcccaactgcagggccagaccaaacacttcctgggaagtgtgtggagggctgtgctagaccttcctgagtttctggctaaatcatcagccctgtttggtgcagtctcatgtctctgtggttcccaagctgcatgatcagagccagtgagaagacaggatcagtgacccacagctttggggaaaaacagccccactgttaacttccctcctgcaaacctgggtccccaggccataaggtgggcacactggtgcttacagactgggtggagagccctaccttccaaggtcttgatcccagcctgcctataaggttgggattagcatgcaatcccccttccccaatcctgtctttttaaaatctcaagtttgcacttaaccttgacaacagcaccctctcctactccagtcctagaactcagtggccttagagaatggggtcccctgcactgaaggtccccgccttgctcccagttccatcctggccaataggctgcgcctcaagaggtgaaagagaaaaaagggagggagggaggaagaattatttagaacaaaaggatggctcgagcacgttagaggcaagtgagaggcacgttggtgagaagagcatgtgcatgtttggggtagctggggcctactgtcccttcattagggaaggaggcttccagaagcggatgtcttctagaaagaaaaattgtgtgaaggctgaaaaggggcttggagttttgtctttgttgattagaaagaaggaagaagtcagctctgagtgtttcaggaagaagagagcaggtagaaagggaatttagtgatttaacacccaagggtccagccatagcaggttggaaaatcctccaaatttggccacagaaactggctaggaaaaaactgccactcattgggccacacgctgggtccccatcagttctcaatgaatggtcattgatttacttagcagagagaagtcaccagccacaaaccaatctttgagtttgcaggccctgattccagaatatatgcatccagctcccgggttctcagctggttttgcccacttccctttgactgtccaatccaaagccagtctctcaagttgtatggctcaaagagcagtgaccacaatgggtcatacagtagggacccacctccacaaattagaaccagagttcagactccattgggcacatctgggaggaaggcaacctcctttgtcgtcttgttggtaccagtcattctcaagtatctctgacacctgtggtggttcagtttgctgagcctgccacctggtatgaattagactgggtgtgatgaacattcatccatggatataccctaccattttgcgttgccttataaccaaggcacactccccataagagtttactgcagagaaagaacagcaaaacagccaccctccttgaatttacaactcattatctgcaacaggttttctttaaatccaagacacaggatgggaaatgggtttccccaccaggtactcagaggtctgcaggaagtgactcccgggcaaggcagacttcagtaatccctgaagcgtgagcatgtggactgcatggctgggtggggactggtggatgtctctggagctccagaaccttggagaattcctcatggaattcccctcccagctcttagtgggctctgtggggtcaggaggagcccttcctccaggttttccttctttcctcctcagcagagaaactggagaaaggacattaaactcagtgcagtcgatttgagtgctgaaatatttccagaatcaatggtggtgctaaactatctccatgtttctagcatttttaatagtggagttggtttgtttttaatctcatcacaaaaatgcagtgcccttggggaagggaccagccccttggcctgccactttccaggtgtcctttatcactttgacgggactctttggtctgcagaaaatgctctgtcttggcatgcttctagactgtaagatttgggttttgttttgtattttatgtttacatgcatcttatatttccctgaaaactaaataaagttttgggcctttttaaccgaac

SEQ ID NO: 8366 - protein, 940 aa, Homo sapiens
MILEQYVVVSNYKKQENSELSLQAGEVVDVIEKNESGWWFVSTSEEQGWVPATYLEAQNGTRDDSDINTSKTGEEEKYVTVQPYTSQSKDEIGFEKGVTVEVIRKNLEGWWYIRYLGKEGWAPASYLKKAKDDLPTRKKNLAGPVEIIGNIMEISNLLNKKASGDKETPPAEGEGHEAPIAKKEISLPILCNASNGSAVGVPDRTVSRLAQGSPAVARIAPQRAQISSPNLRTRPPPRRESSLGFQLPKPPEPPSVEVEYYTIAEFQSCISDGISFRGGQKAEVIDKNSGGWWYVQIGEKEGWAPASYIDKRKKPNLSRRTSTLTRPKVPPPAPPSKPKEAEEGPTGASESQDSPRKLKYEEPEYDIPAFGFDSEPELSEEPVEDRASGERRPAQPHRPSPASSLQRARFKVGESSEDVALEEETIYENEGFRPYAEDTLSARGSSGDSDSPGSSSLSLTRKNSPKSGSPKSSSLLKLKAEKNAQAEMGKNHSSASFSSSITINTTCCSSSSSSSSSLSKTSGDLKPRSASDAGIRGTPKVRAKKDADANAGLTSCPRAKPSVRPKPFLNRAESQSQEKMDISTLRRQLRPTGQLRGGLKGSKSEDSELPPQTASEAPSEGSRRSSSDLITLPATTPPCPTKKEWEGPATSYMTCSAYQKVQDSEISFPAGVEVQVLEKQESGWWYVRFGELEGWAPSHYLVLDENEQPDPSGKELDTVPAKGRQNEGKSDSLEKIERRVQALNTVNQSKKATPPIPSKPPGGFGKTSGTPAVKMRNGVRQVAVRPQSVFVSPPPKDNNLSCALRRNESLTATDGLRGVRRNSSFSTARSAAAEAKGRLAERAASQGSDSPLLPAQRNSIPVSPVRPKPIEKSQFIHNNLKDVYVSIADYEGDEETAGFQEGVSMEVLERNPNGWWYCQILDGVKPFKGWVPSNYLEKKN

SEQ ID NO: 8367 - DNA, 11335 bp, Homo sapiens
ggcaggccggcggggagtcccccggggcgcacggagcccgcgcgccctccgggaccctcccccgtccctgggccggacctgtgggcgccgggagtccgggcagcgttcggcgcgccgggccggggtggcgggcggccccgggaccccggcagctggagaaggagccggagcccggccgggatgagaaggtgacgccgccgggggcgccactcgctttgtgggggaagatgctcgcctactgcgtgcaggatgccaccgtggtggacgtggagaagcggaggaacccctccaagcactacgtatacataatcaatgtgacctggtctgactccacctcccagactatctaccggaggtacagcaagttctttgacctgcagatgcagcttttggataagtttcccattgaaggtggccagaaggaccccaagcaaaggatcatccccttcctcccaggcaagatcctcttccgcagaagccacatccgggacgtagctgtgaagagactgaagcccatcgatgaatactgccgggcacttgtccggctgcccccccacatctcacagtgtgacgaagtcttccggttcttcgaggctcgacccgaggatgtcaaccctccaaaagaggactatggcagttccaagaggaaatcagtgtggctgtccagctgggctgagtcgcccaagaaggacgtgacaggtgccgacgccaccgccgagcccatgatcctggaacagtacgtggtggtgtccaactataagaagcaggagaactcggagctgagcctccaggccggggaggtggtggatgtcatcgagaagaacgagagcggctggtggttcgtgagcacttctgaggagcagggctgggtccctgccacctacctggaggcccagaatggtactcgggatgactccgacatcaacacctctaagactggagaagaggagaagtatgtcaccgtgcagccttacaccagccaaagcaaggacgagattggctttgagaagggcgtcacagtggaggtgatccggaagaatctggaaggctggtggtatatcagatacctgggcaaagagggctgggcgccagcatcctacctgaagaaggccaaggatgacctgccaacccggaagaagaacctggccggcccagtggagatcattgggaacatcatggagatcagcaacctgctgaacaagaaggcgtctggggacaaggaaactccaccagccgaaggcgagggccatgaggcccccattgccaagaaggagatcagcctgcccatcctctgcaatgcctccaatggcagtgccgtgggcgttcctgacaggactgtctccaggctggcccagggctctccagctgtggccaggattgcccctcagcgggcccagatcagctccccgaacctacggacaagacctccaccacgcagagaatccagcctggggttccaactgccaaagccaccagagcccccttctgttgaggtggagtactacaccattgccgaattccagtcgtgcatttccgatggcatcagctttcggggtggacagaaggcagaggtcattgataagaactcaggtggctggtggtacgtgcagatcggtgagaaggagggctgggcccccgcatcatacatcgataagcgcaagaagcccaacctgagccgccgcacaagcacgctgacccggcccaaggtgcccccgccagcaccccccagcaagcccaaggaggccgaggagggccctacgggggccagtgagagccaggactccccgcggaagctcaagtatgaggagcctgagtatgacatccctgcattcggctttgactcagagcctgagctgagcgaggagcccgtggaggacagagcctcaggggagaggcggcctgcccagccccaccggccctcgccggcctcttctctgcagcgggcccgcttcaaggtgggtgagtcttcagaggatgtggccctggaagaggagaccatctatgagaatgagggcttccggccatatgcagaggacaccctgtcagccagaggctcctccggggacagcgactccccaggcagctcctcgctgtccctgaccaggaaaaactcccccaaatcaggctcccccaagtcatcatcactcctaaagctcaaggcagagaagaatgcccaggcagaaatggggaagaaccactcctcagcctccttttcctcatccatcaccatcaacaccacttgctgctcctcctcttcctcctcctcctcttccttgtccaaaaccagtggcgacctgaagccccgctctgcttcggacgcaggcatccgcggcactcccaaggtcagggcaaagaaggatgctgatgcgaacgctgggctgacctcctgtccccgggccaagccatcggtccggcccaagccattcctaaaccgagcagagtcgcagagccaagagaagatggacatcagcactttacggcgccagctgagacccacaggccagctccgtggagggctcaagggctccaagagtgaggattcggagctgcccccgcagacggcctccgaggctcccagtgaggggtctaggagaagctcatccgacctcatcaccctcccagccaccactcccccatgtcccaccaagaaggaatgggaagggccagccacctcgtacatgacatgcagcgcctaccagaaggtccaggactcggagatcagcttccccgcgggcgtggaggtgcaggtgctggagaagcaggagagcgggtggtggtatgtgaggtttggggagctggagggctgggccccttcccactatttggtgctggatgagaacgagcaacctgacccctctggcaaagagctggacacagtgcccgccaagggcaggcagaacgaaggcaaatcagacagcctggagaagatcgagaggcgcgtccaagcactgaacaccgtcaaccagagcaagaaggccacgccccccatcccctccaaacctcccgggggcttcggcaagacctcaggcactccagcggtgaagatgaggaacggagtgcggcaggtggcggtcaggccccagtcggtgtttgtgtccccgccacccaaggacaacaacctgtcctgcgccctgcggaggaatgagtcactcacggccactgatggcctccgaggcgtccgacggaactcctcctttagcactgctcgctccgctgccgccgaggccaagggccgcctggccgaacgggctgccagccagggttcagactcacccctactgcccgcccagcgcaacagcatacccgtgtcccctgtgcgccccaagcccatcgagaagtctcagttcatccacaataacctcaaagatgtgtacgtctctatcgcagactacgagggggatgaggagacagcaggcttccaggagggggtgtccatggaggttctggagaggaaccctaatggctggtggtactgccagatcctggatggtgtgaagcccttcaaaggctgggtgccttccaactaccttgagaaaaagaactagcagagggcctgggctcttccagcctcagtgtgcctctctggccgcccactggatgagcggtgagacgaacaaaagggaaaggaaaaaatgggggtggggggtggggggtggacaacattcaacactgcagaatgggtgacctcaaagatgccccctgtccaagccatcccacagctggaaggtaggggatgggggtgcccacactgagtgaggaagggaatggaccagggagtcccaggcctgggacccagagccaagaaagctgagatatcctgtgcaccatagggacttcaccaatggattacatgccatctgggacaggccatgtgggagaccccagttgtgcctttgctacagatctggaaaagacaaggtcatgggggcctccagtgtcctgcccctgcttggcccagttttgattgctggcatcttgccaccccaggtatccctggtattgtcctaagctgtatttgtgaattgtgctggtttcctgggcattgccacgcctaccacaggtgggtacattagaagccaccactggctttcaggcttgggggtgtcttctgagctcaagcctgcttctgggccaggccattgtcactgttagttgaagaaaaagcagttcccaggtgccagcaaagaccatctttcataactgtcactgtcttggccttgagaagagagcccgctctccgtggggcaccccatggaggacacagtaccagagtttacagagagggtgggcgaagccaccggtctcttcctaatctgcacagactattttgggtatttctgggcgggcagttcctttgcatgtttcgggagaggtttgttgatttggggcttatatgtcaggcctttggtttgcgtcttattttaggggttgtttgggggcctgggtggtcggcctcacatgggaaggggatgggtagtggatggggtttctgttgtatcttgtgggcgggtgattttgcttttgtttttgtttcacattcttccccctccacaagccaaagtcgtttcatttggtttccactgtgtggactgtgctggagcttggcgcctgccagaaaaatttggggctaggcaagccccaggttgcagacatggtgaagcagagaaactgttcttctggttcctgcacaacctcagaggggcaaaaaccctccccaggaaggaggagggtgttcaggagccagacttttggagagaaggcagctcccagcctgctgggtgaccgccattctgcgtgtgttccccagctgggcagggctggaagccttacgtatgaagcatggagaagcagccattgtccccactatgggcagaggggggacccggctggccccttgggtcagactggagccaacaccgccagccaccccctctggcctgctggcaatgccacaggtgcccaagaagatggaggatccctgtgccaggagccaacctggtcttcccgagggtcagtgccccagtgaagacagaagcgagagaataaagttccctgtaggtcctctgtcacctttgggttgtgtttttcaattgttgacatttcagaggggaccctccagaagcccagccggcttcccccaaggactcccccttcgctgggagtggatttccacacgtgcctttgatttcggacagattgggcctcacagccaccgattcagctgccagggtccctggactgggggttggtgttttctatagaggaggaaaggccctccctcaccctgctccccacccaggcagggcagcatgggacccagtgtctcagtgccttcaaaacccacccccacccctaccctaccccaccacaccccatcccagaggccttgcctgggcaaccctaagcccctgtccctcgccatacactgatgcctggcagctagagcaaatggctcgtgttctttgtcgaaggcctgtggtgagattgttttgtttccttttgttttgtgagtttgtttaaaattgaaattagttattttcttctgctggacagtattaaatagagcaggatgttgagttaatctgctagattgcagtactaatggtagtggtttagtgtcttcatgttaatattatttgtacttatttgaacaataatgataaagaagtggttcattattttttaattaatgcactttaaataaggtagaatggaaaaaacccagagagcaaagtgcattacttaaagatgcagtatatacttttctcatttttaaacagcacatatttattaagagaaaaaaagtaatttatgactatttaaaataaaatttaaaagtagagtgactgtcaggtaaagaaccttcaatgtagctatcttccagggggagggccctgcagcctcgctcctcagatgtctgcactgagccagttcagtcactagtgcgccagccaggccaggagggagtgcagagcatgtctgccaagcacagagcatctcagttggactggaccacagtgctcccgagagcctgcctttcctgcccttccccaccacctgcactgccccccacattctcccagccccccccaaggaccccctctccttgacccccagtgctgtaagtaatagagtcattaaaatgcaggactgaaagagacctcagaggtctctatcccatcccttcctgttactgcggcccaaggacaggaaacaacttttccaaaatcccacagctagttaatgacagatctccccactacattaatcccgtgctcctcctcactgccattatagtttattgtgtggtcatgtttacattgtgacatccagccccaaggatggctgggagttgctcaggcatccaggaaaagtggggaatgctgccatctggtgacagcatgtagatttgggcagtgaacagggattgccatgccccagtcttcgcacctcgccccctcaccccctaactcacagcacaaaccctgcaaacccaaagagaatattaatacttgaagcaagaagggtgcatgccagtccttctccgacatggccagggggtaccaggccttgtgcgcctggcctcctagccctagccagggcgagagggcctttcccttgagctactgagctgctttgtgatgctgaaggatactgccggcagcaggcagaggagggagggggcctagggctctgacccatctggaggaaaaccagatcggactaaaaaaggaaaaagaaaaacaaaatctccgcagtgtccaaacctagtttcccatgagttgcgactgaaaatgtgaaacgacactgtattgctgtatactgcaactttaaccataatgagcccttctgaggtcattattgaggttcatataatgcccgaagatgcagcatttggtgctttgttttcctttccgtttcaagacctttttcttttattgcaaggggaaaaaaatgtcatctccccccacctcatccctctttgtgacagcagacctggctgtgttgcccctctcctcctcactattctcaccaggccatgggactttgggggcagtgagagagagctggaaaggggcaaccctgagcagcaggtgtgccccatgccctgtgggtttcccctatgtccaatgactgtagacgggctgtcttgccaggcctcagccccgtctaccctaagcctggccccaaaggtttctctttcttcctccttgattttccatcttgacgaaggcattatatagaatcattttaatcactttcagatgttagagcagcgtattttacaggcatttatatccattgctttcctcagcaaggcatgttactacttttatcatctaaggaaaaaagacaagggaattccagtcaggcattattttcctattactagtgtttgcagaataggtgtaggactatttaagtttagaccttggtttggtagttcttgtttttaataaggggaaaaagataaaataacccctatttttcctgttattgtatttaactaatatattatttctttaaggttactcacttcccctacccctccaaataccttgcattctcaatcaaaaatggaaacaatctgagagacaggaaaagtgcaatattaccaagatggatgccagggctcattggggacaatggagggaataccagtggcgctcagagagcaagaggcagggagcggggtgctgaaggaatcctagctgtggaacaggtgggtgggttggtggagtttgatcttgtggcgttctcctctcccccttctttgggaagatgataggggtccctgccagatccacccagaagaaagggattcaggcatggggcccttgacctctaggccccagtccctggagcagaggcaggccctcgggagctgttccttgttttgatttctgttgtggtgcagccagctgctcagagagacctggcctaaaaatgactcccagcagccctctctcaccccagtgtcctgatatttgggctgtgatccttctggtgtatgtttgaatctttctaaaactgggtgccctcagttcagtttctaggcaggaagcctagaagtcaccagatctttttgggggatgtgagaaccttgagccgcgcacaccctggtgagacaccaattcccacaagcctgcagcagggcctggggctgagcctgggctgcccattcatctcagcgacttcagcctgagaagtgagccctgcctgggctccacacccagagagtccatacaaattctgctccgggaagagtcggggggtctattcaagtttctctgcagacaaaacttcccacaacaggtaccaatctggcctccttcctcagcaccggtagagaaagcaacagaatgggaagtttcctctgggttggagcctcagagctctgcccctcaaggtgacagggacgtccctgtggcttgttccctccacctccagtactgtatgcttgctacttcaaccccctatttggtgaatttctgcacagacacagatctctgtgcctggaatgggactgtgccctgtgcgggtctctcccttggcgtatatccatctagatatttagtctttgagaatctcaaagcagagctctctgggaagagaactgtccacattgctaaataattaagattccctcacttttttgagggccatgtgttgtgagagagagagagagagagagagtgtgtgtgtgtgtgtgtgtgtgtgtgtgtctgtgtatgcaagtgttggtaacttcccacttgaactaaataacatggggttagagaaaaaaaaataccaggcaagctgtctccattgaacaagtccttggcaatgggcaggtcccaagggactcacagcttctggcagcaagtgtgtcattcacacacatcattctggctggagagtgcaatgtgtcatttttttttctttttgtaattattttattaagtatttagttggaaatttcacactggcattaacaggtctagcataagtggcctaggcagtcatcccaggctccaaaatgaagatgtgcaaaagagatgccactgggaatagaaacactgagttggttcagttaggtcatcccctgcagacgtgtcatcgagcaggctgactcccacccctcagccatgccatgggtatgagaagccccttataatgaaagctgccagccctttcgtccttgtttcagagggtgggtcaggtggttggggtgagaacttgctcacggtgcacccaacaagacctgcaggtgcatataagtttagtcccaactgcagggccagaccaaacacttcctgggaagtgtgtggagggctgtgctagaccttcctgagtttctggctaaatcatcagccctgtttggtgcagtctcatgtctctgtggttcccaagctgcatgatcagagccagtgagaagacaggatcagtgacccacagctttggggaaaaacagccccactgttaacttccctcctgcaaacctgggtccccaggccataaggtgggcacactggtgcttacagactgggtggagagccctaccttccaaggtcttgatcccagcctgcctataaggttgggattagcatgcaatcccccttccccaatcctgtctttttaaaatctcaagtttgcacttaaccttgacaacagcaccctctcctactccagtcctagaactcagtggccttagagaatggggtcccctgcactgaaggtccccgccttgctcccagttccatcctggccaataggctgcgcctcaagaggtgaaagagaaaaaagggagggagggaggaagaattatttagaacaaaaggatggctcgagcacgttagaggcaagtgagaggcacgttggtgagaagagcatgtgcatgtttggggtagctggggcctactgtcccttcattagggaaggaggcttccagaagcggatgtcttctagaaagaaaaattgtgtgaaggctgaaaaggggcttggagttttgtctttgttgattagaaagaaggaagaagtcagctctgagtgtttcaggaagaagagagcaggtagaaagggaatttagtgatttaacacccaagggtccagccatagcaggttggaaaatcctccaaatttggccacagaaactggctaggaaaaaactgccactcattgggccacacgctgggtccccatcagttctcaatgaatggtcattgatttacttagcagagagaagtcaccagccacaaaccaatctttgagtttgcaggccctgattccagaatatatgcatccagctcccgggttctcagctggttttgcccacttccctttgactgtccaatccaaagccagtctctcaagttgtatggctcaaagagcagtgaccacaatgggtcatacagtagggacccacctccacaaattagaaccagagttcagactccattgggcacatctgggaggaaggcaacctcctttgtcgtcttgttggtaccagtcattctcaagtatctctgacacctgtggtggttcagtttgctgagcctgccacctggtatgaattagactgggtgtgatgaacattcatccatggatataccctaccattttgcgttgccttataaccaaggcacactccccataagagtttactgcagagaaagaacagcaaaacagccaccctccttgaatttacaactcattatctgcaacaggttttctttaaatccaagacacaggatgggaaatgggtttccccaccaggtactcagaggtctgcaggaagtgactcccgggcaaggcagacttcagtaatccctgaagcgtgagcatgtggactgcatggctgggtggggactggtggatgtctctggagctccagaaccttggagaattcctcatggaattcccctcccagctcttagtgggctctgtggggtcaggaggagcccttcctccaggttttccttctttcctcctcagcagagaaactggagaaaggacattaaactcagtgcagtcgatttgagtgctgaaatatttccagaatcaatggtggtgctaaactatctccatgtttctagcatttttaatagtggagttggtttgtttttaatctcatcacaaaaatgcagtgcccttggggaagggaccagccccttggcctgccactttccaggtgtcctttatcactttgacgggactctttggtctgcagaaaatgctctgtcttggcatgcttctagactgtaagatttgggttttgttttgtattttatgtttacatgcatcttatatttccctgaaaactaaataaagttttgggcctttttaaccgaac

SEQ ID NO: 8368 - protein, 1105 aa, Homo sapiens; identical to SEQ ID NO: 1220

SEQ ID NO: 8369 - DNA, 360 bp, Homo sapiens
ggcacttgtccggctgcccccccacatctcacagtgtgacgaagtcttccggttcttcgaggctcgacccgaggatgtcaaccctccaaaagaggactatggcagttccaagaggaaatcaggtgccgacgccaccgccgagcccatgatcctggaacagtacgtggtggtgtccaactataagaagcaggagaactcggagctgagcctccaggccggggaggtggtggatgtcatcgagaagaacgagagcggctggtggttcgtgagcacttctgaggagcagggctgggtccctgccacctacctggaggcccagaatggtactcgggatgactccgacatcaacacctctaagac

SEQ ID NO: 8370 - protein, 70 aa, Homo sapiens
MILEQYVVVSNYKKQENSELSLQAGEVVDVIEKNESGWWFVSTSEEQGWVPATYLEAQNGTRDDSDINTS

SEQ ID NO: 8371 - DNA, 404 bp, Homo sapiens
agacgggagctctttcaggccagtggtttgttgttcatcaagatatccaagtacccggcaacattcctggcatataataggaaggcagatctggtgaatgaatgaatgaatggcggtatctggagcagagacaatgaatttcatgtttaacagaggtgtcttcaaggagatgaaacaattcagaatgacctaggcaatggggtaattcctaaggaacaagctattcattcatacagcatggacgaatattaaatgcatgttgctgagtgaaagaagccagaatgataaggctacatcctggaaaagtttatattctggaaaaggcaaaacttatagagacagaaacaaatcagccagttgttgctggggtttgggagagaagaatgttgactatgtgaagaaca

SEQ ID NO: 8372 - protein, 48 aa, Homo sapiens
MLLSERSQNDKATSWKSLYSGKGKTYRDRNKSASCCWGLGEKNVDYVK

SEQ ID NO: 8373 - DNA, 1824 bp, Homo sapiens
gggagggagacaggcggcggcggcggcgccccagacccgaggggacgcgcgggccttgcgccgcgggagcggacggcggcggaggagaccctaggctcgcggcccgaggcgggagggctcggcttctcgactgcccgcctccgaggccgccggccgcttctctctcccagagtggccgccgcccctggagactcgccgtgacacgggcctaagccgccgccgcgggagtcctgaccgctcggacccgtcggatcaggccgggtgggagcgagcttgcgggcaggtgccgctcccggagggtgggccggaggcgaggcgcccaccgcgcggctcgcgggccgggctcggcggaggggccgctcgcgcagcacccccaccgcgggccggagcccgggtcgccgccccgccttctcccgggaccgcccggccggagctgcgggggccgagggacgccgcgcccgccgccgccagccgggctcgcgcgggagagcagggaagagaaactttgccttttattgtttttagtccttaagtgcaaggaactctgtgttgggaggaaaaatgtccttcttcaatttccgtaagatcttcaagttggggagcgagaagaagaagaagcagtacgaacacgtgaagagggacctgaaccccgaagacttttgggagattataggagaactgggcgacggagcctttgggaaagtgtacaaggcccagaataaagagaccagtgttttagctgctgcaaaagtgattgacactaaatctgaagaagaacttgaagattacatggtagagattgacatattagcatcttgtgatcacccaaatatagtcaagcttctagatgccttctattatgagaacaatctttggatcctcattgaattttgtgcaggtggagcagtagatgctgtgatgcttgaacttgagagaccattaactgagtcccaaatacaagtagtttgcaagcagactttagatgcattgaactacttacatgataataagatcatccacagagatctgaaggctggcaacattctctttaccttagatggagatatcaaattggcggattttggagtatcagctaaaaacacgaggacaattcaaagaagagattcctttattggtacaccatattggatggctcctgaagtagtcatgtgtgaaacatctaaggacagaccctatgactacaaagctgatgtttggtccctgggtatcactttaatagaaatggctgagatagaaccacctcatcatgaattaaatccaatgcgagtgctgctaaaaatagcaaaatctgagccacctacattagcacagccatccagatggtcttcaaattttaaggactttctaaagaaatgcttagaaaagaatgtggatgccaggtggactacatctcagctgctgcagcatccctttgttactgttgattccaacaaacccatccgagaattgattgcagaggcgaaggctgaagtaacagaagaagttgaagatggcaaagaggaagatgaagaggaggaaacagaaaattctctgccaatacctgcaagtaagcgtgcatcttctgaccttagtatcgccagctctgaagaagataaactttcacaaaatgcttgtattttggagtctgtctcagaaaaaacagaacgtagtaactctgaagataaactcaacagcaaaattcttaatgaaaaacccaccactgatgaacctgaaaaggctgtggaggatattaatgaacatattaccgatgctcagttagaagcaatgactgaactccatgacagaacagcagtaatcaaggag

SEQ ID NO: 8374 - protein, 420 aa, Homo sapiens
MSFFNFRKIFKLGSEKKKKQYEHVKRDLNPEDFWEIIGELGDGAFGKVYKAQNKETSVLAAAKVIDTKSEEELEDYMVEIDILASCDHPNIVKLLDAFYYENNLWILIEFCAGGAVDAVMLELERPLTESQIQVVCKQTLDALNYLHDNKIIHRDLKAGNILFTLDGDIKLADFGVSAKNTRTIQRRDSFIGTPYWMAPEVVMCETSKDRPYDYKADVWSLGITLIEMAEIEPPHHELNPMRVLLKIAKSEPPTLAQPSRWSSNFKDFLKKCLEKNVDARWTTSQLLQHPFVTVDSNKPIRELIAEAKAEVTEEVEDGKEEDEEEETENSLPIPASKRASSDLSIASSEEDKLSQNACILESVSEKTERSNSEDKLNSKILNEKPTTDEPEKAVEDINEHITDAQLEAMTELHDRTAVIK

SEQ ID NO: 8375 - DNA, 2394 bp, Homo sapiens
gggagacaggcggcggcggcggcgccccagacccgaggggacgcgcgggccttgcgccgcgggagcggacggcggcggaggagaccctaggctcgcggcccgaggcgggagggctcggcttctcgactgcccgcctccgaggccgccggccgcttctctctcccagagtggccgccgcccctggagactcgccgtgacacgggcctaagccgccgccgcgggagtcctgaccgctcggacccgtcggatcaggccgggtgggagcgagcttgcgggcaggtgccgctcccggagggtgggccggaggcgaggcgcccaccgcgcggctcgcgggccgggctcggcggaggggccgctcgcgcagcacccccaccgcgggccggagcccgggtcgccgccccgccttctcccgggaccgcccggccggagctgcgggggccgagggacgccgcgcccgccgccgccagccgggctcgcgcgggagagcagggaagagaaactttgccttttattgtttttagtccttaagtgcaaggaactctgtgttgggaggaaaaatgtccttcttcaatttccgtaagatcttcaagttggggagcgagaagaagaagaagcagtacgaacacgtgaagagggacctgaaccccgaagacttttgggagattataggagaactgggcgacggagcctttgggaaagtgtacaaggcccagaataaagagaccagtgttttagctgctgcaaaagtgattgacactaaatctgaagaagaacttgaagattacatggtagagattgacatattagcatcttgtgatcacccaaatatagtcaagcttctagatgccttctattatgagaacaatctttggatcctcattgaattttgtgcaggtggagcagtagatgctgtgatgcttgaacttgagagaccattaactgagtcccaaatacaagtagtttgcaagcagactttagatgcattgaactacttacatgataataagatcatccacagagatctgaaggctggcaacattctctttaccttagatggagatatcaaattggcggattttggagtatcagctaaaaacacgaggacaattcaaagaagagattcctttattggtacaccatattggatggctcctgaagtagtcatgtgtgaaacatctaaggacagaccctatgactacaaagctgatgtttggtccctgggtatcactttaatagaaatggctgagatagaaccacctcatcatgaattaaatccaatgcgagtgctgctaaaaatagcaaaatctgagccacctacattagcacagccatccagatggtcttcaaattttaaggactttctaaagaaatgcttagaaaagaatgtggatgccaggtggactacatctcagctgctgcagcatccctttgttactgttgattccaacaaacccatccgagaattgattgcagaggcgaaggctgaagtaacagaagaagttgaagatggcaaagaggaagatgaagaggaggaaacagaaaattctctgccaatacctgcaagtaagcgtgcatcttctgaccttagtatcgccagctctgaagaagataaactttcacaaaatgcttgtattttggagtctgtctcagaaaaaacagaacgtagtaactctgaagataaactcaacagcaaaattcttaatgaaaaacccaccactgatgaacctgaaaaggctgtggaggatattaatgaacatattaccgatgctcagttagaagcaatgactgaactccatgacagaacagcagtaatcaaggagaatgaaagagagaagaggcccaagcttgaaaatctgcctgacacagaagaccaagaaactgtggacattaattcagtcagtgaaggaaaagagaataatataatgataaccttagaaacaaatattgaacataatctaaaatctgaggaagaaaaggatcaggaaaagcaacagatgtttgaaaataagcttataaaatctgaagaaattaaagatactattttgcaaacagtagatttagtttctcaagagactggagaaaaagaggcaaatattcaggcagttgatagtgaagttgggcttacaaaggaagacacccaagagaaattgggggaagacgacaaaactcaaaaagatgtgatcagcaatacaagtgatgtgataggaacatgtgaggcagcagatgtggctcagaaagtggatgaagacagtgctgaggatacgcagagtaatgatgggaaagaagtggtcgaagtaggccagaaattaattaataagcccatggtgggtcctgaggctggtggtactaaggaagttcctattaaagaaatagttgaaatgaatgaaatagaag

SEQ ID NO: 8376 - protein, 611 aa, Homo sapiens
MSFFNFRKIFKLGSEKKKKQYEHVKRDLNPEDFWEIIGELGDGAFGKVYKAQNKETSVLAAAKVIDTKSEEELEDYMVEIDILASCDHPNIVKLLDAFYYENNLWILIEFCAGGAVDAVMLELERPLTESQIQVVCKQTLDALNYLHDNKIIHRDLKAGNILFTLDGDIKLADFGVSAKNTRTIQRRDSFIGTPYWMAPEVVMCETSKDRPYDYKADVWSLGITLIEMAEIEPPHHELNPMRVLLKIAKSEPPTLAQPSRWSSNFKDFLKKCLEKNVDARWTTSQLLQHPFVTVDSNKPIRELIAEAKAEVTEEVEDGKEEDEEEETENSLPIPASKRASSDLSIASSEEDKLSQNACILESVSEKTERSNSEDKLNSKILNEKPTTDEPEKAVEDINEHITDAQLEAMTELHDRTAVIKENEREKRPKLENLPDTEDQETVDINSVSEGKENNIMITLETNIEHNLKSEEEKDQEKQQMFENKLIKSEEIKDTILQTVDLVSQETGEKEANIQAVDSEVGLTKEDTQEKLGEDDKTQKDVISNTSDVIGTCEAADVAQKVDEDSAEDTQSNDGKEVVEVGQKLINKPMVGPEAGGTKEVPIKEIVEMNEI

SEQ ID NO: 8377 - DNA, 6128 bp, Homo sapiens
gagacaggcggcggcggcggcgccccagacccgaggggacgcgcgggccttgcgccgcgggagcggacggcggcggaggagaccctaggctcgcggcccgaggcgggagggctcggcttctcgactgcccgcctccgaggccgccggccgcttctctctcccagagtggccgccgcccctggagactcgccgtgacacgggcctaagccgccgccgcgggagtcctgaccgctcggacccgtcggatcaggccgggtgggagcgagcttgcgggcaggtgccgctcccggagggtgggccggaggcgaggcgcccaccgcgcggctcgcgggccgggctcggcggaggggccgctcgcgcagcacccccaccgcgggccggagcccgggtcgccgccccgccttctcccgggaccgcccggccggagctgcgggggccgagggacgccgcgcccgccgccgccagccgggctcgcgcgggagagcagggaagagaaactttgccttttattgtttttagtccttaagtgcaaggaactctgtgttgggaggaaaaatgtccttcttcaatttccgtaagatcttcaagttggggagcgagaagaagaagaagcagtacgaacacgtgaagagggacctgaaccccgaagacttttgggagattataggagaactgggcgacggagcctttgggaaagtgtacaaggcccagaataaagagaccagtgttttagctgctgcaaaagtgattgacactaaatctgaagaagaacttgaagattacatggtagagattgacatattagcatcttgtgatcacccaaatatagtcaagcttctagatgccttctattatgagaacaatctttggatcctcattgaattttgtgcaggtggagcagtagatgctgtgatgcttgaacttgagagaccattaactgagtcccaaatacaagtagtttgcaagcagactttagatgcattgaactacttacatgataataagatcatccacagagatctgaaggctggcaacattctctttaccttagatggagatatcaaattggcggattttggagtatcagctaaaaacacgaggacaattcaaagaagagattcctttattggtacaccatattggatggctcctgaagtagtcatgtgtgaaacatctaaggacagaccctatgactacaaagctgatgtttggtccctgggtatcactttaatagaaatggctgagatagaaccacctcatcatgaattaaatccaatgcgagtgctgctaaaaatagcaaaatctgagccacctacattagcacagccatccagatggtcttcaaattttaaggactttctaaagaaatgcttagaaaagaatgtggatgccaggtggactacatctcagctgctgcagcatccctttgttactgttgattccaacaaacccatccgagaattgattgcagaggcgaaggctgaagtaacagaagaagttgaagatggcaaagaggaagatgaagaggaggaaacagaaaattctctgccaatacctgcaagtaagcgtgcatcttctgaccttagtatcgccagctctgaagaagataaactttcacaaaatgcttgtattttggagtctgtctcagaaaaaacagaacgtagtaactctgaagataaactcaacagcaaaattcttaatgaaaaacccaccactgatgaacctgaaaaggctgtggaggatattaatgaacatattaccgatgctcagttagaagcaatgactgaactccatgacagaacagcagtaatcaaggagaatgaaagagagaagaggcccaagcttgaaaatctgcctgacacagaagaccaagaaactgtggacattaattcagtcagtgaaggaaaagagaataatataatgataaccttagaaacaaatattgaacataatctaaaatctgaggaagaaaaggatcaggaaaagcaacagatgtttgaaaataagcttataaaatctgaagaaattaaagatactattttgcaaacagtagatttagtttctcaagagactggagaaaaagaggcaaatattcaggcagttgatagtgaagttgggcttacaaaggaagacacccaagagaaattgggggaagacgacaaaactcaaaaagatgtgatcagcaatacaagtgatgtgataggaacatgtgaggcagcagatgtggctcagaaagtggatgaagacagtgctgaggatacgcagagtaatgatgggaaagaagtggtcgaagtaggccagaaattaattaataagcccatggtgggtcctgaggctggtggtactaaggaagttcctattaaagaaatagttgaaatgaatgaaatagaagaaggtaaaaataaggaacaagcaataaacagttcagagaacataatggacatcaatgaggaaccaggaacaactgaaggtgaagaaatcactgagtcaagtagcactgaagaaatggaggtcagaagtgtggtggctgatactgaccaaaaggctttaggaagtgaagttcaggatgcttctaaagtcactactcagatagataaagagaaaaaagaaattccagtgtcaattaaaaaagagcctgaagttactgtagtttcacagcccactgaacctcagcctgttctaatacccagtattaatatcaactctgacagtggagaaaataaagaagaaataggttctttatcaaaaactgaaactattctgccaccagaatctgagaatccaaaggaaaatgataatgattcaggcactggttccactgctgatactagcagtattgacttgaatttatccatctctagctttctaagtaaaactaaagacagtggatcgatatctttacaagaaacaagaagacaaaagaaaacattgaagaaaacacgcaaatttattgttgatggtgtagaagtgagtgtaacaacatcaaagatagttacagatagtgattccaaaactgaagaattgcggtttcttagacgtcaggaacttcgggaattaagatttcttcagaaagaagagcaaagagcccaacaacagctcaatagcaaactacagcaacaacgagaacaaattttccggcgctttgagcaggaaatgatgagtaaaaagcgacaatatgaccaggaaattgagaatctagaaaaacagcagaaacagactatcgaacgcctggaacaagagcacacaaatcgcttgcgagatgaagccaaacgcatcaaaggagaacaagagaaagagttgtccaaatttcagaatatgctgaagaaccgaaagaaggaggttataaatgaagtggagaaagcacccaaagagctgagaaaagagctcatgaaacgcaggaaagaggagcttgcacaaagccagcatgctcaggaacaagagtttgttcagaaacaacagcaagaattagatggctctctgaaaaagatcatccagcagcagaaggcagagttagctaatattgagagagagtgcctgaataacaagcaacagctcatgagagctcgagaagctgcaatttgggagctcgaagaacgacacttacaagaaaaacaccagctgctcaaacagcagcttaaagatcagtatttcatgcaaagacatcagctacttaagcgccacgagaaggaaacagagcaaatgcagcgttacaatcaaagacttattgaggaattgaaaaacagacagactcaagaaagagcaagactgcccaagattcagcgcagtgaagccaagactcgaatggccatgtttaagaagagtttgagaattaactcaacagccacaccagatcaggaccgtgataaaattaaacagtttgctgcacaagaagaaaagaggcagaaaaatgagagaatggctcagcatcagaaacatgagaatcaaatgcgagatcttcagttgcagtgtgaagccaatgtccgcgaactgcatcagctgcagaatgaaaaatgccacttgttggttgagcatgagactcagaaactgaaggagttagatgaggaacatagccaagaattaaaggagtggagagagaaattgagacctaggaaaaagacactggaagaagagtttgccaggaaactacaggaacaggaagtattctttaaaatgactggggagtctgaatgccttaacccatcaacacagagccggatttccaaattttatcctattcccagcttgcattccaccggatcataacaaagggaagcattctgtgcgtgggtttggctctttcagtatgtcattctgttctcatcttctgccacagtctctcagatagctcatgaagacaatcacctgcctcaccttctaggtgttttccttttttgttttttttgttttgttttgtttttaagcaaagatgaagggaaaacgaactaagacagacgctaggccatgttggcaaagtagcatcttggtgactaaggtgactttgtatattcatcttaaaaattatgttctttagacactgctacctgaaaactgttggagaaataatgtttaaagttatttaagaaaaactgttacatcactaagtattaataaattcttcttacctgacgtaacttctcaatgcctaaattctgtagttgaagctctgctgcagagagttgggataattttcttttggtggatcagctctcataaaaaagctatgatttgctcaaatatgctgttgactcagtaaatgaatatatttttttctttaaataggaacaacctcttttaaaagagaaaaattatttcagtgatttgtcaaaacgaattacctcttttggcatgagctaataattgagggtgctaattttcttaagatagtgcctaaaacactaaatttcagtcaagtcgtaagtaggattttctttttgatcaacagggacaaaaacatctttagaattaaaaacatggttgttttggaatttttgcttctcttaccgtttgatagaaattttcatcctaaaatacatgtacaaagtttggaaagatgaaaaaaagaggtagcttttagattgcaaactggaaatgtaaaactcatgaaatttaagcaatataggtttagctatctgtgtttattttctaaaataatacctgagctggttaaatgatttctctccatcttagctaattctgtttaaaactctgtcagaggcctgcaggctgtgagttatatttataaatatatcttcagaaattaatcttaaaagaggcattagttcagaatacttttttaaaagtttaaattaaatatttaggcacgtcaggaattacttttccttattttgaaatgaggctacttatgtcttggttttattttgttccatgtttaaatcattcactttgatttgagtgggaaaagcctgaagcctttatcatgtggttgctggtgtgtgtaattattaatgaaatgttcactcctagtcccttatgaggcttagaatttcaaccacgtgtcaggtcagacagtattataaactgtactttgctgtctgagacagcacatttgtgaatgatgcttgctgcctgccattttcaacctattctctcttaagagtgctaggtaccaaattgtgaaagtttgttttcagttatattacttttgaggctggtgaaaaatttaaatgtaactttgtgggaacactgattcatatttagaaaatgtaaatgtctgtagcactttcttgcagttaatttgaaaactttggatgctgaaccttgtttgtcagtgatttagatgatttaaaaatgcatgtgtgatttgaattttataattgttttgacaagcataatttacttggacaacttcgtaggtagccttaacttctggccaagtttgttttttatataaatatatatacatatatacatattatgtatggttgtaaattcatacacttatcacatgaatgtgttactgtatacaaaactcttaatgctttattctcaaatgctgggttgaaaaatgttttgaaagccttttaaaatatatatctttataaagtaatattcaggatgatgataaaaattgtttatattgttatgataaaaatgacagtataatgttg

SEQ ID NO: 8378 - protein, 1235 aa, Homo sapiens; identical to SEQ ID NO: 1222

SEQ ID NO: 8379 - DNA, 6035 bp, Homo sapiens
gagacaggcggcggcggcggcgccccagacccgaggggacgcgcgggccttgcgccgcgggagcggacggcggcggaggagaccctaggctcgcggcccgaggcgggagggctcggcttctcgactgcccgcctccgaggccgccggccgcttctctctcccagagtggccgccgcccctggagactcgccgtgacacgggcctaagccgccgccgcgggagtcctgaccgctcggacccgtcggatcaggccgggtgggagcgagcttgcgggcaggtgccgctcccggagggtgggccggaggcgaggcgcccaccgcgcggctcgcgggccgggctcggcggaggggccgctcgcgcagcacccccaccgcgggccggagcccgggtcgccgccccgccttctcccgggaccgcccggccggagctgcgggggccgagggacgccgcgcccgccgccgccagccgggctcgcgcgggagagcagggaagagaaactttgccttttattgtttttagtccttaagtgcaaggaactctgtgttgggaggaaaaatgtccttcttcaatttccgtaagatcttcaagttggggagcgagaagaagaagaagcagtacgaacacgtgaagagggacctgaaccccgaagacttttgggagattataggagaactgggcgacggagcctttgggaaagtgtacaaggcccagaataaagagaccagtgttttagctgctgcaaaagtgattgacactaaatctgaagaagaacttgaagattacatggtagagattgacatattagcatcttgtgatcacccaaatatagtcaagcttctagatgccttctattatgagaacaatctttggatcctcattgaattttgtgcaggtggagcagtagatgctgtgatgcttgaacttgagagaccattaactgagtcccaaatacaagtagtttgcaagcagactttagatgcattgaactacttacatgataataagatcatccacagagatctgaaggctggcaacattctctttaccttagatggagatatcaaattggcggattttggagtatcagctaaaaacacgaggacaattcaaagaagagattcctttattggtacaccatattggatggctcctgaagtagtcatgtgtgaaacatctaaggacagaccctatgactacaaagctgatgtttggtccctgggtatcactttaatagaaatggctgagatagaaccacctcatcatgaattaaatccaatgcgagtgctgctaaaaatagcaaaatctgagccacctacattagcacagccatccagatggtcttcaaattttaaggactttctaaagaaatgcttagaaaagaatgtggatgccaggtggactacatctcagctgctgcagcatccctttgttactgttgattccaacaaacccatccgagaattgattgcagaggcgaaggctgaagtaacagaagaagttgaagatggcaaagaggaagatgaagaggaggaaacagaaaattctctgccaatacctgcaagtaagcgtgcatcttctgaccttagtatcgccagctctgaagaagataaactttcacaaaatgcttgtattttggagtctgtctcagaaaaaacagaacgtagtaactctgaagataaactcaacagcaaaattcttaatgaaaaacccaccactgatgaacctgaaaaggctgtggaggatattaatgaacatattaccgatgctcagttagaagcaatgactgaactccatgacagaacagcagtaatcaaggagaatgaaagagagaagaggcccaagcttgaaaatctgcctgacacagaagaccaagaaactgtggacattaattcagtcagtgaaggaaaagagaataatataatgataaccttagaaacaaatattgaacataatctaaaatctgaggaagaaaaggatcaggaaaagcaacagatgtttgaaaataagcttataaaatctgaagaaattaaagatactattttgcaaacagtagatttagtttctcaagagactggagaaaaagaggcaaatattcaggcagttgatagtgaagttgggcttacaaaggaagacacccaagagaaattgggggaagacgacaaaactcaaaaagatgtgatcagcaatacaagtgatgtgataggaacatgtgaggcagcagatgtggctcagaaagtggatgaagacagtgctgaggatacgcagagtaatgatgggaaagaagtggtcgaagtaggccagaaattaattaataagcccatggtgggtcctgaggctggtggtactaaggaagttcctattaaagaaatagttgaaatgaatgaaatagaagaaggtaaaaataaggaacaagcaataaacagttcagagaacataatggacatcaatgaggaaccaggaacaactgaaggtgaagaaatcactgagtcaagtagcactgaagaaatggaggtcagaagtgtggtggctgatactgaccaaaaggctttaggaagtgaagttcaggatgcttctaaagtcactactcagatagataaagagaaaaaagaaattccagtgtcaattaaaaaagagcctgaagttactgtagtttcacagcccactgaacctcagcctgttctaatacccagtattaatatcaactctgacagtggagaaaataaagaagaaataggttctttatcaaaaactgaaactattctgccaccagaatctgagaatccaaaggaaaatgataatgattcaggcactggttccactgctgatactagcagtattgacttgaatttatccatctctagctttctaagtaaaactaaagacagtggatcgatatctttacaagaaacaagaagacaaaagaaaacattgaagaaaacacgcaaatttattgttgatggtgtagaagtgagtgtaacaacatcaaagatagttacagatagtgattccaaaactgaagaattgcggtttcttagacgtcaggaacttcgggaattaagatttcttcagaaagaagagcaaagagcccaacaacagctcaatagcaaactacagcaacaacgagaacaaattttccggcgctttgagcaggaaatgatgagtaaaaagcgacaatatgaccaggaaattgagaatctagaaaaacagcagaaacagactatcgaacgcctggaacaagagcacacaaatcgcttgcgagatgaagccaaacgcatcaaaggagaacaagagaaagagttgtccaaatttcagaatatgctgaagaaccgaaagaaggaggaacaagagtttgttcagaaacaacagcaagaattagatggctctctgaaaaagatcatccagcagcagaaggcagagttagctaatattgagagagagtgcctgaataacaagcaacagctcatgagagctcgagaagctgcaatttgggagctcgaagaacgacacttacaagaaaaacaccagctgctcaaacagcagcttaaagatcagtatttcatgcaaagacatcagctacttaagcgccacgagaaggaaacagagcaaatgcagcgttacaatcaaagacttattgaggaattgaaaaacagacagactcaagaaagagcaagactgcccaagattcagcgcagtgaagccaagactcgaatggccatgtttaagaagagtttgagaattaactcaacagccacaccagatcaggaccgtgataaaattaaacagtttgctgcacaagaagaaaagaggcagaaaaatgagagaatggctcagcatcagaaacatgagaatcaaatgcgagatcttcagttgcagtgtgaagccaatgtccgcgaactgcatcagctgcagaatgaaaaatgccacttgttggttgagcatgagactcagaaactgaaggagttagatgaggaacatagccaagaattaaaggagtggagagagaaattgagacctaggaaaaagacactggaagaagagtttgccaggaaactacaggaacaggaagtattctttaaaatgactggggagtctgaatgccttaacccatcaacacagagccggatttccaaattttatcctattcccagcttgcattccaccggatcataacaaagggaagcattctgtgcgtgggtttggctctttcagtatgtcattctgttctcatcttctgccacagtctctcagatagctcatgaagacaatcacctgcctcaccttctaggtgttttccttttttgttttttttgttttgttttgtttttaagcaaagatgaagggaaaacgaactaagacagacgctaggccatgttggcaaagtagcatcttggtgactaaggtgactttgtatattcatcttaaaaattatgttctttagacactgctacctgaaaactgttggagaaataatgtttaaagttatttaagaaaaactgttacatcactaagtattaataaattcttcttacctgacgtaacttctcaatgcctaaattctgtagttgaagctctgctgcagagagttgggataattttcttttggtggatcagctctcataaaaaagctatgatttgctcaaatatgctgttgactcagtaaatgaatatatttttttctttaaataggaacaacctcttttaaaagagaaaaattatttcagtgatttgtcaaaacgaattacctcttttggcatgagctaataattgagggtgctaattttcttaagatagtgcctaaaacactaaatttcagtcaagtcgtaagtaggattttctttttgatcaacagggacaaaaacatctttagaattaaaaacatggttgttttggaatttttgcttctcttaccgtttgatagaaattttcatcctaaaatacatgtacaaagtttggaaagatgaaaaaaagaggtagcttttagattgcaaactggaaatgtaaaactcatgaaatttaagcaatataggtttagctatctgtgtttattttctaaaataatacctgagctggttaaatgatttctctccatcttagctaattctgtttaaaactctgtcagaggcctgcaggctgtgagttatatttataaatatatcttcagaaattaatcttaaaagaggcattagttcagaatacttttttaaaagtttaaattaaatatttaggcacgtcaggaattacttttccttattttgaaatgaggctacttatgtcttggttttattttgttccatgtttaaatcattcactttgatttgagtgggaaaagcctgaagcctttatcatgtggttgctggtgtgtgtaattattaatgaaatgttcactcctagtcccttatgaggcttagaatttcaaccacgtgtcaggtcagacagtattataaactgtactttgctgtctgagacagcacatttgtgaatgatgcttgctgcctgccattttcaacctattctctcttaagagtgctaggtaccaaattgtgaaagtttgttttcagttatattacttttgaggctggtgaaaaatttaaatgtaactttgtgggaacactgattcatatttagaaaatgtaaatgtctgtagcactttcttgcagttaatttgaaaactttggatgctgaaccttgtttgtcagtgatttagatgatttaaaaatgcatgtgtgatttgaattttataattgttttgacaagcataatttacttggacaacttcgtaggtagccttaacttctggccaagtttgttttttatataaatatatatacatatatacatattatgtatggttgtaaattcatacacttatcacatgaatgtgttactgtatacaaaactcttaatgctttattctcaaatgctgggttgaaaaatgttttgaaagccttttaaaatatatatctttataaagtaatattcaggatgatgataaaaattgtttatattgttatgataaaaatgacagtataatgttg

SEQ ID NO: 8380 - protein, 1204 aa, Homo sapiens
MSFFNFRKIFKLGSEKKKKQYEHVKRDLNPEDFWEIIGELGDGAFGKVYKAQNKETSVLAAAKVIDTKSEEELEDYMVEIDILASCDHPNIVKLLDAFYYENNLWILIEFCAGGAVDAVMLELERPLTESQIQVVCKQTLDALNYLHDNKIIHRDLKAGNILFTLDGDIKLADFGVSAKNTRTIQRRDSFIGTPYWMAPEVVMCETSKDRPYDYKADVWSLGITLIEMAEIEPPHHELNPMRVLLKIAKSEPPTLAQPSRWSSNFKDFLKKCLEKNVDARWTTSQLLQHPFVTVDSNKPIRELIAEAKAEVTEEVEDGKEEDEEEETENSLPIPASKRASSDLSIASSEEDKLSQNACILESVSEKTERSNSEDKLNSKILNEKPTTDEPEKAVEDINEHITDAQLEAMTELHDRTAVIKENEREKRPKLENLPDTEDQETVDINSVSEGKENNIMITLETNIEHNLKSEEEKDQEKQQMFENKLIKSEEIKDTILQTVDLVSQETGEKEANIQAVDSEVGLTKEDTQEKLGEDDKTQKDVISNTSDVIGTCEAADVAQKVDEDSAEDTQSNDGKEVVEVGQKLINKPMVGPEAGGTKEVPIKEIVEMNEIEEGKNKEQAINSSENIMDINEEPGTTEGEEITESSSTEEMEVRSVVADTDQKALGSEVQDASKVTTQIDKEKKEIPVSIKKEPEVTVVSQPTEPQPVLIPSININSDSGENKEEIGSLSKTETILPPESENPKENDNDSGTGSTADTSSIDLNLSISSFLSKTKDSGSISLQETRRQKKTLKKTRKFIVDGVEVSVTTSKIVTDSDSKTEELRFLRRQELRELRFLQKEEQRAQQQLNSKLQQQREQIFRRFEQEMMSKKRQYDQEIENLEKQQKQTIERLEQEHTNRLRDEAKRIKGEQEKELSKFQNMLKNRKKEEQEFVQKQQQELDGSLKKIIQQQKAELANIERECLNNKQQLMRAREAAIWELEERHLQEKHQLLKQQLKDQYFMQRHQLLKRHEKETEQMQRYNQRLIEELKNRQTQERARLPKIQRSEAKTRMAMFKKSLRINSTATPDQDRDKIKQFAAQEEKRQKNERMAQHQKHENQMRDLQLQCEANVRELHQLQNEKCHLLVEHETQKLKELDEEHSQELKEWREKLRPRKKTLEEEFARKLQEQEVFFKMTGESECLNPSTQSRISKFYPIPSLHSTGS

SEQ ID NO: 8381 - DNA, 6484 bp, Homo sapiens
gagacaggcggcggcggcggcgccccagacccgaggggacgcgcgggccttgcgccgcgggagcggacggcggcggaggagaccctaggctcgcggcccgaggcgggagggctcggcttctcgactgcccgcctccgaggccgccggccgcttctctctcccagagtggccgccgcccctggagactcgccgtgacacgggcctaagccgccgccgcgggagtcctgaccgctcggacccgtcggatcaggccgggtgggagcgagcttgcgggcaggtgccgctcccggagggtgggccggaggcgaggcgcccaccgcgcggctcgcgggccgggctcggcggaggggccgctcgcgcagcacccccaccgcgggccggagcccgggtcgccgccccgccttctcccgggaccgcccggccggagctgcgggggccgagggacgccgcgcccgccgccgccagccgggctcgcgcgggagagcagggaagagaaactttgccttttattgtttttagtccttaagtgcaaggaactctgtgttgggaggaaaaatgtccttcttcaatttccgtaagatcttcaagttggggagcgagaagaagaagaagcagtacgaacacgtgaagagggacctgaaccccgaagacttttgggagattataggagaactgggcgacggagcctttgggaaagtgtacaaggcccagaataaagagaccagtgttttagctgctgcaaaagtgattgacactaaatctgaagaagaacttgaagattacatggtagagattgacatattagcatcttgtgatcacccaaatatagtcaagcttctagatgccttctattatgagaacaatctttggatcctcattgaattttgtgcaggtggagcagtagatgctgtgatgcttgaacttgagagaccattaactgagtcccaaatacaagtagtttgcaagcagactttagatgcattgaactacttacatgataataagatcatccacagagatctgaaggctggcaacattctctttaccttagatggagatatcaaattggcggattttggagtatcagctaaaaacacgaggacaattcaaagaagagattcctttattggtacaccatattggatggctcctgaagtagtcatgtgtgaaacatctaaggacagaccctatgactacaaagctgatgtttggtccctgggtatcactttaatagaaatggctgagatagaaccacctcatcatgaattaaatccaatgcgagtgctgctaaaaatagcaaaatctgagccacctacattagcacagccatccagatggtcttcaaattttaaggactttctaaagaaatgcttagaaaagaatgtggatgccaggtggactacatctcagctgctgcagcatccctttgttactgttgattccaacaaacccatccgagaattgattgcagaggcgaaggctgaagtaacagaagaagttgaagatggcaaagaggaagatgaagaggaggaaacagaaaattctctgccaatacctgcaagtaagcgtgcatcttctgaccttagtatcgccagctctgaagaagataaactttcacaaaatgcttgtattttggagtctgtctcagaaaaaacagaacgtagtaactctgaagataaactcaacagcaaaattcttaatgaaaaacccaccactgatgaacctgaaaaggctgtggaggatattaatgaacatattaccgatgctcagttagaagcaatgactgaactccatgacagaacagcagtaatcaaggagaatgaaagagagaagaggcccaagcttgaaaatctgcctgacacagaagaccaagaaactgtggacattaattcagtcagtgaaggaaaagagaataatataatgataaccttagaaacaaatattgaacataatctaaaatctgaggaagaaaaggatcaggaaaagcaacagatgtttgaaaataagcttataaaatctgaagaaattaaagatactattttgcaaacagtagatttagtttctcaagagactggagaaaaagaggcaaatattcaggcagttgatagtgaagttgggcttacaaaggaagacacccaagagaaattgggggaagacgacaaaactcaaaaagatgtgatcagcaatacaagtgatgtgataggaacatgtgaggcagcagatgtggctcagaaagtggatgaagacagtgctgaggatacgcagagtaatgatgggaaagaagtggtcgaagtaggccagaaattaattaataagcccatggtgggtcctgaggctggtggtactaaggaagttcctattaaagaaatagttgaaatgaatgaaatagaagaaggtaaaaataaggaacaagcaataaacagttcagagaacataatggacatcaatgaggaaccaggaacaactgaaggtgaagaaatcactgagtcaagtagcactgaagaaatggaggtcagaagtgtggtggctgatactgaccaaaaggctttaggaagtgaagttcaggatgcttctaaagtcactactcagatagataaagagaaaaaagaaattccagtgtcaattaaaaaagagcctgaagttactgtagtttcacagcccactgaacctcagcctgttctaatacccagtattaatatcaactctgacagtggagaaaataaagaagaaataggttctttatcaaaaactgaaactattctgccaccagaatctgagaatccaaaggaaaatgataatgattcaggcactggttccactgctgatactagcagtattgacttgaatttatccatctctagctttctaagtaaaactaaagacagtggatcgatatctttacaagaaacaagaagacaaaagaaaacattgaagaaaacacgcaaatttattgttgatggtgtagaagtgagtgtaacaacatcaaagatagttacagatagtgattccaaaactgaagaattgcggtttcttagacgtcaggaacttcgggaattaagatttcttcagaaagaagagcaaagagcccaacaacagctcaatagcaaactacagcaacaacgagaacaaattttccggcgctttgagcaggaaatgatgagtaaaaagcgacaatatgaccaggaaattgagaatctagaaaaacagcagaaacagactatcgaacgcctggaacaagagcacacaaatcgcttgcgagatgaagccaaacgcatcaaaggagaacaagagaaagagttgtccaaatttcagaatatgctgaagaaccgaaagaaggaggaacaagagtttgttcagaaacaacagcaagaattagatggctctctgaaaaagatcatccagcagcagaaggcagagttagctaatattgagagagagtgcctgaataacaagcaacagctcatgagagctcgagaagctgcaatttgggagctcgaagaacgacacttacaagaaaaacaccagctgctcaaacagcagcttaaagatcagtatttcatgcaaagacatcagctacttaagcgccacgagaaggaaacagagcaaatgcagcgttacaatcaaagacttattgaggaattgaaaaacagacagactcaagaaagagcaagactgcccaagattcagcgcagtgaagccaagactcgaatggccatgtttaagaagagtttgagaattaactcaacagccacaccagatcaggaccgtgataaaattaaacagtttgctgcacaagaagaaaagaggcagaaaaatgagagaatggctcagcatcagaaacatgagaatcaaatgcgagatcttcagttgcagtgtgaagccaatgtccgcgaactgcatcagctgcagaatgaaaaatgccacttgttggttgagcatgagactcagaaactgaaggagttagatgaggaacatagccaagaattaaaggagtggagagagaaattgagacctaggaaaaagacactggaagaagagtttgccaggaaactacaggaacaggaagtattctttaaaatgactggggagtctgaatgccttaacccatcaacacagagccggatttccaaattttatcctattcccagcttgcattccaccggatcataacaaagggaagcattctgtgcgtgggtttggctctttcagtatgtcattctgttctcatcttctgccacagtctctcagatagctcatgaagacaatcacctgcctcaccttctaggtgttttccttttttgttttttttgttttgttttgtttttaagcaaagatgaagggaaaacgaactaagacagacgctaggccatgttggcaaagtagcatcttggtgactaaggtgactttgtatattcatcttaaaaattatgttctttagacactgctacctgaaaactgttggagaaataatgtttaaagttatttaagaaaaactgttacatcactaagtattaataaattcttcttacctgacgtaacttctcaatgcctaaattctgtagttgaagctctgctgcagagagttgggataattttcttttggtggatcagctctcataaaaaagctatgatttgctcaaatatgctgttgactcagtaaatgaatatatttttttctttaaataggaacaacctcttttaaaagagaaaaattatttcagtgatttgtcaaaacgaattacctcttttggcatgagctaataattgagggtgctaattttcttaagatagtgcctaaaacactaaatttcagtcaagtcgtaagtaggattttctttttgatcaacagggacaaaaacatctttagaattaaaaacatggttgttttggaatttttgcttctcttaccgtttgatagaaattttcatcctaaaatacatgtacaaagtttggaaagatgaaaaaaagaggtagcttttagattgcaaactggaaatgtaaaactcatgaaatttaagcaatataggtttagctatctgtgtttattttctaaaataatacctgagctggttaaatgatttctctccatcttagctaattctgtttaaaactctgtcagaggcctgcaggctgtgagttatatttataaatatatcttcagaaattaatcttaaaagaggcattagttcagaatacttttttaaaagtttaaattaaatatttaggcacgtcaggaattacttttccttattttgaaatgaggctacttatgtcttggttttattttgttccatgtttaaatcattcactttgatttgagtgggaaaagcctgaagcctttatcatgtggttgctggtgtgtgtaattattaatgaaatgttcactcctagtcccttatgaggcttagaatttcaaccacgtgtcaggtcagacagtattataaactgtactttgctgtctgagacagcacatttgtgaatgatgcttgctgcctgccattttcaacctattctctcttaagagtgctaggtaccaaattgtgaaagtttgttttcagttatattacttttgaggctggtgaaaaatttaaatgtaactttgtgggaacactgattcatatttagaaaatgtaaatgtctgtagcactttcttgcagttaatttgaaaactttggatgctgaaccttgtttgtcagtgatttagatgatttaaaaatgcatgtgtgatttgaattttataattgttttgacaagcataatttacttggacaacttcgtaggtagccttaacttctggccaagtttgttttttatataaatatatatacatatatacatattatgtatggttgtaaattcatacacttatcacatgaatgtgttactgtatacaaaactcttaatgctttattctcaaatgctgggttgaaaaatgttttgaaagccttttaaaatatatatctttataaagtaatattcaggatgatgataaaaattgtttatattgttatgataaaaatgacagtataatgttgcccagtgtatttaatgatttatttgaagagggattgggaaggaacgtcttcataccactttctcctttgaaattttcagtttattgacttttaaaaaatgaatacctcaggcagtagacattttttttctagtatcatttaattgataccctgtgcgctaaatagtgtgtggtgcctgattaatttggtctgaatatttgattctttctgttcctttcaacttgacattcagattattgactcaaggagagaggctcagagtggaatggttggcgctgtgggtaaggttggatctcccttaaaactgccttttggattcagtgtttgtgcttgagttcgctttcaaatatgaccataatcgtgtgggtgcaagactgtacagtgatacatatgtagaggtaaagcattcattttaatacttaaagttatataaatcttttcaaaaagtg

SEQ ID NO: 8382 - protein, 1204 aa, Homo sapiens; identical to SEQ ID NO: 8380

SEQ ID NO: 8383 - DNA, 7684 bp, Homo sapiens
gagacaggcggcggcggcggcgccccagacccgaggggacgcgcgggccttgcgccgcgggagcggacggcggcggaggagaccctaggctcgcggcccgaggcgggagggctcggcttctcgactgcccgcctccgaggccgccggccgcttctctctcccagagtggccgccgcccctggagactcgccgtgacacgggcctaagccgccgccgcgggagtcctgaccgctcggacccgtcggatcaggccgggtgggagcgagcttgcgggcaggtgccgctcccggagggtgggccggaggcgaggcgcccaccgcgcggctcgcgggccgggctcggcggaggggccgctcgcgcagcacccccaccgcgggccggagcccgggtcgccgccccgccttctcccgggaccgcccggccggagctgcgggggccgagggacgccgcgcccgccgccgccagccgggctcgcgcgggagagcagggaagagaaactttgccttttattgtttttagtccttaagtgcaaggaactctgtgttgggaggaaaaatgtccttcttcaatttccgtaagatcttcaagttggggagcgagaagaagaagaagcagtacgaacacgtgaagagggacctgaaccccgaagacttttgggagattataggagaactgggcgacggagcctttgggaaagtgtacaaggcccagaataaagagaccagtgttttagctgctgcaaaagtgattgacactaaatctgaagaagaacttgaagattacatggtagagattgacatattagcatcttgtgatcacccaaatatagtcaagcttctagatgccttctattatgagaacaatctttggatcctcattgaattttgtgcaggtggagcagtagatgctgtgatgcttgaacttgagagaccattaactgagtcccaaatacaagtagtttgcaagcagactttagatgcattgaactacttacatgataataagatcatccacagagatctgaaggctggcaacattctctttaccttagatggagatatcaaattggcggattttggagtatcagctaaaaacacgaggacaattcaaagaagagattcctttattggtacaccatattggatggctcctgaagtagtcatgtgtgaaacatctaaggacagaccctatgactacaaagctgatgtttggtccctgggtatcactttaatagaaatggctgagatagaaccacctcatcatgaattaaatccaatgcgagtgctgctaaaaatagcaaaatctgagccacctacattagcacagccatccagatggtcttcaaattttaaggactttctaaagaaatgcttagaaaagaatgtggatgccaggtggactacatctcagctgctgcagcatccctttgttactgttgattccaacaaacccatccgagaattgattgcagaggcgaaggctgaagtaacagaagaagttgaagatggcaaagaggaagatgaagaggaggaaacagaaaattctctgccaatacctgcaagtaagcgtgcatcttctgaccttagtatcgccagctctgaagaagataaactttcacaaaatgcttgtattttggagtctgtctcagaaaaaacagaacgtagtaactctgaagataaactcaacagcaaaattcttaatgaaaaacccaccactgatgaacctgaaaaggctgtggaggatattaatgaacatattaccgatgctcagttagaagcaatgactgaactccatgacagaacagcagtaatcaaggagaatgaaagagagaagaggcccaagcttgaaaatctgcctgacacagaagaccaagaaactgtggacattaattcagtcagtgaaggaaaagagaataatataatgataaccttagaaacaaatattgaacataatctaaaatctgaggaagaaaaggatcaggaaaagcaacagatgtttgaaaataagcttataaaatctgaagaaattaaagatactattttgcaaacagtagatttagtttctcaagagactggagaaaaagaggcaaatattcaggcagttgatagtgaagttgggcttacaaaggaagacacccaagagaaattgggggaagacgacaaaactcaaaaagatgtgatcagcaatacaagtgatgtgataggaacatgtgaggcagcagatgtggctcagaaagtggatgaagacagtgctgaggatacgcagagtaatgatgggaaagaagtggtcgaagtaggccagaaattaattaataagcccatggtgggtcctgaggctggtggtactaaggaagttcctattaaagaaatagttgaaatgaatgaaatagaagaaggtaaaaataaggaacaagcaataaacagttcagagaacataatggacatcaatgaggaaccaggaacaactgaaggtgaagaaatcactgagtcaagtagcactgaagaaatggaggtcagaagtgtggtggctgatactgaccaaaaggctttaggaagtgaagttcaggatgcttctaaagtcactactcagatagataaagagaaaaaagaaattccagtgtcaattaaaaaagagcctgaagttactgtagtttcacagcccactgaacctcagcctgttctaatacccagtattaatatcaactctgacagtggagaaaataaagaagaaataggttctttatcaaaaactgaaactattctgccaccagaatctgagaatccaaaggaaaatgataatgattcaggcactggttccactgctgatactagcagtattgacttgaatttatccatctctagctttctaagtaaaactaaagacagtggatcgatatctttacaagaaacaagaagacaaaagaaaacattgaagaaaacacgcaaatttattgttgatggtgtagaagtgagtgtaacaacatcaaagatagttacagatagtgattccaaaactgaagaattgcggtttcttagacgtcaggaacttcgggaattaagatttcttcagaaagaagagcaaagagcccaacaacagctcaatagcaaactacagcaacaacgagaacaaattttccggcgctttgagcaggaaatgatgagtaaaaagcgacaatatgaccaggaaattgagaatctagaaaaacagcagaaacagactatcgaacgcctggaacaagagcacacaaatcgcttgcgagatgaagccaaacgcatcaaaggagaacaagagaaagagttgtccaaatttcagaatatgctgaagaaccgaaagaaggaggaacaagagtttgttcagaaacaacagcaagaattagatggctctctgaaaaagatcatccagcagcagaaggcagagttagctaatattgagagagagtgcctgaataacaagcaacagctcatgagagctcgagaagctgcaatttgggagctcgaagaacgacacttacaagaaaaacaccagctgctcaaacagcagcttaaagatcagtatttcatgcaaagacatcagctacttaagcgccacgagaaggaaacagagcaaatgcagcgttacaatcaaagacttattgaggaattgaaaaacagacagactcaagaaagagcaagactgcccaagattcagcgcagtgaagccaagactcgaatggccatgtttaagaagagtttgagaattaactcaacagccacaccagatcaggaccgtgataaaattaaacagtttgctgcacaagaagaaaagaggcagaaaaatgagagaatggctcagcatcagaaacatgagaatcaaatgcgagatcttcagttgcagtgtgaagccaatgtccgcgaactgcatcagctgcagaatgaaaaatgccacttgttggttgagcatgagactcagaaactgaaggagttagatgaggaacatagccaagaattaaaggagtggagagagaaattgagacctaggaaaaagacactggaagaagagtttgccaggaaactacaggaacaggaagtattctttaaaatgactggggagtctgaatgccttaacccatcaacacagagccggatttccaaattttatcctattcccagcttgcattccaccggatcataacaaagggaagcattctgtgcgtgggtttggctctttcagtatgtcattctgttctcatcttctgccacagtctctcagatagctcatgaagacaatcacctgcctcaccttctaggtgttttccttttttgttttttttgttttgttttgtttttaagcaaagatgaagggaaaacgaactaagacagacgctaggccatgttggcaaagtagcatcttggtgactaaggtgactttgtatattcatcttaaaaattatgttctttagacactgctacctgaaaactgttggagaaataatgtttaaagttatttaagaaaaactgttacatcactaagtattaataaattcttcttacctgacgtaacttctcaatgcctaaattctgtagttgaagctctgctgcagagagttgggataattttcttttggtggatcagctctcataaaaaagctatgatttgctcaaatatgctgttgactcagtaaatgaatatatttttttctttaaataggaacaacctcttttaaaagagaaaaattatttcagtgatttgtcaaaacgaattacctcttttggcatgagctaataattgagggtgctaattttcttaagatagtgcctaaaacactaaatttcagtcaagtcgtaagtaggattttctttttgatcaacagggacaaaaacatctttagaattaaaaacatggttgttttggaatttttgcttctcttaccgtttgatagaaattttcatcctaaaatacatgtacaaagtttggaaagatgaaaaaaagaggtagcttttagattgcaaactggaaatgtaaaactcatgaaatttaagcaatataggtttagctatctgtgtttattttctaaaataatacctgagctggttaaatgatttctctccatcttagctaattctgtttaaaactctgtcagaggcctgcaggctgtgagttatatttataaatatatcttcagaaattaatcttaaaagaggcattagttcagaatacttttttaaaagtttaaattaaatatttaggcacgtcaggaattacttttccttattttgaaatgaggctacttatgtcttggttttattttgttccatgtttaaatcattcactttgatttgagtgggaaaagcctgaagcctttatcatgtggttgctggtgtgtgtaattattaatgaaatgttcactcctagtcccttatgaggcttagaatttcaaccacgtgtcaggtcagacagtattataaactgtactttgctgtctgagacagcacatttgtgaatgatgcttgctgcctgccattttcaacctattctctcttaagagtgctaggtaccaaattgtgaaagtttgttttcagttatattacttttgaggctggtgaaaaatttaaatgtaactttgtgggaacactgattcatatttagaaaatgtaaatgtctgtagcactttcttgcagttaatttgaaaactttggatgctgaaccttgtttgtcagtgatttagatgatttaaaaatgcatgtgtgatttgaattttataattgttttgacaagcataatttacttggacaacttcgtaggtagccttaacttctggccaagtttgttttttatataaatatatatacatatatacatattatgtatggttgtaaattcatacacttatcacatgaatgtgttactgtatacaaaactcttaatgctttattctcaaatgctgggttgaaaaatgttttgaaagccttttaaaatatatatctttataaagtaatattcaggatgatgataaaaattgtttatattgttatgataaaaatgacagtataatgttgcccagtgtatttaatgatttatttgaagagggattgggaaggaacgtcttcataccactttctcctttgaaattttcagtttattgacttttaaaaaatgaatacctcaggcagtagacattttttttctagtatcatttaattgataccctgtgcgctaaatagtgtgtggtgcctgattaatttggtctgaatatttgattctttctgttcctttcaacttgacattcagattattgactcaaggagagaggctcagagtggaatggttggcgctgtgggtaaggttggatctcccttaaaactgccttttggattcagtgtttgtgcttgagttcgctttcaaatatgaccataatcgtgtgggtgcaagactgtacagtgatacatatgtagaggtaaagcattcattttaatacttaaagttatataaatcttttcaaaaagtgttttgttataaaatacgctgtttgtacccataccagcccacctcttctgaggccctgtattcaaatagatgatagtgatctatctttcctgcatgaagtgtaggtggcgagtgggcgaggggcgcagacttctttgaaatcgaagggtacagtcaaatctactgctgatttggttgttttgttgctgtggcagaatatgccatgaaacacatacagacttctccgaacgtgcaccctcatcagccacctcctcccctctttccctgagtgctgtgaacacagcagacctgcacacttctgcagatccagctcctacagcttggggcactaggctgcctttcctagtcctgtcaacaaccatacagtgcgaattgctgaattagctgctattctatgtggagtcacattaagctttttcttatctttttctatggggaagctatagggtgggtaaggaaaaaatgttgaatgcttttactttgctgaaaatattagaactctcttgtgacaggatacagcaaattataattaaatataaattaccagaaccagagctacctctaagtcatacttcctcaagcacaaagctctcaggcatatgagacccaccttaatgaagggtctctgatttcttgagcatcagcgagtttcagaagtgactatttttttgtactcttctagtttccttgtaactatacactttttcccattccacactgtgcttaaatgacaaagactcttctgagaagccaaattctgtccaagtattaactagagatattgttgattaaagaaaatctagaactgaagtgaaagaagagagttccagttctaatagtcttttgattaacaattcttttctgagaaatgatttttataagaaatggggtgattctttaaatgcttttcttaagttgaaggcacaacagttaatggctgtattgttgctattccgttgctgacatgtttttgataaagctttaacattcctgctactaattttggcggagagtgtttgccaggtttcaatgtgggctgcagctttttgtgctccttctctggtttgcagtgtaatgagttcataagctaaattttcagaaagaattttgtttaagattatgcctcttatctacttgagagcaacatgtcttttcaatcatgggattgacacatgaaaaataaagttatttcttaatcaat

SEQ ID NO: 8384 - protein, 1204 aa, Homo sapiens; identical to SEQ ID NO: 8380

SEQ ID NO: 8385 - DNA, 1488 bp, Homo sapiens
ggttgttttggaatttttgcttctcttaccgtttgatagaaattttcatcctaaaatacatgtacaaagtttggaaagatgaaaaaaagaggtagcttttagattgcaaactggaaatgtaaaactcatgaaatttaagcaatataggtttagctatctgtgtttattttctaaaataatacctgagctggttaaatgatttctctccatcttagctaattctgtttaaaactctgtcagaggcctgcaggctgtgagttatatttataaatatatcttcagaaattaatcttaaaagaggcattagttcagaatacttttttaaaagtttaaattaaatatttaggcacgtcaggaattacttttccttattttgaaatgaggctacttatgtcttggttttattttgttccatgtttaaatcattcactttgatttgagtgggaaaagcctgaagcctttatcatgtggttgctggtgtgtgtaattattaatgaaatgttcactcctagtcccttatgaggcttagaatttcaaccacgtgtcaggtcagacagtattataaactgtactttgctgtctgagacagcacatttgtgaatgatgcttgctgcctgccattttcaacctattctctcttaagagtgctaggtaccaaattgtgaaagtttgttttcagttatattacttttgaggctggtgaaaaatttaaatgtaactttgtgggaacactgattcatatttagaaaatgttgaatgcttttactttgctgaaaatattagaactctcttgtgacaggatacagcaaattataattaaatataaattaccagaaccagagctacctctaagtcatacttcctcaagcacaaagctctcaggcatatgagacccaccttaatgaagggtctctgatttcttgagcatcagcgagtttcagaagtgactatttttttgtactcttctagtttccttgtaactatacactttttcccattccacactgtgcttaaatgacaaagactcttctgagaagccaaattctgtccaagtattaactagagatattgttgattaaagaaaatctagaactgaagtgaaagaagagagttccagttctaatagtcttttgattaacaattcttttctgagaaatgatttttataagaaatggggtgattctttaaatgcttttcttaagttgaaggcacaacagttaatggctgtattgttgctattccgttgctgacatgtttttgataaagctttaacattcctgctactaattttggcggagagtgtttgccaggtttcaatgtgggctgcagctttttgtgctccttctctggtttgcagtgtaatgagttcataagctaaattttcagaaagaattttgtttaagattatgcctcttatctacttgagagcaacatgtcttttcaatcatgggattgacacatgaaaaataaagttatttcttaatcaat

SEQ ID NO: 8386 - protein, 46 aa, Homo sapiens [sequence omitted]

SEQ ID NO: 8387 - DNA, 5640 bp, Homo sapiens
aagaaacaaggtggagagaaagaaaagtgaacatttttgaaagatcactcagctttaacacaccttggctgggtctggataaaaaaaaagtgagcactgcaaatttctagaagaaaacatcaggagaagaaagagagagggggatttattcaaagttgtttccaattccttcaaaacctcaaaccaggtggctatggtatggatgtaaccaagaaaaacaaacgagatggaactgaagtcactgagagaattgtcactgaaacagtaaccacaagacttacatccttaccaccaaaaggcgggaccagcaatggctatgctaaaacagcctctcttggtggagggagccggctggagaaacaaagcctgactcatggcagcagcggctacataaactcaactggaagcacacgaggccatgcctccacctctagttacaggagggctcactcacctgcctccactctgcccaactccccaggctcaacctttgaaaggaaaactcacgttacccgccatgcgtatgaagggagctccagtggcaactcttctccggagtaccctcggaaggaatttgcatcttcttcaaccagaggacggagtcaaacacgagagagtgaaattcgagttcgactgcagagtgcgtccccatccacccgatggacagaattggatgatgttaagcgtttgctcaaggggagtcgatcggcaagtgtgagccccacccggaattcctccaacacactccccatccccaagaaaggcactgtggagaccaaaattgtgacagcgagctcccagtcggtgtcaggcacctacgatgcaacgatcctggatgccaaccttccctcccatgtgtggtcctccaccctgcccgcggggtcctccatggggacctatcacaacaacatgacaacccagagctcatccctcctcaacaccaatgcctactctgcgggatcagtcttcggagttccaaacaacatggcgtcctgctcacccactttgcaccctggactcagcacatcctcctcagtgtttggcatgcagaacaatctggcccccagcttgaccaccctgtcccatggcaccaccaccacttccacagcatatggggtgaagaaaaacatgccccagagtcctgcggctgtgaacactggcgtttccacctccgccgcctgcaccacaagtgtgcagagcgatgaccttttgcacaaggactgcaagttcctgatcctagagaaagacaacacacctgccaagaaggagatggagctgctcatcatgaccaaggacagcgggaaggtctttacagcctcccctgccagcatcgctgcaacttctttttcagaagacaccctaaaaaaagaaaagcaagctgcctacaatgctgactcaggcctaaaagccgaagctaatggagacctgaagactgtgtccacaaagggcaagaccaccactgcagatatccacagctacggcagcagtggtggtggtggcagtggaggaggtggcggtgttggtggcgctggcggcggcccttggggaccagcgccagcctggtgcccctgcggctcctgctgcagctggtggaagtggctgctgggcctgctgctcacctggctgctactcctggggctgctcttcggcctcattgctctggcggaggaggtgaggaagctgaaggcgcgtgtggatgagctggagaggatcaggaggagcatactgccctatggggacagcatggatagaatagaaaaggaccgcctccagggcatggcacccgcggcgggagcagacctggacaaaattgggctgcacagtgacagccaggaggagctctggatgttcgtgaggaagaagctaatgatggaacaggaaaatggaaatctccgaggaagccctggccctaaaggtgacatgggaagtccaggccctaaaggagatcgagggttccctgggactccaggtatccctgggcccttgggccacccaggtccacaaggaccaaagggtcaaaaaggcagcgtgggagatcctggcatggaaggccccatgggccagagagggcgagaaggccccatgggacctcgtggtgaggcagggcctcctggatctggagagaaaggggaaagaggggctgctggtgaaccaggtcctcatggcccacctggtgtcccaggttctgtgggtcccaaaggttccagcggctctcctggcccacagggccctccaggtcctgtaggtctccaagggctccgaggtgaagtaggacttcctggtgtcaaaggtgacaaaggaccaatgggaccaccaggacccaaaggtgaccagggtgagaaaggacctcgaggcctcacaggcgagcctggcatgagaggtttgcctggtgctgttggtgagcccggggctaaaggagcaatgggtcctgctggcccagacggacaccaaggcccaagaggtgaacaaggtcttactgggatgcctggaatccgtggcccaccaggaccttctggagacccaggaaagccaggtctcacaggaccccagggacctcagggacttcccggtacccctggccgaccaggaataaaaggtgaaccaggagctccaggcaagatcgtgacttcggaggggtcatcgatgctcactgtcccaggccccccaggacctcctggagccatgggacccccaggacctccaggtgccccaggccctgccggcccagctggtctcccaggacatcaagaagttcttaatttacaaggtcccccaggcccacccggcccacgcgggccaccagggccttccattccaggcccaccaggaccccgaggcccaccaggggagggtttgccaggcccaccaggcccaccaggatcgttcctgtccaactcagaaaccttcctctccggccccccaggcccacctggccccccaggtcccaagggagaccaaggtcccccaggccccagaggacaccaaggcgagcaaggcctcccaggtttctcaacctcagggtccagttctttcggactcaaccttcagggaccaccaggcccacctggcccccagggacccaaaggtgacaaaggtgatccaggtgttccaggggctcttggcattcctagtggtccttctgaagggggatcatcaagtaccatgtacgtgtcaggcccgccagggccccctgggccccctgggcctccgggctctatcagcagctctggccaggagattcagcagtacatctctgagtacatgcagagtgacagtattagatcttacctatccggagttcagggtcccccaggcccacctggtcccccaggacctgtcaccaccatcacaggcgagactttcgactactcagagctggcaagccacgttgtgagctacttacggacttcggggtacggtgtcagcttgttctcgtcctccatctcttctgaagacattctggctgtgctgcagcgggatgacgtgcgtcagtacctacgtcagtacttgatgggccctcggggtccgccagggccaccaggagccagtggagatgggtccctcctgtctttggactatgcagagctgagtagtcgcattctcagctacatgtcgagttctgggatcagcattgggcttcctggtcccccggggccccctggcttgccgggaacctcctatgaggagctcctctccttgctgcgagggtctgaattcagaggcatcgttggacccccaggtcccccgggtccaccagggatcccaggcaatgtgtggtccagcatcagcgtggaggacctctcgtcttacttacatactgccggcttgtcattcatcccaggccctccaggacctcctggtcccccagggcctcgagggcccccgggtgtctcaggagccctggcaacctatgcagctgaaaacagcgacagcttccggagcgagctgatcagctacctcacaagtcctgatgtgcgcagcttcattgttggccccccaggccctcctgggccgcagggaccccctggggacagccgcctcctgtccacggatgcctcccacagtcggggtagcagctcctcctcacacagctcatctgtcaggcggggcagctcctacagctcttccatgagcacaggaggaggtggtgcaggctccctgggtgcaggcggtgcctttggtgaagctgcaggagacaggggtccctatggcactgacatcggcccaggcggaggctatggggcagcagcagaaggcggcatgtatgctggcaatggcggactattgggagctgactttgctggagatctggattacaatgagctggctgtgagggtgtcagagagcatgcagcgtcagggcctactgcaagggatggcctacactgtccagggcccaccaggccagcctgggccacaggggccacccggcatcagcaaggtcttctctgcctacagcaacgtgactgcggacctcatggacttcttccaaacttatggagccattcaaggaccccctgggcaaaaaggagagatgggcactccaggacccaaaggtgacaggggccctgctgggccaccaggtcatcctgggccacctggccctcgaggacacaagggagaaaaaggagacaaaggtgaccaagtctatgctgggcggagaaggagaagaagtattgctgtcaagccgtgagctagccatggcaggacagctcctggaccaggtctcataatgcatgtggcacttaggtccaaggtctccagagggtgaaagctggagtctgtcaatgtcctactgagacagcacagccaacctagctagcaacatttgttttagtctgaacaatatatacttatagaattcagtcaaagatacacaatctgaaacagcttcatggggtggactctaacagtagttgcaatgttttagaatgagacttacttctctgctatctagatctgaactccttggcttctttacttagttcaagccccagcctaggaaagccagttacataaaagttggctcaggagtcttagagctttacctaaatatgagcccagaaaacggaggatgggggtggggcgccttcctggaggtgacacttgatgggggtgtgttctggttactgttctaaggctgtgccatcagctccttcctcccctgttcattctgcattctctagtcagttggctaagaagtgactcttgcaactaaaaaaattaagaaattcacttcccctctaggaggtgatgatagggtttctaatggttatatgtatatcacattcccatttgcttagaaagtctgattgtagctatgattgtccgtaggcccatactagagttcatggatatgttatactgaaccaggccagagcaaacagaaaaagaaggttgagggcaatggacaaggaaggaataaagggagaagagggaaaacagaaaacctgatgctggggacacagcatcagctcaagacgtcaccctccattctgcactcagaaaatggcacttgggggactgggcgcagttggtctttaaccacttttcaatgtctaaaaacatttgtttgtggtctataagatgaaacatcatttcaatcgtaaaatttcccattaaagaagtttttttttctaat

SEQ ID NO: 8388 - protein, 1497 aa, Homo sapiens
MDVTKKNKRDGTEVTERIVTETVTTRLTSLPPKGGTSNGYAKTASLGGGSRLEKQSLTHGSSGYINSTGSTRGHASTSSYRRAHSPASTLPNSPGSTFERKTHVTRHAYEGSSSGNSSPEYPRKEFASSSTRGRSQTRESEIRVRLQSASPSTRWTELDDVKRLLKGSRSASVSPTRNSSNTLPIPKKGTVETKIVTASSQSVSGTYDATILDANLPSHVWSSTLPAGSSMGTYHNNMTTQSSSLLNTNAYSAGSVFGVPNNMASCSPTLHPGLSTSSSVFGMQNNLAPSLTTLSHGTTTTSTAYGVKKNMPQSPAAVNTGVSTSAACTTSVQSDDLLHKDCKFLILEKDNTPAKKEMELLIMTKDSGKVFTASPASIAATSFSEDTLKKEKQAAYNADSGLKAEANGDLKTVSTKGKTTTADIHSYGSSGGGGSGGGGGVGGAGGGPWGPAPAWCPCGSCCSWWKWLLGLLLTWLLLLGLLFGLIALAEEVRKLKARVDELERIRRSILPYGDSMDRIEKDRLQGMAPAAGADLDKIGLHSDSQEELWMFVRKKLMMEQENGNLRGSPGPKGDMGSPGPKGDRGFPGTPGIPGPLGHPGPQGPKGQKGSVGDPGMEGPMGQRGREGPMGPRGEAGPPGSGEKGERGAAGEPGPHGPPGVPGSVGPKGSSGSPGPQGPPGPVGLQGLRGEVGLPGVKGDKGPMGPPGPKGDQGEKGPRGLTGEPGMRGLPGAVGEPGAKGAMGPAGPDGHQGPRGEQGLTGMPGIRGPPGPSGDPGKPGLTGPQGPQGLPGTPGRPGIKGEPGAPGKIVTSEGSSMLTVPGPPGPPGAMGPPGPPGAPGPAGPAGLPGHQEVLNLQGPPGPPGPRGPPGPSIPGPPGPRGPPGEGLPGPPGPPGSFLSNSETFLSGPPGPPGPPGPKGDQGPPGPRGHQGEQGLPGFSTSGSSSFGLNLQGPPGPPGPQGPKGDKGDPGVPGALGIPSGPSEGGSSSTMYVSGPPGPPGPPGPPGSISSSGQEIQQYISEYMQSDSIRSYLSGVQGPPGPPGPPGPVTTITGETFDYSELASHVVSYLRTSGYGVSLFSSSISSEDILAVLQRDDVRQYLRQYLMGPRGPPGPPGASGDGSLLSLDYAELSSRILSYMSSSGISIGLPGPPGPPGLPGTSYEELLSLLRGSEFRGIVGPPGPPGPPGIPGNVWSSISVEDLSSYLHTAGLSFIPGPPGPPGPPGPRGPPGVSGALATYAAENSDSFRSELISYLTSPDVRSFIVGPPGPPGPQGPPGDSRLLSTDASHSRGSSSSSHSSSVRRGSSYSSSMSTGGGGAGSLGAGGAFGEAAGDRGPYGTDIGPGGGYGAAAEGGMYAGNGGLLGADFAGDLDYNELAVRVSESMQRQGLLQGMAYTVQGPPGQPGPQGPPGISKVFSAYSNVTADLMDFFQTYGAIQGPPGQKGEMGTPGPKGDRGPAGPPGHPGPPGPRGHKGEKGDKGDQVYAGRRRRRSIAVKP

SEQ ID NO: 8389 - DNA, 5029 bp, Homo sapiens
aagaaacaaggtggagagaaagaaaagtgaacatttttgaaagatcactcagctttaacacaccttggctgggtctggataaaaaaaaagtgagcactgcaaatttctagaagaaaacatcaggagaagaaagagagagggggatttattcaaagttgtttccaattccttcaaaacctcaaaccaggtggctatggtatggatgtaaccaagaaaaacaaacgagatggaactgaagtcactgagagaattgtcactgaaacagtaaccacaagacttacatccttaccaccaaaaggcgggaccagcaatggctatgctaaaacagcctctcttggtggagggagccggctggagaaacaaagcctgactcatggcagcagcggctacataaactcaactggaagcacacgaggccatgcctccacctctagttacaggagggctcactcacctgcctccactctgcccaactccccaggctcaacctttgaaaggaaaactcacgttacccgccatgcgtatgaagggagctccagtggcaactcttctccggagtaccctcggaaggaatttgcatcttcttcaaccagaggacggagtcaaacacgagagagtgaaattcgagttcgactgcagagtgcgtccccatccacccgatggacagaattggatgatgttaagcgtttgctcaaggggagtcgatcggcaagtgtgagccccacccggaattcctccaacacactccccatccccaagaaaggcactgtggagaccaaaattgtgacagcgagctcccagtcggtgtcaggcacctacgatgcaacgatcctggatgccaaccttccctcccatgtgtggtcctccaccctgcccgcggggtcctccatggggacctatcacaacaacatgacaacccagagctcatccctcctcaacaccaatgcctactctgcgggatcagtcttcggagttccaaacaacatggcgtcctgctcacccactttgcaccctggactcagcacatcctcctcagtgtttggcatgcagaacaatctggcccccagcttgaccaccctgtcccatggcaccaccaccacttccacagcatatggggtgaagaaaaacatgccccagagtcctgcggctgtgaacactggcgtttccacctccgccgcctgcaccacaagtgtgcagagcgatgaccttttgcacaaggactgcaagttcctgatcctagagaaagacaacacacctgccaagaaggagatggagctgctcatcatgaccaaggacagcgggaaggtctttacagcctcccctgccagcatcgctgcaacttctttttcagaagacaccctaaaaaaagaaaagcaagctgcctacaatgctgactcaggcctaaaagccgaagctaatggagacctgaagactgtgtccacaaagggcaagaccaccactgcagatatccacagctacggcagcagtggtggtggtggcagtggaggaggtggcggtgttggtggcgctggcggcggcccttggggaccagcgccagcctggtgcccctgcggctcctgctgcagctggtggaagtggctgctgggcctgctgctcacctggctgctactcctggggctgctcttcggcctcattgctctggcggaggaggtgaggaagctgaaggcgcgtgtggatgagctggagaggatcaggaggagcatactgccctatggggacagcatggatagaatagaaaaggaccgcctccagggcatggcacccgcggcgggagcagacctggacaaaattgggctgcacagtgacagccaggaggagctctggatgttcgtgaggaagaagctaatgatggaacaggaaaatggaaatctccgaggaagccctggccctaaaggtgacatgggaagtccaggccctaaaggagatcgagggttccctgggactccaggtatccctgggcccttgggccacccaggtccacaaggaccaaagggtcaaaaaggcagcgtgggagatcctggcatggaaggccccatgggccagagagggcgagaaggccccatgggacctcgtggtgaggcagggcctcctggatctggagagaaaggggaaagaggggctgctggtgaaccaggtcctcatggcccacctggtgtcccaggttctgtgggtcccaaaggttccagcggctctcctggcccacagggccctccaggtcctgtaggtctccaagggctccgaggtgaagtaggacttcctggtgtcaaaggtgacaaaggaccaatgggaccaccaggacccaaaggtgaccagggtgagaaaggacctcgaggcctcacaggcgagcctggcatgagaggtttgcctggtgctgttggtgagcccggggctaaaggagcaatgggtcctgctggcccagacggacaccaaggcccaagaggtgaacaaggtcttactgggatgcctggaatccgtggcccaccaggaccttctggagacccaggaaagccaggtctcacaggaccccagggacctcagggacttcccggtacccctggccgaccaggaataaaaggtgaaccaggagctccaggcaagatcgtgacttcggaggggtcatcgatgctcactgtcccaggccccccaggacctcctggagccatgggacccccaggacctccaggtgccccaggccctgccggcccagctggtctcccaggacatcaagaagttcttaatttacaaggtcccccaggcccacccggcccacgcgggccaccagggccttccattccaggcccaccaggaccccgaggcccaccaggggagggtttgccaggcccaccaggcccaccaggatcgttcctgtccaactcagaaaccttcctctccggccccccaggcccacctggccccccaggtcccaagggagaccaaggtcccccaggccccagaggacaccaaggcgagcaaggcctcccaggtttctcaacctcagggtccagttctttcggactcaaccttcagggaccaccaggcccacctggcccccagggacccaaaggtgacaaaggtgatccaggtgttccaggggctcttggcattcctagtggtccttctgaagggggatcatcaagtaccatgtacgtgtcaggcccgccagggccccctgggccccctgggcctccgggctctatcagcagctctggccaggagattcagcagtacatctctgagtacatgcagagtgacagtattagatcttacctatccggagttcagggtcccccaggcccacctggtcccccaggacctgtcaccaccatcacaggcgagactttcgactactcagagctggcaagccacgttgtgagctacttacggacttcggggtacggtgtcagcttgttctcgtcctccatctcttctgaagacattctggctgtgctgcagcgggatgacgtgcgtcagtacctacgtcagtacttgatgggccctcggggtccgccagggccaccaggagccagtggagatgggtccctcctgtctttggactatgcagagctgagtagtcgcattctcagctacatgtcgagttctgggatcagcattgggcttcctggtcccccggggccccctggcttgccgggaacctcctatgaggagctcctctccttgctgcgagggtctgaattcagaggcatcgttggacccccaggtcccccgggtccaccagggatcccaggcaatgtgtggtccagcatcagcgtggaggacctctcgtcttacttacatactgccggcttgtcattcatcccaggccctccaggacctcctggtcccccagggcctcgagggcccccgggtgtctcaggagccctggcaacctatgcagctgaaaacagcgacagcttccggagcgagctgatcagctacctcacaagtcctgatgtgcgcagcttcattgttggccccccaggccctcctgggccgcagggaccccctggggacagccgcctcctgtccacggatgcctcccacagtcggggtagcagctcctcctcacacagctcatctgtcaggcggggcagctcctacagctcttccatgagcacaggaggaggtggtgcaggctccctgggtgcaggcggtgcctttggtgaagctgcaggagacaggggtccctatggcactgacatcggcccaggcggaggctatggggcagcagcagaaggcggcatgtatgctggcaatggcggactattgggagctgactttgctggagatctggattacaatgagctggctgtgagggtgtcagagagcatgcagcgtcagggcctactgcaagggatggcctacactgtccagggcccaccaggccagcctgggccacaggggccacccggcatcagcaaggtcttctctgcctacagcaacgtgactgcggacctcatggacttcttccaaacttatggagccattcaaggaccccctgggcaaaaaggagagatgggcactccaggacccaaaggtgacaggggccctgctgggccaccaggtcatcctgggccacctggccctcgaggacacaagggagaaaaaggagacaaaggtgaccaagtctatgctgggcggagaaggagaagaagtattgctgtcaagccgtgagctagccatggcaggacagctcctggaccaggcccatactagagttcatggatatgttatactgaaccaggccagagcaaacagaaaaagaaggttgagggcaatggacaaggaaggaataaagggagaagagggaaaacagaaaacctgatgctggggacacagcatcagctcaagacgtcaccctccattctgcactcagaaaatggcacttgggggactgggcgcagttggtctttaaccacttttcaatgtctaaaaacatttgtttgtggtctataagatgaaacatcatttcaatcgtaaaatttcccattaaagaagtttttttttctaa

SEQ ID NO: 8390 - protein, 1497 aa, Homo sapiens; identical to SEQ ID NO: 8388

SEQ ID NO: 8391 - DNA, 614 bp, Homo sapiens
atgtgtggtcctccaccctgcccgcggggtcctccatggggacctatcacaacaacatgacaacccagagctcatccctcctcaacaccaatgcctactctgcgggatcagtcttcggagttccaaacaacatggcgtcctgctcacccactttgcaccctggactcagcacatcctcctcagctcagaagcagaggcacagggttgcacagaacctgccttcaaccacagggagaactcagaccccaagggaaaagtctcaggcgaggggacgtgagcccacattgactgtttggcatgcagaacaatctggcccccagcttgaccaccctgtcccatggcaccaccaccacttccacagcatatggggtgaagaaaaacatgccccagagtcctgcggctgtgaacactggcgtttccacctccgccgcctgcaccacaagtgtgcagagcgatgaccttttgcacaaggactgcaagttcctgatcctagagaaagacaacacacctgccaagaaggagatggagctgctcatcatgaccaaggacagcgggaaggtctttacagcctcccctgccagcatcgctgcaacttctttttcagaagacaccct

SEQ ID NO: 8392 - protein, 140 aa, Homo sapiens
MGTYHNNMTTQSSSLLNTNAYSAGSVFGVPNNMASCSPTLHPGLSTSSSAQKQRHRVAQNLPSTTGRTQTPREKSQARGREPTLTVWHAEQSGPQLDHPVPWHHHHFHSIWGEEKHAPESCGCEHWRFHLRRLHHKCAER

SEQ ID NO: 8393 - DNA, 1361 bp, Homo sapiens
aagaaacaaggtggagagaaagaaaagtgaacatttttgaaagatcactcagctttaacacaccttggctgggtctggataaaaaaaaagtgagcactgcaaatttctagaagaaaacatcaggagaagaaagagagagggggatttattcaaagttgtttccaattccttcaaaacctcaaaccaggtggctatggtatggatgtaaccaagaaaaacaaacgagatggaactgaagtcactgagagaattgtcactgaaacagtaaccacaagacttacatccttaccaccaaaaggcgggaccagcaatggctatgctaaaacagcctctcttggtggagggagccggctggagaaacaaagcctgactcatggcagcagcggctacataaactcaactggaagcacacgaggccatgcctccacctctagttacaggagggctcactcacctgcctccactctgcccaactccccaggctcaacctttgaaaggaaaactcacgttacccgccatgcgtatgaagggagctccagtggcaactcttctccggagtaccctcggaaggaatttgcatcttcttcaaccagaggacggagtcaaacacgagagagtgaaattcgagttcgactgcagagtgcgtccccatccacccgatggacagaattggatgatgttaagcgtttgctcaaggggagtcgatcggcaagtgtgagccccacccggaattcctccaacacactccccatccccaagaaaggcactgtggagaccaaaattgtgacagcgagctcccagtcggtgtcaggcacctacgatgcaacgatcctggatgccaaccttccctcccatgtgtggtcctccaccctgcccgcggggtcctccatggggacctatcacaacaacatgacaacccagagctcatccctcctcaacaccaatgcctactctgcgggatcagtcttcggagttccaaacaacatggcgtcctgctcacccactttgcaccctggactcagcacatcctcctcagtgtttggcatgcagaacaatctggcccccagcttgaccaccctgtcccatggcaccaccaccacttccacagcatatggggtgaagaaaaacatgccccagagtcctgcggctgtgaacactggcgtttccacctccgccgcctgcaccacaagtgtgcagagcgatgaccttttgcacaaggactgcaagttcctgatcctagagaaagacaacacacctgccaagaaggagatggagctgctcatcatgaccaaggacagcgggaaggtctttacagcctcccctgccagcatcgctgcaacttctttttcagaagacaccct

SEQ ID NO: 8394 - protein, 386 aa, Homo sapiens
MDVTKKNKRDGTEVTERIVTETVTTRLTSLPPKGGTSNGYAKTASLGGGSRLEKQSLTHGSSGYINSTGSTRGHASTSSYRRAHSPASTLPNSPGSTFERKTHVTRHAYEGSSSGNSSPEYPRKEFASSSTRGRSQTRESEIRVRLQSASPSTRWTELDDVKRLLKGSRSASVSPTRNSSNTLPIPKKGTVETKIVTASSQSVSGTYDATILDANLPSHVWSSTLPAGSSMGTYHNNMTTQSSSLLNTNAYSAGSVFGVPNNMASCSPTLHPGLSTSSSVFGMQNNLAPSLTTLSHGTTTTSTAYGVKKNMPQSPAAVNTGVSTSAACTTSVQSDDLLHKDCKFLILEKDNTPAKKEMELLIMTKDSGKVFTASPASIAATSFSED

SEQ ID NO: 8395 - DNA, 3065 bp, Homo sapiens
ctcgactgaggatgctgctgcccggtagccagcaagggccctgtcggtctcaaacgtgaattttggaccgacacaatctcatgtagtgattgttctgcttcctgtgttgcgccacaacaaatttccttgggctacattttccctcagatttgagtaaaagatttgaggtcacgctaaggagcctgcatactgaggtacagaaacggttttttgtttacaacaacaacaaaaaacctcgcgacgggaccgccgagtttgcggcagccaaaaaagctagcgatgagctcagctaaagtgccgggactctcggatagatttctaacatgtttgaaatgtggaccccaacgctggaacccaacgctgttcttttgtggtctctggaaccaccacgctggaataggctggaacccaaccaacgctgttcttttgtggtctctgcctctggggagtccacaagctgtaaatctaacatgcagccagccgtgcggcttctggccgccccacgtctgagtaaagccttcactgtgactagcagggagaggagactgactggagccagagaatggaggcggcgggctggcgggggtggggagaggcactttcaggcgcacttcacagacgcacaaaaacaaggaagcctgaagggaaggcggttgaaaataaggcaacagaagccgcgaacggaagcgcgcccccctcaggattggtttaacattccgaagctcagcctcgcccgccccgaagacctgctgcggatcgcggccgcgcgcgcgcgcactcacgctgctctcgggcgctgggcggggagagccgcgcgcaccggttaattctgccaatcatgcgtctgggcctcccatcgtgtgggccaagccccgccccaaccacccgctggcggaggcgcgcgcgcagtcccaccgctctgagtcgctgagtgaagcggcgcctcgcgcgtcaggcaatctggccaattgcgcatcttttccgcctaccgcacggccccgcccctgccacaggatcgatttacggccgcagagaaaaaccaagatttcactttcaagatggaaagtccgtcagactcagctgtggttttacctagcactcctcaggcctctgcgaatccatcatctccctatacaaatagttcccgaaaacaagtatgaaaatctttgttcttccagtggatccattatgtgtttctaagtattgtggcagtggtggtttaaattctacggaaggttgttaattaacataatgtgtagcataaataagtagacattttattaaataattttgtttttcttctaaggtgacatatatgacacccaccagcccccttccatattttcctcttgaatgaattcatttcagttagtttcagattaggttattacaatactccagatggagaaagtttgcatctgtgcaatattattatgaaggtctttagtggcagagtctaggtcttttccttactctgtaattctgaagcacctggagtactatcaggcatgtgcttgttactgaacaaatgttccttgattactgggataaacttctcaacacttttggaaaggtgttgatcttgctgaagtaaaaaggaaataaaacaaatggagcttccagaaattaaagtcattttgtgatgccttctttagatgtggagacagaaagccatctagtggtgtctagcatagaaatggaaggactttatttctggtgatttattgacattaagaatgtttttcttgattcacatttttaatgttttgtgctctttatagcctatgagtgcaacacttagagaaagattaaggaaaacaagattttcatttaattcctcttacaatgtggtgaaacgtcttaaagtagagagtgaagaaaatgatcagaccttttcagagaaaccagcatcttccacagaggaaaactgtttggaatttcaagaaagttttaaacatatagacagtgaatttgaagaaaatacaaatttgaaaaatactttgaagaatctcaatgtctgtgaatctcagtcacttgattctggatcatgcagtgctctccaaaatgagtttgtgagtgagaagcttcctaaacaaagattaaacgctgaaaaagccaaattggtgaagcaggttcaggagaaagaagaccttcttcggaggctaaaactagtcaaaatgtatagatcaaagaatgatctgtctcagttacagttgttaataaagaagtggagaagctgtagccagctcttgctttatgagttgcagtcagctgtgtctgaagagaacaagaaactaagccttactcaattgatagaccactatgggttagatgataaattactacactataacagaagtgaagaagaatttatagatgtttaattcctgatttttgctccagaatatctttgagaatgacaacttaattaaaagatacttaggcactttttttttttttttgagactgagtttcgctcttgtcatcctggctggagtgtgatggtgcgatcttgactcactgcaacctctgcctctcgggttccagcaattctcctgcctcagcctcccgagtagctgagattacaggcgcccgccaccatgcccggctaatttttgcatttttagtagagactgggtttcaccacgttggccaggctggtctcgaactcctgacctcaggtgatccaccgcctaggcctcccaaaaccattagggctcagaggaaggtatcccaatgaatatcaattaagggcactttaatatataaattataaactaagttctaaaaggaaaattagtattttggatagatttgtcaaaacgacatttaagtcatgtttaaaaagtcatttgggcagttctggaaactagttttaatacatttgttttttatgacaaaaagttttattttaaatgttaaaaattgtccaatctggtgaatgtctaaccctaaagtttaaaaatttctgcctcctaagtttatgtaccttgtttccatccatttaccacatatttccatctgatagtctagcaggtaattaaacttatatgtccaaaaccata

SEQ ID NO: 8396 - protein, 199 aa, Homo sapiens [sequence omitted]

SEQ ID NO: 8397 - DNA, 1515 bp, Homo sapiens
gtcgctgagtgaagcggcgcctcgcgcgtcaggcaatctggccaattgcgcatcttttccgcctaccgcacggccccgcccctgccacaggatcgatttacggccgcagagaaaaaccaagatttcactttcaagatggaaagtccgtcagactcagctgtggttttacctagcactcctcaggcctctgcgaatccatcatctccctatacaaatagttcccgaaaacaacctatgagtgcaacacttagagaaagattaaggaaaacaagattttcatttaattcctcttacaatgtggtgaaacgtcttaaagtagagagtgaagaaaatgatcagaccttttcagagaaaccagcatcttccacagaggaaaactgtttggaatttcaagaaagttttaaacatatagacagtgaatttgaagaaaatacaaatttgaaaaatactttgaagaatctcaatgtctgtgaatctcagtcacttgattctggatcatgcagtgctctccaaaatgagtttgtgagtgagaagcttcctaaacaaagattaaacgctgaaaaagccaaattggtgaagcaggttcaggagaaagaagaccttcttcggaggctaaaactagtcaaaatgtatagatcaaagaatgatctgtctcagttacagttgttaataaagaagtggagaagctgtagccagctcttgctttatgagttgcagtcagctgtgtctgaagagaacaagaaactaagccttactcaattgatagaccactatgggttagatgataaattactacactataacagaagtgaagaagaatttatagatgtttaattcctgatttttgctccagaatatctttgagaatgacaacttaattaaaagatacttaggcactttttttttttttttgagactgagtttcgctcttgtcatcctggctggagtgtgatggtgcgatcttgactcactgcaacctctgcctctcgggttccagcaattctcctgcctcagcctcccgagtagctgagattacaggcgcccgccaccatgcccggctaatttttgcatttttagtagagactgggtttcaccacgttggccaggctggtctcgaactcctgacctcaggtgatccaccgcctaggcctcccaaaaccattagggctcagaggaaggtatcccaatgaatatcaattaagggcactttaatatataaattataaactaagttctaaaaggaaaattagtattttggatagatttgtcaaaacgacatttaagtcatgtttaaaaagtcatttgggcagttctggaaactagttttaatacatttgttttttatgacaaaaagttttattttaaatgttaaaaattgtccaatctggtgaatgtctaaccctaaagtttaaaaatttctgcctcctaagtttatgtaccttgtttccatccatttaccacatatttccatctgatagtctagcaggtaattaaacttatatgtccaaaaccata

SEQ ID NO: 8398 - protein, 232 aa, Homo sapiens; identical to SEQ ID NO: 1230

SEQ ID NO: 8399 - DNA, 1432 bp, Homo sapiens
gctctcgctgggaatggcggagggagagaaaaaccaagatttcactttcaagatggaaagtccgtcagactcagctgtggttttacctagcactcctcaggcctctgcgaatccatcatctccctatacaaatagttcccgaaaacaacctatgagtgcaacacttagagaaagattaaggaaaacaagattttcatttaattcctcttacaatgtggtgaaacgtcttaaagtagagagtgaagaaaatgatcagaccttttcagagaaaccagcatcttccacagaggaaaactgtttggaatttcaagaaagttttaaacatatagacagtgaatttgaagaaaatacaaatttgaaaaatactttgaagaatctcaatgtctgtgaatctcagtcacttgattctggatcatgcagtgctctccaaaatgagtttgtgagtgagaagcttcctaaacaaagattaaacgctgaaaaagccaaattggtgaagcaggttcaggagaaagaagaccttcttcggaggctaaaactagtcaaaatgtatagatcaaagaatgatctgtctcagttacagttgttaataaagaagtggagaagctgtagccagctcttgctttatgagttgcagtcagctgtgtctgaagagaacaagaaactaagccttactcaattgatagaccactatgggttagatgataaattactacactataacagaagtgaagaagaatttatagatgtttaattcctgatttttgctccagaatatctttgagaatgacaacttaattaaaagatacttaggcactttttttttttttttgagactgagtttcgctcttgtcatcctggctggagtgtgatggtgcgatcttgactcactgcaacctctgcctctcgggttccagcaattctcctgcctcagcctcccgagtagctgagattacaggcgcccgccaccatgcccggctaatttttgcatttttagtagagactgggtttcaccacgttggccaggctggtctcgaactcctgacctcaggtgatccaccgcctaggcctcccaaaaccattagggctcagaggaaggtatcccaatgaatatcaattaagggcactttaatatataaattataaactaagttctaaaaggaaaattagtattttggatagatttgtcaaaacgacatttaagtcatgtttaaaaagtcatttgggcagttctggaaactagttttaatacatttgttttttatgacaaaaagttttattttaaatgttaaaaattgtccaatctggtgaatgtctaaccctaaagtttaaaaatttctgcctcctaagtttatgtaccttgtttccatccatttaccacatatttccatctgatagtctagcaggtaattaaacttatatgtccaaaaccata

SEQ ID NO: 8400 - protein, 245 aa, Homo sapiens; identical to SEQ ID NO: 1228

SEQ ID NO: 8401 - DNA, 2190 bp, Homo sapiens
ggaatggcggagggaggtaccctgctgaggggaaggggggatccctgacacctgggcttccccgggagtcggctgtggagtcgagttgagctccctttccgggtctggggaactcaacctcaccttatgcctggggtctccggggaactagtgggctttctgcaacggggggaaggaggggacgactcccgcccctagtttacccctcaaaagttaatgcctttgtcggaggaagcaatttcagtccactctccttttcagtccctgttggccgcttaaactaaaaggctacagacgggcttaaatgcgtctccgctgtgtttcttatgcctcgggccggcagggtaacgggttctagtcacagcttgtagagttcaggatgggtgacattcaggtcctattgtttttgagtcaaggtttcggctatagcttcttgaattatgaagctgtcataataaagaattcctgattatctaaagctgttattcttccctacttccaaggcagaatttgaatatattttggtggatgaaacgaaaacaaggagagtcttgtgactatgagatactagctggttgatgtatcatgaaaaacttagtggtccctatgtgggaaggtaaatggaaaactgcaaaaagagcaagaatgaattacaaagtgaaattagaagaaatatctggcttacttgtggatgctttgtacaccaatacaatatattatttgataaaagtcgactatagagaggtgtggttaattcgattattttataatttttcttttttagagaaaaaccaagatttcactttcaagatggaaagtccgtcagactcagctgtggttttacctagcactcctcaggcctctgcgaatccatcatctccctatacaaatagttcccgaaaacaacctatgagtgcaacacttagagaaagattaaggaaaacaagattttcatttaattcctcttacaatgtggtgaaacgtcttaaagtagagagtgaagaaaatgatcagaccttttcagagaaaccagcatcttccacagaggaaaactgtttggaatttcaagaaagttttaaacatatagacagtgaatttgaagaaaatacaaatttgaaaaatactttgaagaatctcaatgtctgtgaatctcagtcacttgattctggatcatgcagtgctctccaaaatgagtttgtgagtgagaagcttcctaaacaaagattaaacgctgaaaaagccaaattggtgaagcaggttcaggagaaagaagaccttcttcggaggctaaaactagtcaaaatgtatagatcaaagaatgatctgtctcagttacagttgttaataaagaagtggagaagctgtagccagctcttgctttatgagttgcagtcagctgtgtctgaagagaacaagaaactaagccttactcaattgatagaccactatgggttagatgataaattactacactataacagaagtgaagaagaatttatagatgtttaattcctgatttttgctccagaatatctttgagaatgacaacttaattaaaagatacttaggcactttttttttttttttgagactgagtttcgctcttgtcatcctggctggagtgtgatggtgcgatcttgactcactgcaacctctgcctctcgggttccagcaattctcctgcctcagcctcccgagtagctgagattacaggcgcccgccaccatgcccggctaatttttgcatttttagtagagactgggtttcaccacgttggccaggctggtctcgaactcctgacctcaggtgatccaccgcctaggcctcccaaaaccattagggctcagaggaaggtatcccaatgaatatcaattaagggcactttaatatataaattataaactaagttctaaaaggaaaattagtattttggatagatttgtcaaaacgacatttaagtcatgtttaaaaagtcatttgggcagttctggaaactagttttaatacatttgttttttatgacaaaaagttttattttaaatgttaaaaattgtccaatctggtgaatgtctaaccctaaagtttaaaaatttctgcctcctaagtttatgtaccttgtttccatccatttaccacatatttccatctgatagtctagcaggtaattaaacttatatgtccaaaaccata

SEQ ID NO: 8402 - protein, 307 aa, Homo sapiens
MKNLVVPMWEGKWKTAKRARMNYKVKLEEISGLLVDALYTNTIYYLIKVDYREVWLIRLFYNFSFLEKNQDFTFKMESPSDSAVVLPSTPQASANPSSPYTNSSRKQPMSATLRERLRKTRFSFNSSYNVVKRLKVESEENDQTFSEKPASSTEENCLEFQESFKHIDSEFEENTNLKNTLKNLNVCESQSLDSGSCSALQNEFVSEKLPKQRLNAEKAKLVKQVQEKEDLLRRLKLVKMYRSKNDLSQLQLLIKKWRSCSQLLLYELQSAVSEENKKLSLTQLIDHYGLDDKLLHYNRSEEEFIDV

SEQ ID NO: 8403 - DNA, 5763 bp, Homo sapiens
atcaccctctggacaagagaacgggcgagcgggagctaggagggaagagtggagaggaccggcgaggcgcgccagccggagccacctccttcccggccgccccctccccactccccctacacacacacgctcgctcgctcgccggcgcgcgcacaccccccgcgccggacccgcacctcggcgggcgccacacactcggcagcccgagccgcggtagccgcagcgggatggaggcggcgcgcacggagcgccccgcaggcaggccgggggcgccgcttgtccggacggggctcctactcttgtcgacgtgggtcctggccggcgccgagatcacttgggacgcgacaggcggtcccggacgcccggcggccccggcttcgcggccaccggcgttgtctccactctcgccgcgggcagtggccagccagtggccggaggagctggcgtcggcgcggagagccgccgtgctggggcgccgggccggaccagagctgctgccccagcagggcggcggcagaggcggtgagatgcaggtggaagccggagggacatcaccggcaggcgagcggcggggccggggcatcccagctcctgccaagcttggcggcgcgaggaggagtcgccgggcgcagcccccaatcacccaggaacgcggggacgcctgggccactgctccggccgatggttccagaggaagccgtccccttgctaagggttcccgggaggaggtgaaggcgccgcgggctggggggtcggcggctgaagacctccggctgcccagcacctccttcgcgctgaccggggactcggcccacaaccaagccatggtgcactggtcgggacacaacagcagcgtcatacttatcctgacgaagctgtatgacttcaacctgggcagcgtgactgagagttcactatggaggtcgacagattatggcaccacctatgaaaagctgaatgacaaagtgggtttgaagactgtcctcagttacctctatgtcaatccaaccaacaaaaggaagattatgcttctcagtgatcctgagatggagagcagcatattgatcagctcagacgaaggggcgacctatcagaagtatcggctcaccttctatatccagagcctgctctttcatcccaagcaagaggactgggtgctggcctacagtttggatcaaaagctctacagctccatggactttggaagacggtggcaactcatgcatgaacgcatcacacccaacaggttttattggtcggtggccggattggataaggaggcggacctggtgcacatggaggtgcggaccacggatggatatgctcactacctcacctgcaggatccaggaatgtgccgagacaactagaagtgggccttttgcccgctccattgacatcagttccctggttgtccaggatgaatatatcttcattcaggtaacaactagtggaagagccagctactacgtgtcttatcgaagagaggcctttgctcagataaagctgcctaagtactcgttgccaaaggacatgcacatcatcagtacagacgagaaccaagtatttgctgcggtccaagaatggaaccagaacgacacgtacaacctctacatctcagacacgcgtgggatttacttcactctggccatggagaacatcaagagcagcagaggtctaatggggaacatcattattgaattgtatgaggtagcaggtatcaaagggatatttctggcaaacaagaaggtggacgaccaggtgaagacatacatcacttacaacaaaggcagggattggcgcctgctgcaagctccggatgtggacctgagaggaagcccagtgcactgcctgctgcccttctgttccttacatctgcacctgcaactctctgaaaatccatattcctcaggaagaatctctagcaaggagacagccccaggacttgtggtggctacaggcaacattggcccggagctctcatatactgatattggtgtgttcatctcctccgatgggggcaacacatggagacagatctttgatgaagagtacaatgtctggttcctagactggggtggtgccctcgtggccatgaaacacacacctctgccagtcaggcatttgtgggtgagttttgatgagggccactcttgggacaagtatggtttcacttcggttcctctctttgttgacggggctctggtggaggcaggaatggagacccacatcatgacagtttttggccacttcagcctccgctccgaatggcaattggtgaaagtggactacaaatctatcttcagccggcattgcaccaaggaggactatcagacctggcacctgctcaatcagggagagccttgtgtcatgggagaaaggaaaatattcaagaaacgtaagccaggagctcagtgtgccctgggccgagaccactcaggatcagtggtctcagaaccctgtgtctgtgccaattgggacttcgagtgtgactatgggtatgagagacatggggagagccagtgtgtcccagctttctggtacaatccagcatccccatcaaaggactgcagccttggtcaaagctaccttaacagcactgggtatcggcggattgtgtccaacaactgcacagatgggctaagggagaagtacaccgccaaggcccagatgtgccctggaaaagcccctcggggcctccatgtggtgacgaccgatgggcggctggtggcagagcaggggcacaatgcaactttcatcatcctcatggaggagggtgatctacaaaggacaaacatccagcttgactttggggatgggattgctgtgtcctacgcaaacttcagccccatcgaggacggcatcaagcacgtgtataagagtgcggggatcttccaggtgacagcctatgcagagaacaaccttggctcagacacagctgtcctcttcctgcatgtggtttgtcctgtggagcatgttcatctccgagttccatttgttgccataagaaataaggaggtcaacatcagtgcagtcgtgtggcccagtcaactggggacccttacctatttctggtggttcggcaatagcacaaagcctctcatcactttggacagcagcatttccttcacattccttgcagaaggaaccgacaccatcacagtccaggtggctgctgggaatgccctcatccaggacacaaaagagattgcagttcatgaatatttccagtcccagcttttatcattctctcctaatctggattaccacaatcctgacattcctgagtggagaaaagatattggcaatgtcatcaagcgagctctggttaaagtaaccagtgtcccagaggaccagatcctcattgccgtgtttcctggtctccccacttcagcagagcttttcattcttccacccaagaacctgacagagaggaggaaaggcaatgaaggggacctggaacaaattgtagaaacactgtttaatgctctcaaccaaaatttggtccagtttgagctgaagccgggggtacaagtcattgtgtatgtcacacagctgacgttagctccattggtggactccagtgctgggcacagcagctcagccatgcttatgctattatcagtggtatttgttggcctggctgtgtttttgatctacaagtttaaaaggaaaatcccttggattaacatctatgctcaagtccaacacgacaaggagcaggagatgattgggtcagtgagccaaagtgaaaacgcccccaaaatcacactcagtgactttacggagcctgaggagctgctggacaaagagctggacacgcgggtcataggaggcattgccactattgcaaacagcgaaagcacaaaggagatccccaactgcactagtgtttaataccagcaagccacgtggtcaaccacctttctgactttttatttttgatgattactattactattattatggaaaaattaaaatgtcttttttaccttttgtttaccaagggccccttcataaatagcaggcaaatgcctagctttgggagaaaagggcattcttagctgattgaaatgagacaaagggaataaatggctgtatttgtgctaagagcaaaggatgcatcttcccacagcctcctcgctttactctgccattggtagcttaaagactttctttttccttgtggtctcccttttttcaaaattgaagttgggttggctctttgtgaacctctcatccccacagcagaatcaccaacactctccgcttcccccagcacacacacatacaacacagatcatttcccagttagatccgcaggaagtaggttggtgggggtggatgtagctgcagaaagcatgcacaactttgtgaaagaggccctgccttgtgcatgtccatagtgaggctacagatggcttattgtatataattacaatgtaaatagctttttatttcctaagaaataatttaatgtttagtaaaaaagaaaacagaaaaaagaaagatgcgtgtgttggcttacgcactggccctcagagctgaccaacccgccaggcctgctcaatgcattgggtttggatgctctcctgttgtctgtcacacttaactcttgcatctccttgtccatgccatagctggtttctacttatgtatataaaggggggtggggggaggggcttctctggggcaattgataaaggaaggactctagtgacatcatagaacatggcagtcgtttttgttccaagaatgatatgaaaggtgaagaagaggcccactagaggcttcatactgagacccagatgggggaaaacagcttcctctctaaaaggaaaaacttgatatttatcagtctgagaaaatatttttttctaaagaaggcagtcagtggatcttaaaatgacaatctgtttttaaattggattctatgaaaatgcataatgcttatggtgaattctcaggctattctgagctcagaaaagtcccctgggcactaggtaaagcccagtgaatgtctcttggcatgggaggagttaaagaggttggaagggaagaggcatttgtggaattatgagttcatgcaaaactctccaggccaagtaggggtctagcctttaatgatattagtcaaaggcaattttagcaaagctgtgctatttgcttgtcagatgtacacaacttccttaaagtcaaatgtctgccttcagttcccttaaggtagttcttgcctctggggtgagtggctttcaaagccttttagcttttccagcacctcagccccttcacacatttacacataccaatttttttcaatagggtcacgttaagccatgctgtaagcattgtttttattttcaggcttagcctgagcacacttatttttgaaaatgatataatgtatatatatgggaggaaaggccacattttgtacctgttaatttttgtgggatgttgttcccattcttctttgtgagacagagagaatgtgatatagagaaatctggctggctacagtgtagatcagtattaggaatatttctaaagatcctgcttttttgtttcaagggttaaatggggcagacaattgcaatacttgtactaaacactggaatacaaatgcatgactcatatctatatatacagtatatgtacatatactgttcttggttttattgttccacttgaatatttctactgtaaaaaaaagacagtggttttgaaattgttgaaaataaatgtatttttgtacatcaaagct

SEQ ID NO: 8404 - protein, 1222 aa, Homo sapiens; identical to SEQ ID NO: 1232

SEQ ID NO: 8405 - DNA, 671 bp, Homo sapiens
aaaatgttgtccaagttggcatcagagctggagagttttaagaggtttagaagcctggccgtcaatacctacaacagttatggaggcaaatgaaacaggcctttgaaaagaaggtaatgtggagttggtagcctccatattgattaagaaggggacctacttaccctctactgtaagagttacccgaagcatctgtgatggtccaggaggcttctgagatgaccaggcagcatcagtcttcagccactaagccgagaagatctgggaaggagtcagtcagagagccttgggccagggttccaggggctctgggagtggctgccagattgaacaggagaatctggaaccaggagtgagcagagctggccccaggccttggtggctgtgtactagttctgtgacctgcaatcagtcacttaacttctgtgagctcctctctttccgtctgtaaaaaaggaatatgtactacccacttcctgagtagatgttgaagatgttgtaaaaggttcgagtcaaccaattaaaagcaatagatcacatgaagatgagtatatcttctgtttgttgggacataatccagagaggatctttctccccagatattatgggatggccacattttacagctgagagtggtaagtgatcaggtgaagcagagtaagtacctgtgg

SEQ ID NO: 8406 - protein, 52 aa, Homo sapiens
MVQEASEMTRQHQSSATKPRRSGKESVREPWARVPGALGVAARLNRRIWNQE

SEQ ID NO: 8407 - DNA, 575 bp, Homo sapiens
gcatgacctctgctaaaaaaagtaggatgaatcctaaggaagttaatagctgaaggctgcagctactagattccagagagtggcctggggcacaagatactcaaccagagcagacagtgtcagcctctgtcatggaaagcacagagcttcctatcctacatgattgtctattgtaatgccaaattacaagcaatggagtctcactgtgttgcccaggctggagtgctgtggcatgatctcagctcactgccatctctgcctcttgagttcaagcgattctcctgcctcagcttcccaagtagctgggattacaggcgcacgccaccacgccccgctagtttttgtattttcagtagagacggggtttcaccatgttggccagactggtctgtaactccagacttcaggtgatctgcccaccttggcctcccaaagtgctgggattacaggcctgagccaccatgcccagccaatttccatatattttttatactgggatttcagagagtaatttcctcttcatgtgtaaccagttatgtgaattaaaacagattcagccttcttttacggttgtg

SEQ ID NO: 8408 - protein, 83 aa, Homo sapiens
MIVYCNAKLQAMESHCVAQAGVLWHDLSSLPSLPLEFKRFSCLSFPSSWDYRRTPPRPASFCIFSRDGVSPCWPDWSVTPDFR

SEQ ID NO: 8409 - DNA, 465 bp, Homo sapiens
cagctctgtcctcttcaataatggtgcatggtgaccctcaatatgagatacaagcatctgttatctggagactggctgctctcagtgaaaaaagaaggagtactgctaataggctttcacctcacagcctgaatgccaggccaccacacaagaactgaagaggccaggctcctccccattctcccagtgtgcaggtgggcccctcatccattgcaggcatgtgcagaaaagaccctgggcaggttccctcatctgcacaaaagcatctgatgtaaacacttgtggggtgagtcggagattctctggggaccctccctcatctgactcctgcatctatcactaccattacctcaaaaacaataaaaaagttaaattggcatttttttttaacctaaaggctagtgtatctggcaacatacaagatacatacctctcatagaagattaaaagctttttcgtaccagg

SEQ ID NO: 8410 - protein, 45 aa, Homo sapiens
MVHGDPQYEIQASVIWRLAALSEKRRSTANRLSPHSLNARPPHKN

SEQ ID NO: 8411 - DNA, 2160 bp, Homo sapiens
atgaccatgtctgaggatgcaacaaaactagcatctatctcagaggacagcaacgtgaaggaagccaacatgcagcaaccagcattctcctctgccaagggccacaacgtactttatgcttttaggcacaaggaggaaagggaacatgtggatttaccaagaataaacctgaaatggaaaaatgtgggaggatccagaggaaggctgtggaacccatgctctgagagaagcactgtccaaggtacacctgcgactcagcaagaagactggattgctgtgcaactcgtggaaggttctggaaggtgttcaggacgagtcgaggtgtattttgaaggcgtgtggggcatggtgtgcgatgacctgtgggatgagaaggaagtgcaggtggtgtgccggcagctgggctgtggggcagccatctctgcccctggagaggcccactttggccagggctccggccccattcttctggacgatgtgcagtgttccgggattgaggactacctggaggagtgctcccatgctggctggtccacccacaactgtgggcacggggaagacgctggtgtcatctgctcagatgctgagatcctaacgccatttcctggtgactggccacaattgcaactagtgaatggctcaggtaggtgttcggggcatgtggaagttttccaccatggccagtggggcagggtttgcgacgaccagcgggacatgaatgaagctgacgtggtgtgccggcagctgcactgtgggtgtgccctcgcagcccctgctgaggcccaatttggcgaaggcagaggcgaatttctactggatgatgtggactgtactgggaaagagagttttttgggacaatgtcctcatgccggctggggcctgcataactgtggccccagagaagatgccagcatcatctgcgcaggtaatggccacctctccctccacaatgccgctcactacatctccactcaccccactggcagtgcttccacctatgtaattgaccatctgccacttgggtgcttctttattacagttctacctgctgccatctcaactcaactctctcctacaactgctgcacattcggcatcgtcagcagttctgtcagcttccaccaccccggaagatgttaaccacccaaccatatcatcagtgctacctgtggctgactcagcatctgccagccgtagggccaacgtgcctgggcccagcccttcagttggggtcacttcggagacttcactggccataacccctgtgtcctccacacttccatcaacagggcacatggaggaccgtgtgttgcgtgacgacctctggaatctggccaaggccactgtcgtgtgccgccagctacagtgtggacgggctgtggcagccccaacaggggctcacttcggggcaggctctgggaaaatcctgctggatgacgtgcagtgtgtggggagcgagagccacctggggcagtgcgtgcatgggggccgggccaggcacaactgtgggcacctggaggatgccagtgtcatctgttcaggtcaagcactgtcattaactaccacagagcccactgtgcttcccccaactcctccaacaggtgctgggttatctgcaaccatagccacaacagagcctgtgtccctgccatccacacccatgcccctggcaggagcctggatggaggtgaggctgctgaacggcacaggaaggtgctcaggccgtgtggaagttctcgtccagggcacgtgggggaccgtgtgtgatgatctctgggacctggctgaggccactgtcgtgtgccgccagctgcagtgtggccaggctgtggcagcccccacaggggcccactttcgggcaggctctgggaagatcttactggatgacatgcagtgtgtgggcagtgagagccatctgggtcaatgcatgcgtggggaccaggccaggcacaactgtgggcacctggaggatgccagtgtcatctgcacaggtgctggcaattcaccaggtctcgctccaaccacagagcctgaagctgtcacttcatcatacacaccatcagcgatagatgaatgtggtagagaagggagagtggatgatcctccctacctgaatctgcctcttggggagccaaccaaaacactgactggacacatttga

SEQ ID NO: 8412 - protein, 719 aa, Homo sapiens
MTMSEDATKLASISEDSNVKEANMQQPAFSSAKGHNVLYAFRHKEEREHVDLPRINLKWKNVGGSRGRLWNPCSERSTVQGTPATQQEDWIAVQLVEGSGRCSGRVEVYFEGVWGMVCDDLWDEKEVQVVCRQLGCGAAISAPGEAHFGQGSGPILLDDVQCSGIEDYLEECSHAGWSTHNCGHGEDAGVICSDAEILTPFPGDWPQLQLVNGSGRCSGHVEVFHHGQWGRVCDDQRDMNEADVVCRQLHCGCALAAPAEAQFGEGRGEFLLDDVDCTGKESFLGQCPHAGWGLHNCGPREDASIICAGNGHLSLHNAAHYISTHPTGSASTYVIDHLPLGCFFITVLPAAISTQLSPTTAAHSASSAVLSASTTPEDVNHPTISSVLPVADSASASRRANVPGPSPSVGVTSETSLAITPVSSTLPSTGHMEDRVLRDDLWNLAKATVVCRQLQCGRAVAAPTGAHFGAGSGKILLDDVQCVGSESHLGQCVHGGRARHNCGHLEDASVICSGQALSLTTTEPTVLPPTPPTGAGLSATIATTEPVSLPSTPMPLAGAWMEVRLLNGTGRCSGRVEVLVQGTWGTVCDDLWDLAEATVVCRQLQCGQAVAAPTGAHFRAGSGKILLDDMQCVGSESHLGQCMRGDQARHNCGHLEDASVICTGAGNSPGLAPTTEPEAVTSSYTPSAIDECGREGRVDDPPYLNLPLGEPTKTLTGHI

SEQ ID NO: 8413 - DNA, 3743 bp, Homo sapiens
gtgcctccccaggagcctggatggaggtgaggctgctgaacggcacaggaaggtgctcaggccgtgtggaagttctcgtccagggcacgtgggggaccgtgtgtgatgatctctgggacctggctgaggccactgtcgtgtgccgccagctgcagtgtggccaggctgtggcagcccccacaggggcccactttcgggcaggctctgggaagatcttactggatgacatgcagtgtgtgggcagtgagagccatctgggtcaatgcatgcgtggggaccaggccaggcacaactgtgggcacctggaggatgccagtgtcatctgcacaggtgctggcaattcaccaggtctcgctccaaccacagagcctgaagctgtcacttcatcatacacaccatcagactggagtgcagcagcgtgaactcagctcactgcaacctctgcctcccgggttcaagcagttctcttgcttcagcctcccgagcagctgggactacaggtcaagcactgttattagctgtgcccaccacaaagcctgctgtgcttccctcaaccccctttccaacaggtgatggattatctgcaaccatagccacgacagccatgaccctgccatccacacccatgcccccagcaggtgccaagtcttcaatcacttctccaacagctcctgagtcatttgctgctcctggggcaacaaaacccacaatttatggtgctgattccacagctgctctgcctacagcccatgagaacctgctccccacatcattggtgatatcagtggctcaacacccaccgtcttctgcaccaccagaaaaatctcggtgtggtggcattattaccaactcatctggagcgattaggaatcccccacagaatgaaatgcatgacaacatcacttgtgtgtgggaaatcaaggcaaatgcatctgatcatatactgctggcatttccacatcttgaccttgactgcaccaatgaatattttgaaatcctggacggtccaccatcctcagtaaagtcattggggaggacctgctctggcttccaacacacctacatctcctcctccagctcaatgaccctcgtgtatttccgaagcttcaacaacctaggataaaacttcattgcttattattactctgcacccaaagaggcagtgttgcagaccccacatctaatcaccatcccgacagcaacacccagaacagtaacagcaagagcaggggactggccggagctgcagctggtgggtggctctggccggtgctcaggacgcgtggagattctccaccagggcgcctggggcaccgtgtgtgatgacctgtgggacctgaacgaagctgaggttgtgtgccggcagcttgggtgtggtcgagccatgtctgcccttggaaaggcccactttggccccggctcaggagacatcttcctggacaacctccagtgcgctggtgtggagcgctacctgggccagtgcacccactcgggctggtcagagcacaactggccaccacgaggatgccagtgtcatctgctcagatgctgaagaatcacttgctaacagtccagagggctggccggagctgaggctgatgggcggctcaggccggtgcttggggcgcgtggagattctccaccagggtgcctggggcaccgtgtgcgacgacctgtgggacctgaatgaagccaaggttgtgtgccggcagttggggtgtgggcaggctgtttctggccctggcgaggcccactttggcccaggctcaggagacatcttcctggacaacctccagtgcactcgggtagagcactacctgggccagtgtacccacttgggctggtcagagcacaactgtggccaccacgaggatgccagtgtcatctgctcagatgcggaagacctacctccacccacacctccagattcttctacagcttctcaggatcacataaaaggaggaagtaactcttgtggaggggtcatttctagtctctctggctcattttctagtccacagtatccagaaaactacccaacagatatccagtgtgtttgggagatccacatgggtgcaaaatttcacatagaactcataattccaagtttgaaggttatacagtccaaagatagacgtctttgtcatctccattagagatgaggagtctgaggctcagagaggataactaatttgcccaaggccaacccatctagatctgtctgatgtcaatgacccatctgttcaccaatatgtgggtctgtaaaagagtctgcatgaagcccttcttcttgtgcatgacacacatcgtgttacaaacacagcaagactgtagaattccatgatcattagctccaggcatgcactgaattgcgttccatcatgactgtaccacaaccatggattcagacatgcactaagccaaaaatgcctcaggatatatttgttgactaaaactttagggacacaattagccacaatgaggttggaagatatccttggatgtccctatgactccgttgaaatcttcaatggtcccaggattgcctcgctctccatggggaagttctgtgcccctgaaactgtgatattcttctcctcctcacacatcatgacagtggtgttccaaagtgattctatgaaaaccaacactggcttttatgctcttttcaatgccattcctcagggtgaaagggagtcagatgctggggactgggctccagatgtgattcctccacccccagatatcattcctccagcccctataccacaaggaggaagtaactcttgtggaggagtgatttcaagtctctcaggttccttctccagcccttggtaccctacaaactaccccaccaacttggagtgcgtctgggtgatacacgtggctgagaaattccacatagaactgatgatcccaagcctgaagccctggactagaatcagactcatagtgccaaccaagaaagacgagatctctaccctcacagagtttatattctagatgatgagacaaatggtactcagataaaccaatgactcaatggacaatttcaactagtgataaattgaaaaatgctatgaagaaaaaaatatacatacatgataataggatagaaaataaagaaggagaagacagcaacagattagaggacatctatgggtgtccttacgactttatcgaagtgttcgatggacaacaggctgcctcactctccatgggcaggttttgtgctgggacagagctcacgttcctttcttcttcaaacatcatgaccacagtgttcagaagcaacgccatgatcaccaacacagggttttatgctctgtacaacaccgttcagcaagatgaaagggagaacggcttaggagaactgaagagagatgagctacccacaccttctatgtcttccactgcctctctgccttacctaggagcatctgctgctgtgagttacccaacctcaggtgcagtgactcacgcctgtaatcccagcactttcggaagctgaggtgggctgatcacctgaggtcaggagtttgagaccagcctggccaacatggtgaaaccccgtctctactaaaaatacaaaaattagctgggcttggtggggcatgtctgtaatcccagctactcaggaggctgaggcaggaaaattgcttgaacccgggagatggaggttgcagtgagctgagatcatgccactgcactccagcctgagcagcagagcaagatttcatctc

SEQ ID NO: 8414 - protein, 185 aa, Homo sapiens
MGGSGRCLGRVEILHQGAWGTVCDDLWDLNEAKVVCRQLGCGQAVSGPGEAHFGPGSGDIFLDNLQCTRVEHYLGQCTHLGWSEHNCGHHEDASVICSDAEDLPPPTPPDSSTASQDHIKGGSNSCGGVISSLSGSFSSPQYPENYPTDIQCVWEIHMGAKFHIELIIPSLKVIQSKDRRLCHLH

SEQ ID NO: 8415 - DNA, 734 bp, Homo sapiens
ggaggagcttcccagacgtgtagagcttatgaagtttaggaagcagcttcccagacatgtagagcttatggagaggtgagggagccaatctcagccacattcagcttcctggagagaatgaccaaagggcgacgcttcaacccaccttcagacaaggatgggagatggttccctcacatcgggctaacgcaaaagacaccagaatccatcaccagtgctacgtcaaaagagccccagagtccacacttgcctcggcaagcggaggggaagctgccgcccatatacaaagtccgggagaagcaagcagtgaataaccagttccccttctccgtgcatgacaatcggcacagcttggagaactctggatgctaccttgactccgaaagaatgacagcaacggacccacagggagaaccagacaagagacaagagttctatgagccggtgaggacccagtccattcctcatccaggcctgagaactaatgcacccctccttgcagtgtgagctctttgggagcaagtttctgtcacccattccccagagtcctgactaatagaatgtgtattagttgggaagaaaaggaccttttgtcttagcctagctagttagtaaccaccaggatttattcagcattcttggaaaaataaatttccagctatggagaaatcctcttattctgcttgcctgtgtgggcgcaggtattaatagggctatctccctggcaggaagaa

SEQ ID NO: 8416 - protein, 129 aa, Homo sapiens
MTKGRRFNPPSDKDGRWFPHIGLTQKTPESITSATSKEPQSPHLPRQAEGKLPPIYKVREKQAVNNQFPFSVHDNRHSLENSGCYLDSERMTATDPQGEPDKRQEFYEPVRTQSIPHPGLRTNAPLLAV

SEQ ID NO: 8417 - DNA, 922 bp, Homo sapiens
ggaagaggctgagaagtaaagatcaggaacaaggaggaggaggagcttcccagacgtgtagagcttatgaagtttaggaagcagcttcccagacatgtagagcttatggagaggtgagggagccaatctcagccacattcagcttcctggagagaatgaccaaagggcgacgcttcaacccaccttcagacaaggatgggagatggttccctcacatcgggctaacgcaaaagacaccagaatccatcaccagtgctacgtcaaaagagccccagagtccacacttgcctcggcaagcggaggggaagctgccgcccatatacaaagtccgggagaagcaagcagtgaataaccagttccccttctccgtgcatgacaatcggcacagcttggagaactctggatgctaccttgactccggcctgggacgtaagaagatctctccagataagaggcaacatgtttcaagaaattttaatctctgggcatgtgactatgttccatcttgtcttgatggcttttcaaataaccaaatatcatacgtatataaagaagccatggtggtctcaagcttcagacgctttccacgatgctataaagagatatggaacgcttttacatttcttcctgagagaagctatacagaggttttgaaaaagaagcccaaagtaaggttcactgttgacaaaaaggttgtttcttcactggagtcctaatcctcccagaagatttttgatgaattttgtaatactggtatttcatcagacatcctaaaagtatatgttttctgatccagcaccactatttaatttttaaagtacttttatgatttttataaggtcaaaaaacattcaaatccttgtgaaatgaatttgtgatgacatacgcatgtgtaaataaacttttcagatggccacattta

SEQ ID NO: 8418 - protein, 186 aa, Homo sapiens
MTKGRRFNPPSDKDGRWFPHIGLTQKTPESITSATSKEPQSPHLPRQAEGKLPPIYKVREKQAVNNQFPFSVHDNRHSLENSGCYLDSGLGRKKISPDKRQHVSRNFNLWACDYVPSCLDGFSNNQISYVYKEAMVVSSFRRFPRCYKEIWNAFTFLPERSYTEVLKKKPKVRFTVDKKVVSSLES

SEQ ID NO: 8419 - DNA, 3142 bp, Homo sapiens
actggttccttgcagctgtgactccccagggtaagaggcaaagagccaccaggtcccagctgaggaagccctgtggtcagctcagacagggatgcggactgaagccgaagcaggtgttagtaattgtcgtacctacagacgaggaaaccgagcctccatgaagtgaagtgactcacccacagtcacacagctaatatatgccagagcccacagcagaacccagacgtactgaggccaagttccatgccagcataaaacaggctccagttctccctggattccaggaacaccatctccttcctcgtcccttccatcccagggaaggtttacactgaaaattttttgtgatgaaaagatttgaagaagatgacaggagatggagaagcaccagctgatctgcagactccaaggaggtcccaggaagaggtgtcatccactaagatcttctgggacaggaaagccctgtgatacctcttacatcacaccaaacagagccccacaccaagaaaagagctgcccacacctcacagaagccatgttagtggacatttctccactctggaagccttcctgcgtggtggaggccagtgcagaccatcctctgcccagaagagttgcattctaaatgacccctcagagagccctctggatggccgcctctcccacaggtccctgcaatcacataaaaaacactcattgcagccaagatgcacaaagcacagtattgatttcatactcaggtttttccaaaacaaatcataaacccacaccaattatgtccaatcagttttatggataaagaagcctgagactctccaacaggagagcttgagtttcccttctcactcttgtgctgggtgtccttttcctacctccagaccatcacaaggatatctgtaatgtagatgaggccagtccttttgcccaatgttgacagacaagaggaagattccagggagaaatgccgcagcagcaaatgaatatgaatgatgcttttccactttgtgcttataaaatgccttttgtaccagaatctcaaagctctccaggaagcaaggctttgaatgggactttcactcggggtaaacatgagtggtcggagcttcccaagtcatttgtgataagaaagaacaaaagtccgggcacttttaaaatgcaatattcttgccttctgggtagtaaacaaagtgtgcagatggataatgacatctgtggattctggctccacttcctagagagaaaaaaaacatgtaaataaatacgtaaaaaattgtcatatgtggatgacacccttggttcatccagtagttaccattctgcctaacattcacgagctatggattctattactgggtcccttgtgactgcattacactgagaaagtaaaatatatttctcttcaatgcctgagggaagataaatgttatagaaatgtttagtaaaaaggtccagtcagtggctttgacacttgatgcttttgcactaagcagtgctgtccttttgttctctccattggaagcctccttgtaaatgtttaatagctaaatgactcaccagagtctgcaaaggtcaggcccttaactggaaaggcagaggggaactcagaagcagtctctatcagattgattggaaggttcatttgagaattctttccttctcatccttagtttaaggtgcacatgcagcatgaataactgcctgggctccagccaccgacatgcctgaacagcagacattagtgactctgacactcttcctaggattcattcagggtattaatcagcttcagaggaaaactcacaaacactctaagaagaattctgttgcaaaagtgatacctagcagagacagtctgcccttgcagtcacttgcattatatcccaaaagtcaatgctaagagcttgcaaaagaatttgagttcatcaggtgtccagaaaataaactccttcaaatgcagtcgaaatagtttcaataacttcaaatactctgcctgttatgaatctacagagcagcaattaaataattatcagttaatgattcaatgtcagatacctataaccaagggtgtcttgctattacactgaaaattacatattaaggttttgctggggtgcagaaaatgatcccccaaaatatagtgcttcggcatgccgagtactttgaaaatcggaaggttttagaaatcagccttagacccaagctctctttctgactttccttacctccttgtttctctgatcctctttctagaagcacctggagggactggactgactctctggaattttcttatctaacaaagcttctttccaaaaaaaaaaaggcaattgtcttaagaccaccccccccatctttaggaatctcatcaaatgaccaggaaagaagcaaagagacggagttgtcactatacccagatagactactcatctattctcgagggcaggtctgacaacctttgtgcaaggtgacgtttcactcctcaccttcccaacacctcccccagagctcagaggaacttttgtcatttactcctacacacctcatccccgccttccctaagaagagagggtagacaggcatctggaccctgctgggttattaggccattactcttctgcaattccccatggtatgcacgttaaaataaacgcatgccttttctcctgttgctctgcctttttcagttcattttcagcaaaccttcagagggtgaaaggggaagttttcttctttgtccctacattttgcattgtcttataccttgacatttttctactcgtcaagttaaactgtaaagcaaaatatagatcattagctgactaattatttttgagttaaaaagtagctagcatttggttttgggtaccacagtgtgtctaatatagtctttttagaagcaatgatctataaacattttttatcattcaccatttctggttgagtaaagtgactcacagttgtagtcctacctattcaggacgctgaggcaggaggatcacttcagccgaggaaggagttcaagtccagcctggacggtctctaaaaatattaaaatttaaaaaaaattctgaacatgcaaccccaatatgtatttatttgtaaatgatatactgtcactaatacattgacattaaacaagtag

SEQ ID NO: 8420 - protein, 82 aa, Homo sapiens
MEKHQLICRLQGGPRKRCHPLRSSGTGKPCDTSYITPNRAPHQEKSCPHLTEAMLVDISPLWKPSCVVEASADHPLPRRVAF

SEQ ID NO: 8421 - DNA, 370 bp, Homo sapiens
aggtcccagctgaggaagccctgtggtcagctcagacagggatgcggactgaagccgaagcaggtgttagtaattgtcgtacctacagacgaggaaaccgagcctccatgaagtgaagtgactcacccacagtcacacagctaatatatgccagagcccacagcagaacccagacgtactgaggccaagttccatgccagcataaaacaggctccagttctccctggattccaggaacaccatctccttcctcgtcccttccatcccagggaaggtctcctggttcttctagcccctctaacttcctctcatctctcctgtaacaacaatgatcagaatgatacctgaggaataaaccataagaaaaatg

SEQ ID NO: 8422 - protein, 66 aa, Homo sapiens
MPEPTAEPRRTEAKFHASIKQAPVLPGFQEHHLLPRPFHPREGLLVLLAPLTSSHLSCNNNDQNDT

SEQ ID NO: 8423 - DNA, 2600 bp, Homo sapiens
ccgaacctcttcgggagactacttctcgcggtatctgactcctaggctccgccctctgcacgccgctcacggtatctgacgctcaggctccgccccctgcatgtctttgttggcaaacagttctgggggtcgtccgatcctgcaggctgggaagttcaagcacatggctctagcttctggtgagaggtttcaggctgcgtcataatatggcagagaagatcaatgggtaaatggacatgtgtgaagaaaggcaaaaccagagaccgtccaggctggacttgaactccttcctcggctgaagtgatcctcctgcctcagcgtcctgaataggaagtggagccagaatccacagatgtcattatccatctgcacactttgtttactacccagaaggcaagaatattgcattttaaaagtgcccggacttttgttctttcttatcacaaatgacttgggaagctccgaccactcatgtttaccccgagtgaaagtcccattcaaagccttgcttcctggagagctttgagattctggtacaaaaggcattttataagcacaaagtggaaaagcatcattcatattcatttgctgctgcggcatttctccctggaatcttcctcttgtctgtcaacattgggcaaaaggactggcctcatctacattacagatatccttgtgatggtctggagggacctgtgggagaggcggccatccagagggctctctgaggggtcatttagaatgcaactcttctgggcagaggatggtctgcactggcctccaccacgcaggaaggcttccagagtggagaaatgtccactaacatggcttctgtgaggtgtgggcagctcttttcttggtgtggggctctgtttggtgtgatgtaagaggtatcacagggctttcctgtcccagaagatcttagtggatgacacctatgggggttgccagctggattaggtgaggcagagcacacagctctacctaaggggtcccattctcatctgggaatattctaggacataggacactacccaagaggcagagcctggagtggcattatacgggtgaaagatctgagtgccaggtccatataaatgagtggggttggggggatcgaggtgcttagagaacaggagagctgccacaggaagggatggtacccacagggaggaagaaccatgtctcagattccttcctttatacctcttcctgggacctccttggagtctgcagatcagctggtgcttctccatctcctgtcatcttcttcaaatcttttcatcacaaaaaattttcagtgtaaacctaagtagagagaacagtaaaaggaacccccaggggccgtcaccatcacccaccatcaacagcgatcaatgggccgtctaagtccgttttccctactttcatccccgctccagattattatcaaaagtagctcatccctagttatatttcatttaatcctctcagttgcatttttttctggccacgttcttctgtctgtcaatcatggtcttaagtcagacagtctgctgggttggctaggaaaagactctttctttctcaagaaagagttgtaagtaattttgagagaaatgttgcagattgaccaaacaaggtatgcttaatttagttcaattcatcagttacttattgagtcctaggcttagtgctggattcaacatatcagtcaatcatggtttctggcctacagggttcagtgctctagttctgggtgtgcgacgaggaccacagcaagtattcactcaggaaaggcagaatgtggccacagggaaaggaaaggtacaaggtgtggtggaggttacaaggcatgacaaacacactgggctgggaatggtaacagtggaagaggatcaggaagggtcgtgaagcctgaggcattggagagggacttggaaacctgggcagacagtgggacggtgactgcaaaacactcaagtgtgcaggtgggaatggcagtgggggacaggcgagcctagcagcgagaacacatggtgcaaggggccccatgggggttctggggtggaggaggtaggcaattgggctctcaaagaaacccttgggctttttctagcttaataataaacaattattatttctaaggaaaaagaaaactggatttctagaagcatggctattaaaaaaaaaacaactccagaccccaattaggaaactgaaaggaaatcaaagtgggcctaatggaaattaggtagtaggggcaataaaagaaaatgcaggtagctgcctaaaatccagtggactccaggtccaccagccaggcaccacattgttttaacctataaatgaagtatgtccatgactctcactacataaaatggaagttaagccatagtccttttccaatgtgatctgaaaatgtactgtttttgcctctagcaaagcaaatatatagacagaaaattcctagcactgctttcacgcgagggatgacaaaggtgacagactcgggcaaaatgttcatattctatacgtgaaatggaatggtaacttgatttttcaaaaggataagattcttgttacaaatttaagcatatttattaaagaaaactcaaatt

SEQ ID NO: 8424 - protein, 121 aa, Homo sapiens
MFTPSESPIQSLASWRALRFWYKRHFISTKWKSIIHIHLLLRHFSLESSSCLSTLGKRTGLIYITDILVMVWRDLWERRPSRGLSEGSFRMQLFWAEDGLHWPPPRRKASRVEKCPLTWLL

SEQ ID NO: 8425 - DNA, 627 bp, Homo sapiens
tggcaaacagttctgggggtcgtccgatcctgcagagaccgtccaggctggacttgaactccttcctcggctgaagtgatcctcctgcctcagcgtcctgaataggaagtggagccagaatccacagatgtcattatccatctgcacactttgtttactacccagaaggcaagaatattgcattttaaaagtgcccggacttttgttctttcttatcacaaatgacttgggaagctccgaccactcatgtttaccccgagtgaaagtcccattcaaagccttgcttcctggagagctttgagattctggtacaaaaggcattttataagcacaaagtggaaaagcatcattcatattcatttgctgctgcggcatttctccctggaatcttcctcttgtctgtcaacattgggcaaaaggactggcctcatctacattacagatatccttgtgatggtctggaggtaggaaaaggacacccagcacaagagtgagaagggaaactcaagctctcctgttggagagtctcaggcttctttatccataaaactgattggacataattggtgtgggtttatgatttgttttggaaaaacctgagtatgaaatcaatactgtgctttgtgc

SEQ ID NO: 8426 - protein, 73 aa, Homo sapiens
MFTPSESPIQSLASWRALRFWYKRHFISTKWKSIIHIHLLLRHFSLESSSCLSTLGKRTGLIYITDILVMVWR

SEQ ID NO: 8427 - DNA, 332 bp, Homo sapiens
tgcagccgtcagcgctgccggcggctcccgttacgtgaattagtgagaggttcaaacttcttccccaggcttcagtgtcacatcttttcacacgggcaccccgagggcccggactggaaaggttcccaggaaacgatgccagcgctttgagtagcgaagaggtggagaaatagcccgggccgtttgcaagctttgaaggtccaggctctctttcacactcctcagtgtcatctcaaactgtcaaacgcagccacatccgttatacaatacatgttttgtagtaaaagtgttttgttgtgccgtaagatacagaaagtgtttttaaaaattaa

SEQ ID NO: 8428 - protein, 44 aa, Homo sapiens
ISERFKLLPQASVSHLFTRAPRGPGLERFPGNDASALSSEEVEK

SEQ ID NO: 8429 - DNA, 4383 bp, Homo sapiens
gcggagcctaggagtcagataccgcgagaagtagtctcccgaagaggttcggacaagcgcaggcgcactacaattcccgccctggccgcgaaggtggcacccgcagcgggaggcggggccgggccttcgggacaaagatcgcgagatttaatggcgagtcacagctacttcttcctggcagagaccggaagtgcggtccgcggagcgtctctggcgcttaccctgctttgggcctgcgttgctgctgctgctcctccgctcccccgtcgtatcgcctgccctggatcgaagtgatgggggatgccaaggaggccggagccgagggtccgccggccggggccgccgctcgaggagggctcagcctcctgtcccagggagaatccgaggaatcttctgcacagggatcagctttatttcttggaggcaatgaagtgaagagccgagctgtggtgaaatactcttctgcccctcctcgaacagcatttgcacgccttgaagagaaaacagacttgaaactcccacctgccaactggttacgagagagtgccaaactagggccagcaggaactaccattcttggcaacagcaagaaaagcaagccattttcaagctttggcatggcatatgactttattgattcagtgggaaatgatgtggatgttgtctctgactctgaaaacataaaaaaactcctgaaaattccctacagcaagtcgcacgtgagcatggcagtacaccgcataggaaggactctcttactagatgagctagatattcaagaactctttatgagatcgtctcagactggtgactggacatggttgaaagagttttatcaaagactcattgatcagaagtggcagaggaagaaaaagagcaaagagcactggtatcaaaaggcaattctttccaagtttttatattacagtatcaatggtgatggagccgctcagcctgtctcatccaccgcagaacagcaggaatcgtccagttcagatcagacaaatgattcggaaggggcttcatggcctgctcccttcgaaatgccttcttcagtttctgaagatcccagtgcttccagtcagggtcttaaaaatgattttgttcggaatattctatggacatttgaagatatccatatgttggtcggctccaacatgcccatatttggaggaggcagatacccagcagtcagcttacgtctcagggataacaacaaaccaattaatgtgctaactggaattgactattggttggacaacttgatatgcaatgtgccagagcttgtgatgtgttttcatgtaaatggaattgtacagaaatatgaaatgataaagacagaagaaattcccaatttggaaaattctaatttttctactaaagtcataaaagacattgcacagaatattttatcatttttgaaatctaattgtaccaaagaaggacatacctattggctctttaaagcaagtggcagcgatatagtgaagctctatgacctcactactctttgtgaagaaactgaagacaaataccaaaatccattcacaatgccggtagccattctcttgtacaaggttgcttgcaacatgatgatgaagaagaatcaaaataagaaacactatggaactattagaacattgcttcttaattgtctgaaattactggacaaaagtaggcatcctcaaattattgcttccgccaattacatgctttcagaactttttcaattggatgaacctaaaaaggaagaaaattcagaatctcctttaaatgagaattctgatgaaagttatagtgaagaggaggaagagatgcccgacagtgatgaaaatggatcctatagcaccagctctgatccatcagatgatagcaaagcagtagctataatcaagtctgttggagaactatcagtaccagaaaaatacaaatctattcatcaaatcagacccagttgtgcatttccagtttgccatgacacagaagagcgctgtagacttgtgcttagctatgttctagagggtttaaaatctgtcgatagcagcatcaaaaaagaaagcgaccttccagcagctgaccccagcactccaatcccgttaaaatatgaagatgaatcctcaagagggggtcccgaggggctagagaagcagatggccttgtttttggacaaaatgggctcccttcagaagggcaattattccagtcaatctggaatgatccctggctcttggcaacataaaatgaaacttcagctgattctcaagtcatcaaaggcctattatgttttgtccgatgctgccatgagtcttcagaaatacggaagagcattacgatacattaaattagctttgcaaagccatgatacttattgctgcctctgcaccaatatgctttccgaagtgctgttgtttctctctcaatatttgacactttgtggtgatatccaactaatgctggcccagaatgcaaataatagagcagcacaccttgaagagtttcattaccaaacaaaagaagaccaggagatcctgcatagccttcacagagagtccagttgccaaggatttgcatgggcaactgatttgtctacagacttagaaagtcaactctctgttagttgtaaatgttatgaggctgctaatgaaatcttgcagtttagtgacttgaaaagccaaaatccagaacactatgtacaagtattaaagagaatgggtaacattagaaatgaaattggtgtgttttacatgaatcaggctgctgcattacagagtgagagactagtgagcaaatctgtgtctgctgccgagcaacagttgtggaaaaaaagcttttcttgttttgaaaagggaattcacaactttgaatcaattgaggatgccaccaatgccgcccttttattatgtaacacgggaaggctcatgcggatttgtgcgcaggcccactgtggtgcaggggatgaactgaaacgtgaattttcaccagaagaaggcttgtattataataaggctattgattactatttgaaagcgctaaggtcattgggaacacgagacatacacccagctgtttgggattcagtgaactgggaattgtccactacttactttactatggcaactctacagcaagattatgctccgttatctagaaaagctcaggagcagattgagaaagaagtcagtgaggccatgatgaagtccctaaaatactgcgatgtggattcagtgtctgctcgacagcccctttgtcagtatcgagctgcaaccatccatcacaggctggcctccatgtaccacagctgtctgaggaatcaggtattgtcagtccaagttaagtacagtgccacatcagtttaaaagtgttctgggtgctttttgtttttttaacatggtcatatatgtcttccttgacgtccactcaggtgaactgctgtcctaaattttctgctgcgtctgtgcctttttttgtgctgtgccacttaaacaatatgtccgcattgtgctccatgttgagcatgggaaaacgaatccgctgttggtgttctgtggcttactgcctgtcacttaacatcgtgtttttgagatacatctgtgttggcacacgtagctgttcattttctcagctcagtagtcattaaatgactatatcttagtttatctagtctatgattagtgaattttggggttattccagattccagtttgatgctattagaaataatctagtgccagcaggattgtacatgaatcctggtgcccaaatgcctgtatttctgagaataatctgaggccgaggataaaggcacttccttccgagagattgcttggcttttgctgcgagtcttgggcctgtagtttctcagtgatgtttttttgtttgttttgttgattttccccccccgtaaggtaagactacttaccttacagtccctttggcatgagtttacttctgggttgcctttattctgaaaagtatcttttgagatacagcttaaactggagaagttctttttctttttttttgagacagggtctcactctgttgcccagactggagtgcagtagcacgatctcagcttactgcaacctccgcctcccaggcctccccactcttttgcatatagatatctagttgtcccagcaccatttgctgaaaagactactcctctgctgcattgtcttggcacccttaagcttgcttttgccctcaggatattaggccatctgggcaaacctgaattttggttgaggacttcctaagtcgaagtggaaagaaatcttctccagttcatgcctgtaatcccagcactttgggagccgaggtggttggatcatttgaggtcgggagttagagagcagcctagccaacatgacaaaaccccag

SEQ ID NO: 8430 - protein, 1020 aa, Homo sapiens
MGDAKEAGAEGPPAGAAARGGLSLLSQGESEESSAQGSALFLGGNEVKSRAVVKYSSAPPRTAFARLEEKTDLKLPPANWLRESAKLGPAGTTILGNSKKSKPFSSFGMAYDFIDSVGNDVDVVSDSENIKKLLKIPYSKSHVSMAVHRIGRTLLLDELDIQELFMRSSQTGDWTWLKEFYQRLIDQKWQRKKKSKEHWYQKAILSKFLYYSINGDGAAQPVSSTAEQQESSSSDQTNDSEGASWPAPFEMPSSVSEDPSASSQGLKNDFVRNILWTFEDIHMLVGSNMPIFGGGRYPAVSLRLRDNNKPINVLTGIDYWLDNLICNVPELVMCFHVNGIVQKYEMIKTEEIPNLENSNFSTKVIKDIAQNILSFLKSNCTKEGHTYWLFKASGSDIVKLYDLTTLCEETEDKYQNPFTMPVAILLYKVACNMMMKKNQNKKHYGTIRTLLLNCLKLLDKSRHPQIIASANYMLSELFQLDEPKKEENSESPLNENSDESYSEEEEEMPDSDENGSYSTSSDPSDDSKAVAIIKSVGELSVPEKYKSIHQIRPSCAFPVCHDTEERCRLVLSYVLEGLKSVDSSIKKESDLPAADPSTPIPLKYEDESSRGGPEGLEKQMALFLDKMGSLQKGNYSSQSGMIPGSWQHKMKLQLILKSSKAYYVLSDAAMSLQKYGRALRYIKLALQSHDTYCCLCTNMLSEVLLFLSQYLTLCGDIQLMLAQNANNRAAHLEEFHYQTKEDQEILHSLHRESSCQGFAWATDLSTDLESQLSVSCKCYEAANEILQFSDLKSQNPEHYVQVLKRMGNIRNEIGVFYMNQAAALQSERLVSKSVSAAEQQLWKKSFSCFEKGIHNFESIEDATNAALLLCNTGRLMRICAQAHCGAGDELKREFSPEEGLYYNKAIDYYLKALRSLGTRDIHPAVWDSVNWELSTTYFTMATLQQDYAPLSRKAQEQIEKEVSEAMMKSLKYCDVDSVSARQPLCQYRAATIHHRLASMYHSCLRNQVLSVQVKYSATSV

SEQ ID NO: 8431 - DNA, 4248 bp, Homo sapiens
gcggagcctaggagtcagataccgcgagaagtagtctcccgaagaggttcggacaagcgcaggcgcactacaattcccgccctggccgcgaaggtggcacccgcagcgggaggcggggccgggccttcgggacaaagatcgcgagatttaatggcgagtcacagctacttcttcctggcagagaccggaagtgcggtccgcggagcgtctctggcgcttaccctgctttgggcctgcgttgctgctgctgctcctccgctcccccgtcgtatcgcctgccctggatcgaagtgatgggggatgccaaggaggccggagccgagggtccgccggccggggccgccgctcgaggagggctcagcctcctgtcccagggagaatccgaggaatcttctgcacagggatcagctttatttcttggaggcaatgaagtgaagagccgagctgtggtgaaatactcttctgcccctcctcgaacagcatttgcacgccttgaagagaaaacagacttgaaactcccacctgccaactggttacgagagagtgccaaactagggccagcaggaactaccattcttggcaacagcaagaaaagcaagccattttcaagctttggcatggcatatgactttattgattcagtgggaaatgatgtggatgttgtctctgactctgaaaacataaaaaaactcctgaaaattccctacagcaagtcgcacgtgagcatggcagtacaccgcataggaaggactctcttactagatgagctagatattcaagaactctttatgagatcgtctcagactggtgactggacatggttgaaagagttttatcaaagactcattgatcagaagtggcagaggaagaaaaagagcaaagagcactggtatcaaaaggcaattctttccaagtttttatattacagtatcaatggtgatggagccgctcagcctgtctcatccaccgcagaacagcaggaatcgtccagttcagatcagacaaatgattcggaaggggcttcatggcctgctcccttcgaaatgccttcttcagtttctgaagatcccagtgcttccagtcagggaagtgagcctcttgaaccctcatacatagtggggcatgtggcctcagcccccaaagaacaaaacctgattactttattcaatgacggggagcacagtcagggtcttaaaaatgattttgttcggaatattctatggacatttgaagatatccatatgttggtcggctccaacatgcccatatttggaggaggcagatacccagcagtcagcttacgtctcagggataacaacaaaccaattaatgtgctaactggaattgactattggttggacaacttgatatgcaatgtgccagagcttgtgatgtgttttcatgtaaatggaattgtacagaaatatgaaatgataaagacagaagaaattcccaatttggaaaattctaatttttctactaaagtcataaaagacattgcacagaatattttatcatttttgaaatctaattgtaccaaagaaggacatacctattggctctttaaagcaagtggcagcgatatagtgaagctctatgacctcactactctttgtgaagaaactgaagacaaataccaaaatccattcacaatgccggtagccattctcttgtacaaggttgcttgcaacatgatgatgaagaagaatcaaaataagaaacactatggaactattagaacattgcttcttaattgtctgaaattactggacaaaagtaggcatcctcaaattattgcttccgccaattacatgctttcagaactttttcaattggatgaacctaaaaaggaagaaaattcagaatctcctttaaatgagaattctgatgaaagttatagtgaagaggaggaagagatgcccgacagtgatgaaaatggatcctatagcaccagctctgatccatcagatgatagcaaagcagtagctataatcaagtctgttggagaactatcagtaccagaaaaatacaaatctattcatcaaatcagacccagttgtgcatttccagtttgccatgacacagaagagcgctgtagacttgtgcttagctatgttctagagggtttaaaatctgtcgatagcagcatcaaaaaagaaagcgaccttccagcagctgaccccagcactccaatcccgttaaaatatgaagatgaatcctcaagagggggtcccgaggggctagagaagcagatggccttgtttttggacaaaatgggctcccttcagaagggcaattattccagtcaatctggaatgatccctggctcttggcaacataaaatgaaacttcagctgattctcaagtcatcaaaggcctattatgttttgtccgatgctgccatgagtcttcagaaatacggaagagcattacgatacattaaattagctttgcaaagccatgatacttattgctgcctctgcaccaatatgctttccgaagtgctgttgtttctctctcaatatttgacactttgtggtgatatccaactaatgctggcccagaatgcaaataatagagcagcacaccttgaagagtttcattaccaaacaaaagaagaccaggagatcctgcatagccttcacagagagtccagttgccaaggctttaaaactgggaagtagaataatctgatccgcagcagcgatatccctccctcttacctcagcacagtgtgtaaccacgctgccattaacacagtgaatgaagtaaaagatgagtcttctgaaggatttgcatgggcaactgatttgtctacagacttagaaagtcaactctctgttagttgtaaatgttatgaggctgctaatgaaatcttgcagtttagtgacttgaaaagccaaaatccagaacactatgtacaagtattaaagagaatgggtaacattagaaatgaaattggtgtgttttacatgaatcaggctgctgcattacagagtgagagactagtgagcaaatctgtgtctgctgccgagcaacagttgtggaaaaaaagcttttcttgttttgaaaagggaattcacaactttgaatcaattgaggatgccaccaatgccgcccttttattatgtaacacgggaaggctcatgcggatttgtgcgcaggcccactgtggtgcaggggatgaactgaaacgtgaattttcaccagaagaaggcttgtattataataaggctattgattactatttgaaagcgctaaggtcattgggaacacgagacatacacccagctgtttgggattcagtgaactgggaattgtccactacttactttactatggcaactctacagcaagattatgctccgttatctagaaaagctcaggagcagattgagaaagaagtcagtgaggccatgatgaagtccctaaaatactgcgatgtggattcagtgtctgctcgacagcccctttgtcagtatcgagctgcaaccatccatcacaggctggcctccatgtaccacagctgtctgaggaatcaggttggtgatgaacaccttaggaaacaacaccgggtgctggcagatcttcattacagcaaggccgcaaagctgtttcagctgctgaaagatgctccctgcgaactgcttagagtacagctagagagagtagcatttgctgaatttcagatgaccagtcagaatagcaatgttggaaagttgaaaacactatctggggctcttgatataatggtgagaactgagcacgcattccagcttatccagaaggagcttatagaagaatttggccagcctaagagtggtgacgccgctgcagctgctgatgcttctcctagtctcaatcgagaagaagtgatgaaactcctcagtatatttgagtctcggttgtcatttcttctccttcagtccattaaactgctatcttcaactaaaaagaaaacaagcaataacatcgaagatgacacaattctcaaaaccaacaagcacatttactcccagcttttgagagcaactgcaaataaaaccgcgactcttctggaaagaatcaacgttatcgtccacctgctgggccagcttgccgccggcagtgcagcgagcagcaatgccgttcagtgactgcacagagccgtgtcccagacacgctgtcagtgccttcaacacggagccggtttgttcattcggtgctttgtttcattaaataatagggaaatatccatttaaaacaggt

SEQ ID NO: 8432 - protein, 796 aa, Homo sapiens
MGDAKEAGAEGPPAGAAARGGLSLLSQGESEESSAQGSALFLGGNEVKSRAVVKYSSAPPRTAFARLEEKTDLKLPPANWLRESAKLGPAGTTILGNSKKSKPFSSFGMAYDFIDSVGNDVDVVSDSENIKKLLKIPYSKSHVSMAVHRIGRTLLLDELDIQELFMRSSQTGDWTWLKEFYQRLIDQKWQRKKKSKEHWYQKAILSKFLYYSINGDGAAQPVSSTAEQQESSSSDQTNDSEGASWPAPFEMPSSVSEDPSASSQGSEPLEPSYIVGHVASAPKEQNLITLFNDGEHSQGLKNDFVRNILWTFEDIHMLVGSNMPIFGGGRYPAVSLRLRDNNKPINVLTGIDYWLDNLICNVPELVMCFHVNGIVQKYEMIKTEEIPNLENSNFSTKVIKDIAQNILSFLKSNCTKEGHTYWLFKASGSDIVKLYDLTTLCEETEDKYQNPFTMPVAILLYKVACNMMMKKNQNKKHYGTIRTLLLNCLKLLDKSRHPQIIASANYMLSELFQLDEPKKEENSESPLNENSDESYSEEEEEMPDSDENGSYSTSSDPSDDSKAVAIIKSVGELSVPEKYKSIHQIRPSCAFPVCHDTEERCRLVLSYVLEGLKSVDSSIKKESDLPAADPSTPIPLKYEDESSRGGPEGLEKQMALFLDKMGSLQKGNYSSQSGMIPGSWQHKMKLQLILKSSKAYYVLSDAAMSLQKYGRALRYIKLALQSHDTYCCLCTNMLSEVLLFLSQYLTLCGDIQLMLAQNANNRAAHLEEFHYQTKEDQEILHSLHRESSCQGFKTGK

SEQ ID NO: 8433 - DNA, 4579 bp, Homo sapiens
gcggagcctaggagtcagataccgcgagaagtagtctcccgaagaggttcggacaagcgcaggcgcactacaattcccgccctggccgcgaaggtggcacccgcagcgggaggcggggccgggccttcgggacaaagatcgcgagatttaatggcgagtcacagctacttcttcctggcagagaccggaagtgcggtccgcggagcgtctctggcgcttaccctgctttgggcctgcgttgctgctgctgctcctccgctcccccgtcgtatcgcctgccctggatcgaagtgatgggggatgccaaggaggccggagccgagggtccgccggccggggccgccgctcgaggagggctcagcctcctgtcccagggagaatccgaggaatcttctgcacagggatcagctttatttcttggaggcaatgaagtgaagagccgagctgtggtgaaatactcttctgcccctcctcgaacagcatttgcacgccttgaagagaaaacagacttgaaactcccacctgccaactggttacgagagagtgccaaactagggccagcaggaactaccattcttggcaacagcaagaaaagcaagccattttcaagctttggcatggcatatgactttattgattcagtgggaaatgatgtggatgttgtctctgactctgaaaacataaaaaaactcctgaaaattccctacagcaagtcgcacgtgagcatggcagtacaccgcataggaaggactctcttactagatgagctagatattcaagaactctttatgagatcgtctcagactggtgactggacatggttgaaagagttttatcaaagactcattgatcagaagtggcagaggaagaaaaagagcaaagagcactggtatcaaaaggcaattctttccaagtttttatattacagtatcaatggtgatggagccgctcagcctgtctcatccaccgcagaacagcaggaatcgtccagttcagatcagacaaatgattcggaaggggcttcatggcctgctcccttcgaaatgccttcttcagtttctgaagatcccagtgcttccagtcagggtcttaaaaatgattttgttcggaatattctatggacatttgaagatatccatatgttggtcggctccaacatgcccatatttggaggaggcagatacccagcagtcagcttacgtctcagggataacaacaaaccaattaatgtgctaactggaattgactattggttggacaacttgatatgcaatgtgccagagcttgtgatgtgttttcatgtaaatggaattgtacagaaatatgaaatgataaagacagaagaaattcccaatttggaaaattctaatttttctactaaagtcataaaagacattgcacagaatattttatcatttttgaaatctaattgtaccaaagaaggacatacctattggctctttaaagcaagtggcagcgatatagtgaagctctatgacctcactactctttgtgaagaaactgaagacaaataccaaaatccattcacaatgccggtagccattctcttgtacaaggttgcttgcaacatgatgatgaagaagaatcaaaataagaaacactatggaactattagaacattgcttcttaattgtctgaaattactggacaaaagtaggcatcctcaaattattgcttccgccaattacatgctttcagaactttttcaattggatgaacctaaaaaggaagaaaattcagaatctcctttaaatgagaattctgatgaaagttatagtgaagaggaggaagagatgcccgacagtgatgaaaatggatcctatagcaccagctctgatccatcagatgatagcaaagcagtagctataatcaagtctgttggagaactatcagtaccagaaaaatacaaatctattcatcaaatcagacccagttgtgcatttccagtttgccatgacacagaagagcgctgtagacttgtgcttagctatgttctagagggtttaaaatctgtcgatagcagcatcaaaaaagaaagcgaccttccagcagctgaccccagcactccaatcccgttaaaatatgaagatgaatcctcaagagggggtcccgaggggctagagaagcagatggccttgtttttggacaaaatgggctcccttcagaagggcaattattccagtcaatctggaatgatccctggctcttggcaacataaaatgaaacttcagctgattctcaagtcatcaaaggcctattatgttttgtccgatgctgccatgagtcttcagaaatacggaagagcattacgatacattaaattagctttgcaaagccatgatacttattgctgcctctgcaccaatatgctttccgaagtgctgttgtttctctctcaatatttgacactttgtggtgatatccaactaatgctggcccagaatgcaaataatagagcagcacaccttgaagagtttcattaccaaacaaaagaagaccaggagatcctgcatagccttcacagagagtccagttgccaaggatttgcatgggcaactgatttgtctacagacttagaaagtcaactctctgttagttgtaaatgttatgaggctgctaatgaaatcttgcagtttagtgacttgaaaagccaaaatccagaacactatgtacaagtattaaagagaatgggtaacattagaaatgaaattggtgtgttttacatgaatcaggctgctgcattacagagtgagagactagtgagcaaatctgtgtctgctgccgagcaacagttgtggaaaaaaagcttttcttgttttgaaaagggaattcacaactttgaatcaattgaggatgccaccaatgccgcccttttattatgtaacacgggaaggctcatgcggatttgtgcgcaggcccactgtggtgcaggggatgaactgaaacgtgaattttcaccagaagaaggcttgtattataataaggctattgattactatttgaaagcgctaaggtcattgggaacacgagacatacacccagctgtttgggattcagtgaactgggaattgtccactacttactttactatggcaactctacagcaagattatgctccgttatctagaaaagctcaggagcagattgagaaagaagtcagtgaggccatgatgaagtccctaaaatactgcgatgtggattcagtgtctgctcgacagcccctttgtcagtatcgagctgcaaccatccatcacaggctggcctccatgtaccacagctgtctgaggaatcaggttggtgatgaacaccttaggaaacaacaccgggtgctggcagatcttcattacagcaaggccgcaaagctgtttcagctgctgaaagatgctccctgcgaactgcttagagtacagctagagagagtagcatttgctgaatttcagatgaccagtcagaatagcaatgttggaaagttgaaaacactatctggggctcttgatataatggtgagaactgagcacgcattccagcttatccagaaggagcttatagaagaatttggccagcctaagagtggtgacgccgctgcagctgctgatgcttctcctagtctcaatcgagaagaagtgatgaaactcctcagtatatttgagtctcggttgtcatttcttctccttcagtccattaaactgctatcttcaactaaaaagaaaacaagcaataacatcgaagatgacacaattctcaaaaccaacaagcacatttactcccagcttttgagagcaactgcaaataaaaccgcgactcttctggaaagaatcaacgttatcgtccacctgctgggccagcttgccgccggcagtgcagcgagcagcaatgccgttcagtgactgcacagagccgtgtcccagacacgctgtcagtgccttcaacacggagccggtttgttcattcggtgctttgtttcattaaataatagggaaatatccatttaaaacaggtatatcagtggaaacacagagttattttaagtgacagacaaattacggttgagttctgtggcttcttcacttgaagtgctaacatcagaatcaaacttaaagcttccactatttatgtctttgagaagtatgtagtacctcggtattaacagacctgctgtgatgcagttacactttcacgtatttttgaagtatgtcaagctacacgggtctaagatatgattattttggataaaatgttactttggtcaagagaacttttatccagatgacattacaggttcaagtgggttaaggagacctcctgtacatctacagtgtttccttttaaattgtccagaaaaaaggtgtgttcttcataagcttcagtgcaggatttttcaaagacgagctgttgtgcaatttgctgtatttaatgcatgttctgaaaggattcacttttgactttatatgacagttgatcaagaacaggtactacccctttttttcatttcaaacttgaaactgtgaataaggtaagaaaactattttgaataaataaactatttatttaaaatgtc

SEQ ID NO: 8434 - protein, 1204 aa, Homo sapiens; identical to SEQ ID NO: 1238

SEQ ID NO: 8435 - DNA, 4165 bp, Homo sapiens
gcggagcctaggagtcagataccgcgagaagtagtctcccgaagaggttcggacaagcgcaggcgcactacaattcccgccctggccgcgaaggtggcacccgcagcgggaggcggggccgggccttcgggacaaagatcgcgagatttaatggcgagtcacagctacttcttcctggcagagaccggaagtgcggtccgcggagcgtctctggcgcttaccctgctttgggcctgcgttgctgctgctgctcctccgctcccccgtcgtatcgcctgccctggatcgaagtgatgggggatgccaaggaggccggagccgagggtccgccggccggggccgccgctcgaggagggctcagcctcctgtcccagggagaatccgaggaatcttctgcacagggatcagctttatttcttggaggcaatgaagtgaagagccgagctgtggtgaaatactcttctgcccctcctcgaacagcatttgcacgccttgaagagaaaacagacttgaaactcccacctgccaactggttacgagagagtgccaaactagggccagcaggaactaccattcttggcaacagcaagaaaagcaagccattttcaagctttggcatggcatatgactttattgattcagtgggaaatgatgtggatgttgtctctgactctgaaaacataaaaaaactcctgaaaattccctacagcaagtcgcacgtgagcatggcagtacaccgcataggaaggactctcttactagatgagctagatattcaagaactctttatgagatcgtctcagactggtgactggacatggttgaaagagttttatcaaagactcattgatcagaagtggcagaggaagaaaaagagcaaagagcactggtatcaaaaggcaattctttccaagtttttatattacagtatcaatggtgatggagccgctcagcctgtctcatccaccgcagaacagcaggaatcgtccagttcagatcagacaaatgattcggaaggggcttcatggcctgctcccttcgaaatgccttcttcagtttctgaagatcccagtgcttccagtcagggaagtgagcctcttgaaccctcatacatagtggggcatgtggcctcagcccccaaagaacaaaacctgattactttattcaatgacggggagcacagtcagggtcttaaaaatgattttgttcggaatattctatggacatttgaagatatccatatgttggtcggctccaacatgcccatatttggaggaggcagatacccagcagtcagcttacgtctcagggataacaacaaaccaattaatgtgctaactggaattgactattggttggacaacttgatatgcaatgtgccagagcttgtgatgtgttttcatgtaaatggaattgtacagaaatatgaaatgataaagacagaagaaattcccaatttggaaaattctaatttttctactaaagtcataaaagacattgcacagaatattttatcatttttgaaatctaattgtaccaaagaaggacatacctattggctctttaaagcaagtggcagcgatatagtgaagctctatgacctcactactctttgtgaagaaactgaagacaaataccaaaatccattcacaatgccggtagccattctcttgtacaaggttgcttgcaacatgatgatgaagaagaatcaaaataagaaacactatggaactattagaacattgcttcttaattgtctgaaattactggacaaaagtaggcatcctcaaattattgcttccgccaattacatgctttcagaactttttcaattggatgaacctaaaaaggaagaaaattcagaatctcctttaaatgagaattctgatgaaagttatagtgaagaggaggaagagatgcccgacagtgatgaaaatggatcctatagcaccagctctgatccatcagatgatagcaaagcagtagctataatcaagtctgttggagaactatcagtaccagaaaaatacaaatctattcatcaaatcagacccagttgtgcatttccagtttgccatgacacagaagagcgctgtagacttgtgcttagctatgttctagagggtttaaaatctgtcgatagcagcatcaaaaaagaaagcgaccttccagcagctgaccccagcactccaatcccgttaaaatatgaagatgaatcctcaagagggggtcccgaggggctagagaagcagatggccttgtttttggacaaaatgggctcccttcagaagggcaattattccagtcaatctggaatgatccctggctcttggcaacataaaatgaaacttcagctgattctcaagtcatcaaaggcctattatgttttgtccgatgctgccatgagtcttcagaaatacggaagagcattacgatacattaaattagctttgcaaagccatgatacttattgctgcctctgcaccaatatgctttccgaagtgctgttgtttctctctcaatatttgacactttgtggtgatatccaactaatgctggcccagaatgcaaataatagagcagcacaccttgaagagtttcattaccaaacaaaagaagaccaggagatcctgcatagccttcacagagagtccagttgccaaggatttgcatgggcaactgatttgtctacagacttagaaagtcaactctctgttagttgtaaatgttatgaggctgctaatgaaatcttgcagtttagtgacttgaaaagccaaaatccagaacactatgtacaagtattaaagagaatgggtaacattagaaatgaaattggtgtgttttacatgaatcaggctgctgcattacagagtgagagactagtgagcaaatctgtgtctgctgccgagcaacagttgtggaaaaaaagcttttcttgttttgaaaagggaattcacaactttgaatcaattgaggatgccaccaatgccgcccttttattatgtaacacgggaaggctcatgcggatttgtgcgcaggcccactgtggtgcaggggatgaactgaaacgtgaattttcaccagaagaaggcttgtattataataaggctattgattactatttgaaagcgctaaggtcattgggaacacgagacatacacccagctgtttgggattcagtgaactgggaattgtccactacttactttactatggcaactctacagcaagattatgctccgttatctagaaaagctcaggagcagattgagaaagaagtcagtgaggccatgatgaagtccctaaaatactgcgatgtggattcagtgtctgctcgacagcccctttgtcagtatcgagctgcaaccatccatcacaggctggcctccatgtaccacagctgtctgaggaatcaggttggtgatgaacaccttaggaaacaacaccgggtgctggcagatcttcattacagcaaggccgcaaagctgtttcagctgctgaaagatgctccctgcgaactgcttagagtacagctagagagagtagcatttgctgaatttcagatgaccagtcagaatagcaatgttggaaagttgaaaacactatctggggctcttgatataatggtgagaactgagcacgcattccagcttatccagaaggagcttatagaagaatttggccagcctaagagtggtgacgccgctgcagctgctgatgcttctcctagtctcaatcgagaagaagtgatgaaactcctcagtatatttgagtctcggttgtcatttcttctccttcagtccattaaactgctatcttcaactaaaaagaaaacaagcaataacatcgaagatgacacaattctcaaaaccaacaagcacatttactcccagcttttgagagcaactgcaaataaaaccgcgactcttctggaaagaatcaacgttatcgtccacctgctgggccagcttgccgccggcagtgcagcgagcagcaatgccgttcagtgactgcacagagccgtgtcccagacacgctgtcagtgccttcaacacggagccgttgatcaagaacaggtactacccctttttttcatttcaaacttgaaactgtgaataaggtaagaaaactattttgaataaataaactatttatttaaaatgtc

SEQ ID NO: 8436 - protein, 1238 aa, Homo sapiens
MGDAKEAGAEGPPAGAAARGGLSLLSQGESEESSAQGSALFLGGNEVKSRAVVKYSSAPPRTAFARLEEKTDLKLPPANWLRESAKLGPAGTTILGNSKKSKPFSSFGMAYDFIDSVGNDVDVVSDSENIKKLLKIPYSKSHVSMAVHRIGRTLLLDELDIQELFMRSSQTGDWTWLKEFYQRLIDQKWQRKKKSKEHWYQKAILSKFLYYSINGDGAAQPVSSTAEQQESSSSDQTNDSEGASWPAPFEMPSSVSEDPSASSQGSEPLEPSYIVGHVASAPKEQNLITLFNDGEHSQGLKNDFVRNILWTFEDIHMLVGSNMPIFGGGRYPAVSLRLRDNNKPINVLTGIDYWLDNLICNVPELVMCFHVNGIVQKYEMIKTEEIPNLENSNFSTKVIKDIAQNILSFLKSNCTKEGHTYWLFKASGSDIVKLYDLTTLCEETEDKYQNPFTMPVAILLYKVACNMMMKKNQNKKHYGTIRTLLLNCLKLLDKSRHPQIIASANYMLSELFQLDEPKKEENSESPLNENSDESYSEEEEEMPDSDENGSYSTSSDPSDDSKAVAIIKSVGELSVPEKYKSIHQIRPSCAFPVCHDTEERCRLVLSYVLEGLKSVDSSIKKESDLPAADPSTPIPLKYEDESSRGGPEGLEKQMALFLDKMGSLQKGNYSSQSGMIPGSWQHKMKLQLILKSSKAYYVLSDAAMSLQKYGRALRYIKLALQSHDTYCCLCTNMLSEVLLFLSQYLTLCGDIQLMLAQNANNRAAHLEEFHYQTKEDQEILHSLHRESSCQGFAWATDLSTDLESQLSVSCKCYEAANEILQFSDLKSQNPEHYVQVLKRMGNIRNEIGVFYMNQAAALQSERLVSKSVSAAEQQLWKKSFSCFEKGIHNFESIEDATNAALLLCNTGRLMRICAQAHCGAGDELKREFSPEEGLYYNKAIDYYLKALRSLGTRDIHPAVWDSVNWELSTTYFTMATLQQDYAPLSRKAQEQIEKEVSEAMMKSLKYCDVDSVSARQPLCQYRAATIHHRLASMYHSCLRNQVGDEHLRKQHRVLADLHYSKAAKLFQLLKDAPCELLRVQLERVAFAEFQMTSQNSNVGKLKTLSGALDIMVRTEHAFQLIQKELIEEFGQPKSGDAAAAADASPSLNREEVMKLLSIFESRLSFLLLQSIKLLSSTKKKTSNNIEDDTILKTNKHIYSQLLRATANKTATLLERINVIVHLLGQLAAGSAASSNAVQ

SEQ ID NO: 8437 - DNA, 552 bp, Homo sapiens
caaagatcagccacgtggcagtcaaccatgtctatctgaccaagttccaatgaaaactctggacaccaaggcttgggagatatttctcaaaagactcctctgcgggagaggagaatagctgtactctaagcagttcgcagggagcatctttcagcagctgaaacagctttgcggccttgctgtaatgaagatctgccagcacccggtgttgtttcctaaggtgttcatcaccaacctagaaccaaaccaaaacaagcaacaaatccttcacgagaaagaaagaaaacaactgtgtaagcagacatcagtgtaaaccttagcactgtctcttgatgagataagaggaggatggcagtgacaggagtgtggtggcgagccagtcacctgcagtcaaccacggctcattgctctcaccatgcctgttacatgaagtttcaggcatccactggggatcttggaacgcatcctccaaggataagtggggtctactgtacaacacttaagtataaccctcttcactattaaccaaatgatattaaaataagcaaagaa

SEQ ID NO: 8438 - protein, 58 aa, Homo sapiens
MAVTGVWWRASHLQSTTAHCSHHACYMKFQASTGDLGTHPPRISGVYCTTLKYNPLHY

SEQ ID NO: 8439 - DNA, 474 bp, Homo sapiens
tagctgtactctaagcagttcgcagggagcatctttcagcagctgaaacagctttgcggccttgctgtaatgaagatctgccagcacccggtgttgtttcctaaggtgttcatcaccaacctagaaccaaaccaaaacaagcaacaaatccttcacgagaaagaaagaaaacaactgtgtaagcagacatcagtgtaaaccttagcactgtctcttgatgagataagaggaggatggcagtgacaggagtgtggtggcgagccagtcacctgcagtcaaccacggctcattgctctcaccatgcctgttacatgaaggtatgtatgtataggaaaaagcactgaaaaactctccagtttcaggcatccactggggatcttggaacgcatcctccaaggataagtggggtctactgtacaacacttaagtataaccctcttcactattaaccaaatgatattaaaataagcaaag

SEQ ID NO: 8440 - protein, 42 aa, Homo sapiens
MKICQHPVLFPKVFITNLEPNQNKQQILHEKERKQLCKQTSV

SEQ ID NO: 8441 - DNA, 508 bp, Homo sapiens
ggatagcctaacaatgggatttactgtggggactttgggccccagggtaacagcttgacctctggaggcactggagacaaagatcagccacgtggcagtcaaccatgtctatctgaccaagttccaatgaaaactctggacaccaaggcttgggagatatttctcaaaagactcctctgcgggagaggagaatagagaaagaaagaaaacaactgtgtaagcagacatcagtgtaaaccttagcactgtctcttgatgagataagaggaggatggcagtgacaggagtgtggtggcgagccagtcacctgcagtcaaccacggctcattgctctcaccatgcctgttacatgaaggtatgtatgtataggaaaaagcactgaaaaactctccagtttcaggcatccactggggatcttggaacgcatcctccaaggataagtggggtctactgtacaacacttaagtataaccctcttcactattaaccaaatgatattaaaataagc

SEQ ID NO: 8442 - protein, 36 aa, Homo sapiens
MAVTGVWWRASHLQSTTAHCSHHACYMKVCMYRKKH

SEQ ID NO: 8443 - DNA, 1395 bp, Homo sapiens
ctaaatataaaagctaaaactaataagacctagtaagacccacagtgggggaaaaataactaagaagcacttagtgaagcctgaagtagttaccgtgaaggatttgttgcttgttttggtttggttctaggttggtgatgaacaccttaggaaacaacaccgggtgctggcagatcttcattacagcaaggccgcaaagctgtttcagctgctgaaagatgctccctgcgaactgcttagagtacagctagagagagtagcatttgctgaatttcagatgaccagtcagaatagcaatgttggaaagttgaaaacactatctggggctcttgatataatggtgagaactgagcacgcattccagcttatccagaaggagcttatagaagaatttggccagcctaagagtggtgacgccgctgcagctgctgatgcttctcctagtctcaatcgagaagaagtgatgaaactcctcagtatatttgagtctcggttgtcatttcttctccttcagtccattaaactgctatcttcaactaaaaagaaaacaagcaataacatcgaagatgacacaattctcaaaaccaacaagcacatttactcccagcttttgagagcaactgcaaataaaaccgcgactcttctggaaagaatcaacgttatcgtccacctgctgggccagcttgccgccggcagtgcagcgagcagcaatgccgttcagtgactgcacagagccgtgtcccagacacgctgtcagtgccttcaacacggagccggtttgttcattcggtgctttgtttcattaaataatagggaaatatccatttaaaacaggtatatcagtggaaacacagagttattttaagtgacagacaaattacggttgagttctgtggcttcttcacttgaagtgctaacatcagaatcaaacttaaagcttccactatttatgtctttgagaagtatgtagtacctcggtattaacagacctgctgtgatgcagttacactttcacgtatttttgaagtatgtcaagctacacgggtctaagatatgattattttggataaaatgttactttggtcaagagaacttttatccagatgacattacaggttcaagtgggttaaggagacctcctgtacatctacagtgtttccttttaaattgtccagaaaaaaggtgtgttcttcataagcttcagtgcaggatttttcaaagacgagctgttgtgcaatttgctgtatttaatgcatgttctgaaaggattcacttttgactttatatgacagttgatcaagaacaggtactacccctttttttcatttcaaacttgaaactgtgaataaggtaagaaaactattttgaataaataaactatttatttaaaatgtc

SEQ ID NO: 8444 - protein, 148 aa, Homo sapiens
MTSQNSNVGKLKTLSGALDIMVRTEHAFQLIQKELIEEFGQPKSGDAAAAADASPSLNREEVMKLLSIFESRLSFLLLQSIKLLSSTKKKTSNNIEDDTILKTNKHIYSQLLRATANKTATLLERINVIVHLLGQLAAGSAASSNAVQ

SEQ ID NO: 8445 - DNA, 1912 bp, Homo sapiens
atgctcgccgcctccatcttccgtccgacactgctgctctgctggctggctgctccctggcccacccagcccgagagtctcttccacagccgggaccgctcggacctggagccgtccccactgcgccaggccaagcccattgccgacctccacgctgctcagcggttcctgtccagatacggctggtcaggggtgtgggcggcctgggggcccagtcccgaggggccgccggagacccccaagggcgccgccctggccgaggcggtgcgcaggttccagcgggcgaacgcgctgccggccagcggggagctggacgcggccaccctagcggccatgaaccggccgcgctgcggggtcccggacatgcgcccaccgcccccctccgccccgccttcgcccccgggcccgccccccagagcccgctccaggcgctccccgcgggcgccgctgtccttgtcccggcggggttggcagccccggggctaccccgacggcggagctgcccaggccttctccaagaggacgctgagctggcggctgctgggcgaggccctgagcagccaactgtccgtggccgaccagcggcgcattgtggcgctggccttcaggatgtggagcgaggtgacgccgctggacttccgcgaggacctggccgcccccggggccgcggtcgacatcaagctgggctttgggagaggccggcacctgggctgtccgcgggccttcgatgggagcgggcaggagtttgcacacgcctggcgcctaggtgacattcactttgacgacgacgagcacttcacacctcccaccagtgacacgggcatcagccttctcaaggtggccgtccatgaaattggccatgtcctgggcttgcctcacacctacaggacgggatccataatgcaaccaaattacattccccaggagcctgcctttgagttggactggtcagacaggaaagcaattcaaaagctgtatggctcctgtgagggatcatttgatactgcgtttgactggattcgcaaagagagaaaccaatatggagaggtgatggtgagatttagcacatatttcttccgtaacagctggtactggctttatgaaaatcgaaacaataggacacgctatggggaccctatccaaatcctcactggctggcctggaatcccaacacacaacatagatgcctttgttcacatctggacatggaaaagagatgaacgttatttttttcaaggaaatcaatactggagatatgacagtgacaaggatcaggccctcacagaagatgaacaaggaaaaagctatcccaaattgatttcagaaggatttcctggcatcccaagtcccctagacacggcgttttatgaccgaagacagaagttaatttacttcttcaaggagtcccttgtatttgcatttgatgtcaacagaaatcgagtacttaattcttatccaaagaggattactgaagtttttccagcagtaataccacaaaatcatcctttcagaaatatagattccgcttattactcctatgcatacaactccattttctttttcaaaggcaatgcatactggaaggtagttaatgacaaggacaaacaacagaattcctggcttcctgctaatggcttatttccaaaaaagtttatttcagagaagtggtttgatgtttgtgacgtccatatctccacactgaacatgtaataagaaaaagtaggaaatggagggtcataggacttcgctaaaattctgatactgtttacaaagaaaaccggattttcagtagctgaagaaaatatggcactgtaagttaaaacccaatgggaaaagccttagttgaacttttaaaatacttgatttaaaaacaattgctcaggcaaaacataattcataaactaaaaggttt

SEQ ID NO: 8446 - protein, 569 aa, Homo sapiens; identical to SEQ ID NO: 1240

SEQ ID NO: 8447 - DNA, 559 bp, Homo sapiens
tttccctgtggaaacctcaaaagagaaatcctgccaaaagcgctcaaggacaaagggattgccatggaaagcataactgtgtatcagacagttgcacacccaggaatccaagggaacctgaacagctactattcccagcagggggttccagccagcatcacattttttagtccctctggcctcacatacagtctcaagcacattcaggagttatctggtgacaatatcgatcaaattaagctcctggatggaggagagttgctgaagaagttcatgcagggaaggaataaaggatcacacaggaatttgagagccaaagtaaagtgcaactggccccccaggcccagaggggctagcagtgagaactgaagatgttccctctggaccttccggccacagctcattgatgggacatgttctcagacagtgttgtaagttttgtgtgctttaactcatgagttacacgtggtcactcacttaatgagttaagcgttaatacaacttccctgtgaatagaaggtaacaaaataaaaacattgtgttgtatacaagtcttcag

SEQ ID NO: 8448 - protein, 101 aa, Homo sapiens
MESITVYQTVAHPGIQGNLNSYYSQQGVPASITFFSPSGLTYSLKHIQELSGDNIDQIKLLDGGELLKKFMQGRNKGSHRNLRAKVKCNWPPRPRGASSEN

SEQ ID NO: 8449 - DNA, 792 bp, Homo sapiens
ccgggatgcccatgtcctctggccaggcagacacagacctggggcagcaccagctttctgatggcagcctgctctttccaacagttccctaccagaatcctgcctcactggagcagaggatgccagcatcagccgggaaccactcctgtgctaaaaccgccttggtggcctgtggcttgaggtcttgatgcggatgaagccggaggaatgttgtctctcctcagtctcatggcaaggactgatcttgttttctgttccccacagggggttccagccagcatcacattttttagtccctctggcctcacatacagtctcaagcacattcaggagttatctggtgacaatatcgatcaaattaagtttgcagccatcggccccactacggctcgcgcgctggccgcccagggccttcctgtaagctgcactgcagagagccccacgccacaagccctggccactggcatcaggaaggctctccagccccatggctgctgctgagtcagccacctagcgctggccccatgcagcctccctgggctgggctggctctggatggagccaggcatcggcaagggctctcgggagctgctgccgtcagactcctgcctcaagcctgagtggaagcacctgaggaccggggatcgggacctgacctggggctggcctcaggcccacgtgcacgtgactgccctctgtggaagccagcttaaaccctagccctgtgagagcttcctgtgcccagcaggaaggaagtcaaataaaccacactgactacctgtgcttactgag

SEQ ID NO: 8450 - protein, 97 aa, Homo sapiens
MLSLLSLMARTDLVFCSPQGVPASITFFSPSGLTYSLKHIQELSGDNIDQIKFAAIGPTTARALAAQGLPVSCTAESPTPQALATGIRKALQPHGCC

SEQ ID NO: 8451 - DNA, 736 bp, Homo sapiens
agcagctcgttccaggagggtggtgctgtattgggaggtttcaccaactgtgctgtgaagtggtggaggccccattgtgtgcccagtgcggtaaagtctttcctgcttttgattgtgcccagggattgccatggaaagcataactgtgtatcagacagttgcacacccaggaatccaagggaacctgaacagctactattcccagcagggggttccagccagcatcacattttttagtccctctggcctcacatacagtctcaagcacattcaggagttatctggtgacaatatcgatcaaattaagtttgcagccatcggccccactacggctcgcgcgctggccgcccagggccttcctgtaagctgcactgcagagagccccacgccacaagccctggccactggcatcaggaaggctctccagccccatggctgctgctgagtcagccacctagcgctggccccatgcagcctccctgggctgggctggctctggatggagccaggcatcggcaagggctctcgggagctgctgccgtcagactcctgcctcaagcctgagtggaagcacctgaggaccggggatcgggacctgacctggggctggcctcaggcccacgtgcacgtgactgccctctgtggaagccagcttaaaccctagccctgtgagagcttcctgtgcccagcaggaaggaagtcaaataaaccacactgactacctgtgcttactgag

SEQ ID NO: 8452 - protein, 104 aa, Homo sapiens [sequence omitted]

SEQ ID NO: 8453 - DNA, 730 bp, Homo sapiens
aagagaaatcctgccaaaagcgctcaaggacaaagggattgccatggaaagcataactgtgtatcagacagttgcacacccaggaatccaagggaacctgaacagctactattcccagcagggggttccagccagcatcacattttttagtccctctggcctcacatacagtctcaagcacattcaggagttatctggtgacaatatcgatcaaattaagacccagggcccccaacacccgaagaagaactgtctgcagctagagcctctgaggaaggactgcactgacacagccgtgatgtttgcagccatcggccccactacggctcgcgcgctggccgcccagggccttcctgtaagctgcactgcagagagccccacgccacaagccctggccactggcatcaggaaggctctccagccccatggctgctgctgagtcagccacctagcgctggccccatgcagcctccctgggctgggctggctctggatggagccaggcatcggcaagggctctcgggagctgctgccgtcagactcctgcctcaagcctgagtggaagcacctgaggaccggggatcgggacctgacctggggctggcctcaggcccacgtgcacgtgactgccctctgtggaagccagcttaaaccctagccctgtgagagcttcctgtgcccagcaggaaggaagtcaaataaaccacactgactacctgtgcttactgag

SEQ ID NO: 8454 - protein, 131 aa, Homo sapiens
MESITVYQTVAHPGIQGNLNSYYSQQGVPASITFFSPSGLTYSLKHIQELSGDNIDQIKTQGPQHPKKNCLQLEPLRKDCTDTAVMFAAIGPTTARALAAQGLPVSCTAESPTPQALATGIRKALQPHGCC

SEQ ID NO: 8455 - DNA, 652 bp, Homo sapiens
caaaagagaaatcctgccaaaagcgctcaaggacaaagggattgccatggaaagcataactgtgtatcagacagttgcacacccaggaatccaagggaacctgaacagctactattcccagcagggggttccagccagcatcacattttttagtccctctggcctcacatacagtctcaagcacattcaggagttatctggtgacaatatcgatcaaattaagtttgcagccatcggccccactacggctcgcgcgctggccgcccagggccttcctgtaagctgcactgcagagagccccacgccacaagccctggccactggcatcaggaaggctctccagccccatggctgctgctgagtcagccacctagcgctggccccatgcagcctccctgggctgggctggctctggatggagccaggcatcggcaagggctctcgggagctgctgccgtcagactcctgcctcaagcctgagtggaagcacctgaggaccggggatcgggacctgacctggggctggcctcaggcccacgtgcacgtgactgccctctgtggaagccagcttaaaccctagccctgtgagagcttcctgtgcccagcaggaaggaagtcaaataaaccacactgactacctgtgcttactgag

SEQ ID NO: 8456 - protein, 104 aa, Homo sapiens [sequence omitted]

SEQ ID NO: 8457 - DNA, 1186 bp, Homo sapiens
tcaaaagagaaatcctgccaaaagcgctcaaggacaaagggattgccatggaaagcataactgtgtatcagacagttgcacacccaggaatccaagggaacctgaacagctactattcccagcagggggttccagccagcatcacattttttagtccctctggcctcacatacagtctcaagcacattcaggagttatctggtgacaatatcgatcaaattaagaaacacccttgaactggctccagagggactgaggagagggtgcaggatgtgacccagagcccaaggacagacactgccactcactgcagtcaggaagagcaaaaggcttcacctgccttctcacaggtgcatctcatgtggggagtatgcaccgctctcccagttttaaagatggagcacggggctcagagacatcatatggcctgtctgtaggtcacactgctgagaaggaagagctgcagttgaacctgggaagactgattccacattgtcagccatggtgatgccttgccatggtctcaggagctgctgagcagttgatgcacttctgggcagtaactgatacaattctcacaccagtccagtggagtccctgtagggcccactgtttgtacagcattgcacaacatgcaggcgcaccacaaaagatcaaagggggtgacttccgacctgaacttgctacttatccattgacttgggaagaccacgcacttgtctataaatgccacagagatgtcactgcaaagcagtagtttgcagccatcggccccactacggctcgcgcgctggccgcccagggccttcctgtaagctgcactgcagagagccccacgccacaagccctggccactggcatcaggaaggctctccagccccatggctgctgctgagtcagccacctagcgctggccccatgcagcctccctgggctgggctggctctggatggagccaggcatcggcaagggctctcgggagctgctgccgtcagactcctgcctcaagcctgagtggaagcacctgaggaccggggatcgggacctgacctggggctggcctcaggcccacgtgcacgtgactgccctctgtggaagccagcttaaaccctagccctgtgagagcttcctgtgcccagcaggaaggaagtcaaataaaccacactgactacctgtgcttactgag

SEQ ID NO: 8458 - protein, 95 aa, Homo sapiens
MPQRCHCKAVVCSHRPHYGSRAGRPGPSCKLHCREPHATSPGHWHQEGSPAPWLLLSQPPSAGPMQPPWAGLALDGARHRQGLSGAAAVRLLPQA

SEQ ID NO: 8459 - DNA, 1222 bp, Homo sapiens
ttccacaagcatttgattgccttcttcttgtgtaccgtccccatcggaaattgcttaggaagagtctttgagatctaattaagatctgtttccttgctctgtcgcagtgccctataaggactgccaggcaataatgaaggttcttttactgaaggatgcgaaggaagatgactgtggccaggatccgtatatcagggaattaggattatatggacttgaagccactttgatccctgttttatcgtttgagtttttgtctcttcccagtttctctgagaagctttctcatcctgaagattacgggggactcatttttaccagccccagagcagtggaagcagcagagttatgtttggagcaaaacaataaaactgaagtctgggaaaggtctctgaaagaaaaatggaatgccaagtcagtgtatgtggttggaaatgctactgcttctctagtgagtaaaattggcctggatacagaaggagaaacctgtggaaatgcagaaaagcttgcagaatatatttgttccagggagtcctcagcactgcctcttctatttccctgtggaaacctcaaaagagaaatcctgccaaaagcgctcaaggacaaagggattgccatggaaagcataactgtgtatcagacagttgcacacccaggaatccaagggaacctgaacagctactattcccagcagggggttccagccagcatcacattttttagtccctctggcctcacatacagtctcaagcacattcaggagttatctggtgacaatatcgatcaaattaagtttgcagccatcggccccactacggctcgcgcgctggccgcccagggccttcctgtaagctgcactgcagagagccccacgccacaagccctggccactggcatcaggaaggctctccagccccatggctgctgctgagtcagccacctagcgctggccccatgcagcctccctgggctgggctggctctggatggagccaggcatcggcaagggctctcgggagctgctgccgtcagactcctgcctcaagcctgagtggaagcacctgaggaccggggatcgggacctgacctggggctggcctcaggcccacgtgcacgtgactgccctctgtggaagccagcttaaaccctagccctgtgagagcttcctgtgcccagcaggaaggaagtcaaataaaccacactgactacctgtgcttactgag

SEQ ID NO: 8460 - protein, 265 aa, Homo sapiens; identical to SEQ ID NO: 1242

SEQ ID NO: 8461 - DNA, 1021 bp, Homo sapiens
gcggggtcctggggcccggcgcgggtggccgccgcggcccctcgggctgcgtggggagggggcttccgcccctgttgtcattgctcctgcagccttttcgctgggactgcgcgacaccgccccccgaccgggtgcccgctgtgtgccaggccgggtgctgggcacggtcccgcgagtctgggaaaggtctctgaaagaaaaatggaatgccaagtcagtgtatgtggttggaaatgctactgcttctctagtgagtaaaattggcctggatacagaaggagaaacctgtggaaatgcagaaaagcttgcagaatatatttgttccagggagtcctcagcactgcctcttctatttccctgtggaaacctcaaaagagaaatcctgccaaaagcgctcaaggacaaagggattgccatggaaagcataactgtgtatcagacagttgcacacccaggaatccaagggaacctgaacagctactattcccagcagggggttccagccagcatcacattttttagtccctctggcctcacatacagtctcaagcacattcaggagttatctggtgacaatatcgatcaaattaagtttgcagccatcggccccactacggctcgcgcgctggccgcccagggccttcctgtaagctgcactgcagagagccccacgccacaagccctggccactggcatcaggaaggctctccagccccatggctgctgctgagtcagccacctagcgctggccccatgcagcctccctgggctgggctggctctggatggagccaggcatcggcaagggctctcgggagctgctgccgtcagactcctgcctcaagcctgagtggaagcacctgaggaccggggatcgggacctgacctggggctggcctcaggcccacgtgcacgtgactgccctctgtggaagccagcttaaaccctagccctgtgagagcttcctgtgcccagcaggaaggaagtcaaataaaccacactgactacctgtgcttactgag

SEQ ID NO: 8462 - protein, 104 aa, Homo sapiens [sequence omitted]

SEQ ID NO: 8463 - DNA, 1291 bp, Homo sapiens
ctcattccgtggcctggatggcggtgcgcatgcgcgagcgcctagctgcgcgcagccacccacgcgaccccagtctgaggtgcggggtcctggggcccggcgcgggtggccgccgcggcccctcgggctgcgtggggagggggcttccgcccctgttgtcattgctcctgcagccttttcgctgggactgcgcgacaccgccccccgaccgggtgcccgctgtgtgccaggccgggtgctgggcacggtcccgcgagtgccctataaggactgccaggcaataatgaaggttcttttactgaaggatgcgaaggaagatgactgtggccaggatccgtatatcagggaattaggattatatggacttgaagccactttgatccctgttttatcgtttgagtttttgtctcttcccagtttctctgagaagctttctcatcctgaagattacgggggactcatttttaccagccccagagcagtggaagcagcagagttatgtttggagcaaaacaataaaactgaagtctgggaaaggtctctgaaagaaaaatggaatgccaagtcagtgtatgtggttggaaatgctactgcttctctagtgagtaaaattggcctggatacagaaggagaaacctgtggaaatgcagaaaagcttgcagaatatatttgttccaggattgccatggaaagcataactgtgtatcagacagttgcacacccaggaatccaagggaacctgaacagctactattcccagcagggggttccagccagcatcacattttttagtccctctggcctcacatacagtctcaagcacattcaggagttatctggtgacaatatcgatcaaattaagtttgcagccatcggccccactacggctcgcgcgctggccgcccagggccttcctgtaagctgcactgcagagagccccacgccacaagccctggccactggcatcaggaaggctctccagccccatggctgctgctgagtcagccacctagcgctggccccatgcagcctccctgggctgggctggctctggatggagccaggcatcggcaagggctctcgggagctgctgccgtcagactcctgcctcaagcctgagtggaagcacctgaggaccggggatcgggacctgacctggggctggcctcaggcccacgtgcacgtgactgccctctgtggaagccagcttaaaccctagccctgtgagagcttcctgtgcccagcaggaaggaagtcaaataaaccacactgactacctgtgcttactgag

SEQ ID NO: 8464 - protein, 238 aa, Homo sapiens
MKVLLLKDAKEDDCGQDPYIRELGLYGLEATLIPVLSFEFLSLPSFSEKLSHPEDYGGLIFTSPRAVEAAELCLEQNNKTEVWERSLKEKWNAKSVYVVGNATASLVSKIGLDTEGETCGNAEKLAEYICSRIAMESITVYQTVAHPGIQGNLNSYYSQQGVPASITFFSPSGLTYSLKHIQELSGDNIDQIKFAAIGPTTARALAAQGLPVSCTAESPTPQALATGIRKALQPHGCC

SEQ ID NO: 8465 - DNA, 1372 bp, Homo sapiens
ctcattccgtggcctggatggcggtgcgcatgcgcgagcgcctagctgcgcgcagccacccacgcgaccccagtctgaggtgcggggtcctggggcccggcgcgggtggccgccgcggcccctcgggctgcgtggggagggggcttccgcccctgttgtcattgctcctgcagccttttcgctgggactgcgcgacaccgccccccgaccgggtgcccgctgtgtgccaggccgggtgctgggcacggtcccgcgagtgccctataaggactgccaggcaataatgaaggttcttttactgaaggatgcgaaggaagatgactgtggccaggatccgtatatcagggaattaggattatatggacttgaagccactttgatccctgttttatcgtttgagtttttgtctcttcccagtttctctgagaagctttctcatcctgaagattacgggggactcatttttaccagccccagagcagtggaagcagcagagttatgtttggagcaaaacaataaaactgaagtctgggaaaggtctctgaaagaaaaatggaatgccaagtcagtgtatgtggttggaaatgctactgcttctctagtgagtaaaattggcctggatacagaaggagaaacctgtggaaatgcagaaaagcttgcagaatatatttgttccagggagtcctcagcactgcctcttctatttccctgtggaaacctcaaaagagaaatcctgccaaaagcgctcaaggacaaagggattgccatggaaagcataactgtgtatcagacagttgcacacccaggaatccaagggaacctgaacagctactattcccagcagggggttccagccagcatcacattttttagtccctctggcctcacatacagtctcaagcacattcaggagttatctggtgacaatatcgatcaaattaagtttgcagccatcggccccactacggctcgcgcgctggccgcccagggccttcctgtaagctgcactgcagagagccccacgccacaagccctggccactggcatcaggaaggctctccagccccatggctgctgctgagtcagccacctagcgctggccccatgcagcctccctgggctgggctggctctggatggagccaggcatcggcaagggctctcgggagctgctgccgtcagactcctgcctcaagcctgagtggaagcacctgaggaccggggatcgggacctgacctggggctggcctcaggcccacgtgcacgtgactgccctctgtggaagccagcttaaaccctagccctgtgagagcttcctgtgcccagcaggaaggaagtcaaataaaccacactgactacctgtgcttactgag

SEQ ID NO: 8466 - protein, 265 aa, Homo sapiens; identical to SEQ ID NO: 1242

SEQ ID NO: 8467 - DNA, 499 bp, Homo sapiens
agctttctcatcctgaagattacgggggactcatttttaccagccccagagcagtggaagcagcagagttatgtttggagcaaaacaataaaactgaaggtgaggcactgcctcttctatttccctgtggaaacctcaaaagagaaatcctgccaaaagcgctcaaggacaaagggattgccatggaaagcataactgtgtatcagacagttgcacacccaggaatccaagggaacctgaacagctactattcccagcagggggttccagccagcatcacattttttagtccctctggcctcacatacagtctcaagcacattcaggagttatctggtgacaatatcgatcaaattaagtttgcagccatcggccccactacggctcgcgcgctggccgcccagggccttcctgtaagctgcactgcagagagccccacgccacaaagcttcctgtgcccagcaggaaggaagtcaaataaaccacactgactacctgt

SEQ ID NO: 8468 - protein, 102 aa, Homo sapiens
MESITVYQTVAHPGIQGNLNSYYSQQGVPASITFFSPSGLTYSLKHIQELSGDNIDQIKFAAIGPTTARALAAQGLPVSCTAESPTPQSFLCPAGRKSNKPH

SEQ ID NO: 8469 - DNA, 1644 bp, Homo sapiens
ctcattccgtggcctggatggcggtgcgcatgcgcgagcgcctagctgcgcgcagccacccacgcgaccccagtctgaggtgcggggtcctggggcccggcgcgggtggccgccgcggcccctcgggctgcgtggggagggggcttccgcccctgttgtcattgctcctgcagccttttcgctgggactgcgcgacaccgccccccgaccgggtgcccgctgtgtgccaggccgggtgctgggcacggtcccgcgagtgccctataaggactgccaggcaataatgaaggttcttttactgaaggatgcgaaggaagatgactgtggccaggatccgtatatcagggaattaggattatatggacttgaagccactttgatccctgttttatcgtttgagtttttgtctcttcccagtttctctgagaagctttctcatcctgaagattacgggggactcatttttaccagccccagagcagtggaagcagcagagttatgtttggagcaaaacaataaaactgaagtctgggaaaggtctctgaaagaaaaatggaatgccaagtcagtgtatgtggttggaaatgctactgcttctctagtgagtaaaattggcctggatacagaaggagaaacctgtggaaatgcagaaaagcttgcagaatatatttgttccagtgaagaagtcaaaggaatcttttgaagtgaagaaagtgggtttggacgtgcccttatgctgatgaatcattggagtaatatctggggtttagccgcatccttggtggcaaggcggtggggaaagcccctgagggtgaggccagcctgagccccaagggaaaggggctgctgggacctcctgacctcaactcatctccaggagcgcacagggcctcgcacagatgcctcagtctgtaccgctgggagttcgtgccatctcagacctaccctccctacctgggctgtacctaaagagatactgctaggctttctctagaatgtttcatgagccagcactgtgagacattttcaagctaaaaacatacagttcaggagactgtaatctgtggtagaaagtgttcaccatttgctgctagtaaagacggttggccctgtgcttctctggccacttgtgccacatggtgttctcggaagaggcctctccatgcaccagtgtggagaagccctctggaggccaattcaaagagcatctgaggctaagcaactgaaaggaaaaggcctgatggccaacgtgttgctttctgtggaatgttccagactggattgctgggggtcattttctttaacagcagcctagacaggcagtgactctcttttattcagccaggtgttgaaatagctgcagggaagccacagacagttgttccagctttccggatcagagagcactggttgggccccgtgccatgtggccccagccccatgggatcgctcctcaggtcatggagccacacatcagtgtggagggttcgctccaggggttcctggtacaggatgcagatgggtcttgtctggctccaggctttttgtttctaatgttgtttctagagagtcatcatcaccgcataaatggtatcaaagcccttcttttaaaaatgtagaaataaatgtaaatggtagatcttg

SEQ ID NO: 8470 - protein, 139 aa, Homo sapiens
MKVLLLKDAKEDDCGQDPYIRELGLYGLEATLIPVLSFEFLSLPSFSEKLSHPEDYGGLIFTSPRAVEAAELCLEQNNKTEVWERSLKEKWNAKSVYVVGNATASLVSKIGLDTEGETCGNAEKLAEYICSSEEVKGIF

SEQ ID NO: 8471 - DNA, 1267 bp, Homo sapiens
gtccggaaggtcaggcaaggggaagctgcgcaggcgcagtgtgagcggcaacatggcgtccaggtctaagcggcgtgccgtggaaagtggggttccgcagccgccggatcccccagtccagcgcgacgaggaagaggaaaaagaagtcgaaaatgaggatgaagacgatgatgacagtgacaaggaaaaggatgaagaggacgaggtcattgacgaggaagtgaatattgaatttgaagcttattccctatcagataatgattatgacggaattaagaaattactgcagcagctttttctaaaggctcctgtgaacactgcagaactaacagatctcttaattcaacagaaccatattgggagtgtgattaagcaaacggatgtttcagaagacagcaatgatgatatggatgaagatgaggtttttggtttcataagccttttaaatttaactgaaagaaagggtacccagtgtgttgaacaaattcaagagttggttctacgcttctgtgagaagaactgtgaaaagagcatggttgaacagctggacaagtttttaaatgacaccaccaagcctgtgggccttctcctaagtgaaagattcattaatgtccctccacagatcgctctgcccatgtaccagcagcttcagaaagaactggcgggggcacacagaaccaataagccatgtgggaagtgctacttttaccttctgattagtaagacatttgtggaagcaggaaaaaacaattccaaaaagaaacctagcaacaaaaagaaagctgcgttaatgtttgcaaatgcagaggaagaatttttctatgagaaggcaattctcaagttcaactactcagtgcaggaggagagcgacacttgtctgggaggcaaatggtcttttgatgacgtaccaatgacgcccttgcgaactgtgatgttaattccaggcgacaagatgaacgaaatcatggataaactgaaagaatatctatctgtctaacccatttccaatggacagtgatgggcttgtttttgtaaaattaccagaaaactcagtggagatttactgaaaaactcagactttattcagattaagttcctctacaaaaagtagggttctgtcccatgtgtctctgacacatttacaaaataccagttttttaaaattttggtcaaattatgagtggttgatttaaaaacttttccaagaagaagaaaagcatggagtagtaatttaaagaactcaataaaaacttctattttttatttt

SEQ ID NO: 8472 - protein, 314 aa, Homo sapiens; identical to SEQ ID NO: 1246

SEQ ID NO: 8473 - DNA, 1752 bp, Homo sapiens
gtccggaaggtcaggcaaggggaagctgcgcaggcgcagtgtgagcggcaacatggcgtccaggtctaagcggcgtgccgtggaaagtggggttccgcagccgccggatcccccagtccagcgcgacgaggaagaggaaaaagaagtcgaaaatgaggatgaagacgatgatgacagtgacaaggaaaaggatgaagaggacgaggtcattgacgaggaagtgaatattgaatttgaagcttattccctatcagataatgattatgacggaattaagaaattactgcagcagctttttctaaaggctcctgtgaacactgcagaactaacagatctcttaattcaacagaaccatattgggagtgtgattaagcaaacggatgtttcagaagacagcaatgatgatatggatgaagatgaggtttttggtttcataagccttttaaatttaactgaaagaaagggtacccagtgtgttgaacaaattcaagagttggttctacgcttctgtgagaagaactgtgaaaagagcatggttgaacagctggacaagtttttaaatgacaccaccaagcctgtgggccttctcctaagtgaaagattcattaatgtccctccacagatcgctctgcccatgtaccagcagcttcagaaagaactggcgggggcacacagaaccaataagccatgtgggaagtgctacttttaccttctgattagtaagacatttgtggaagcaggaaaaaacaattccaaaaagaaacctagcaacaaaaagaaagctgcgttaatgtttgcaaatgcagaggaagaatttttctatgagaaggcaattctcaagttcaactactcagtgcaggaggagagcgacacttgtctgggaggcaaatggtcttttgatgacgtaccaatgacgcccttgcgaactgtgatgttaattccaggcgacaagatgaacgaaatcatggataaactgaaagaatatctatctgtctaacccatttccaatggacagtgatgggcttgtttttgtaaaattaccagaaaactcagtggagatttactgaaaaactcagactttattcagattaagttcctctacaaaaagtagggttctgtcccatgtgtctctgacacatttacaaaataccagttttttaaaattttggtcaaattatgagtggttgatttaaaaacttttccaagaagaagaaaagcatggagtagtaatttaaagaactcaataaaaacttctattttttattttaaaataatatacacagtgttattttcttcaagaccgtcctgtggatgtgaaatccgtcttcgcgtcatgtatctcccatatccagcagttcagccatccagctacctttgggaccctgctgcaccttgtgtttgctggggagtcactggagagtgcatctctgttcagtttcagggcacgtctcacacatttgctgttccttattcattgttgacacaggggataggtgatccactacttgctgtagaatgtccttactttcactaggaggcagattactgaaatagtattgtggtaccagctgcataaatctgtttatttaagacaaaaagatgagattatgagtggggaaggtggtgagagacaccaaacattatgtctgggcacttcccatccctggagaatctacctgtagaaccggtatttaatttgaactcagatagtatctcagtccgactttgtaaaataaatactttctgtttttt

SEQ ID NO: 8474 - protein, 314 aa, Homo sapiens; identical to SEQ ID NO: 1246

SEQ ID NO: 8475 - DNA, 1185 bp, Homo sapiens
gtccggaaggtcaggcaaggggaagctgcgcaggcgcagtgtgagcggcaacatggcgtccaggtctaagcggcgtgccgtggaaagtggggttccgcagccgccggatcccccagtccagcgcgacgaggaagaggaaaaagaagtcgaaaatgaggatgaagacgatgatgacagtgacaaggaaaaggatgaagaggacgaggtcattgacgaggaagtgaatattgaatttgaagcttattccctatcagataatgattatgacggaattaagaaattactgcagcagctttttctaaaggctcctgtgaacactgcagaactaacagatctcttaattcaacagaaccatattgggagtgtgattaagcaaacggatgtttcagaagacagcaatgatgatatggatgaagatgaggtttttggtttcataagccttttaaatttaactgaaagaaagggtacccagtgtgttgaacaaattcaagagttggttctacgcttctgtgagaagaactgtgaaaagagcatggttgaacagctggacaagtttttaaatgacaccaccaagcctgtgggccttctcctaagtgaaagattcattaatgtccctccacagatcgctctgcccatgtaccagcagcttcagaaagaactggcgggggcacacagaaccaataagccatgtgggaagtgctacttttaccttctgattagtaagacatttgtggaagcaggaaaaaacaattccaaaaagaaacctagcaacaaaaagaaagctgcgttaatgtttgcaaatgcagaggaagaatttttctatgaggagcagggaaaacctgaggtgcttggaggtccagacacaagaagaggattggaaccagttccgatacagcacaatggttggtctgttcccccagtattagaataaattaaaacatacaagccaggatgaatgaagccaataggaaataaaaaacaggcacacaacattatttggggaaaaacacctctagtgacacattttcttcatctgcactgattatttcagcaaaagaaatctagtatgttttcatacatctgatgtataaatttgctgaactttgagttagttttcttaagataatttttcatattaagaaaattttccttttctaacctattaaaatacctcactatcatttc

SEQ ID NO: 8476 - protein, 292 aa, Homo sapiens; identical to SEQ ID NO: 1248

SEQ ID NO: 8477 - DNA, 2378 bp, Homo sapiens
gtccggaaggtcaggcaaggggaagctgcgcaggcgcagtgtgagcggcaacatggcgtccaggtctaagcggcgtgccgtggaaagtggggttccgcagccgccggatcccccagtccagcgcgacgaggaagaggaaaaagaagtcgaaaatgaggatgaagacgatgatgacagtgacaaggaaaaggatgaagaggacgaggtcattgacgaggaagtgaatattgaatttgaagcttattccctatcagataatgattatgacggaattaagaaattactgcagcagctttttctaaaggctcctgtgaacactgcagaactaacagatctcttaattcaacagaaccatattgggagtgtgattaagcaaacggatgtttcagaagacagcaatgatgatatggatgaagatgaggtttttggtttcataagccttttaaatttaactgaaagaaagggtacccagtgtgttgaacaaattcaagagttggttctacgcttctgtgagaagaactgtgaaaagagcatggttgaacagctggacaagtttttaaatgacaccaccaagcctgtgggccttctcctaagtgaaagattcattaatgtccctccacagatcgctctgcccatgtaccagcagcttcagaaagaactggcgggggcacacagaaccaataagccatgtgggaagtgctacttttaccttctgattagtaagacatttgtggaagcaggaaaaaacaattccaaaaagaaacctagcaacaaaaagaaagctgcgttaatgtttgcaaatgcagaggaagaatttttctatgaggagcagggaaaacctgaggtgcttggaggtccagacacaagaagaggattggaaccagttccgatacagcacaatggttggtctgttcccccagtattagaataaattaaaacatacaagccaggatgaatgaagccaataggaaataaaaaacaggcacacaacattatttggggaaaaacacctctagtgacacattttcttcatctgcactgattatttcagcaaaagaaatctagtatgttttcatacatctgatgtataaatttgctgaactttgagttagttttcttaagataatttttcatattaagaaaattttccttttctaacctattaaaatacctcactatcatttcaaaaggttaaatgagttgatcactatctctgctctgtgctcctcaaaatataatttcaaatggatccgatctaaatctatacctagtgcagatttgcaaaaaaagaaaaggaatagtcattaaggatacctgttaccatggctgcgattgttagcacttcatctacacagtcaaattcacaggacgctaagatagacttcgagagttgtggatcaagaggaaactctgacatgatgattccaaattcagaaagatttccatcattatccagtgctgccagataatctaagtcttccaatgcctgcatcaaactttctggtgctaggaaaggaaaaaaataataatttaagagtctcatatggctaagatggagaaacaggtactggacttttccctcctgcatgaaacaagcaaacaatggacaaaatatgtgaaacaacggtttgcaagccaccaaataccagggagtgaaggatagtgattcttgagagggcaaactcaggaggggagccctgtgattgtccagctcatgctccgaggagggtcccagctgcagtgtgcatgcggggggaacccaggtggagcctgccagcctccctgcagtaggaaaacaatgccagggatccagggagactaaggtggccggaactcgcggtcacagtactggagagagacacacagatctaagtcgggggccagagggagctccctcaactaggcagcacagccctactgatcagcgcatgtgtgtaaggaaccacctcaggccagagaaagagccatgtgagaagattagaaggaacagtggtgctgacacaggacctagggtagggcctgttcccaccaccctagctggaaaacctcatgatttatggggcactgggtagaaaacacaagtgagaaaccctagatgggcactgccacctgacacagctatacagcaggacctgaaaggatcacactgcatcctaggacaaagctcaaaagtacctctgggactacaaaaatattcagtgcccaagaaggtaaaatgtacaatgtctagcatccagtagagaggcatgaaaagcaggaaaatacattgcataatacagagaaaaattaatcacaactgacctggatctcagatgctagaaatagtagacaaagatgttatttcccagtgcaaataaagaaataaagatagcaagctg

SEQ ID NO: 8478 - protein, 292 aa, Homo sapiens; identical to SEQ ID NO: 1248

SEQ ID NO: 8479 - DNA, 1238 bp, Homo sapiens
gtccggaaggtcaggcaaggggaagctgcgcaggcgcagtgtgagcggcaacatggcgtccaggtctaagcggcgtgccgtggaaagtggggttccgcagccgccggatcccccagtccagcgcgacgaggaagaggaaaaagaagtcgaaaatgaggatgaagacgatgatgacagtgacaaggaaaaggatgaagaggacgaggtcattgacgaggaagtgaatattgaatttgaagcttattccctatcagataatgattatgacggaattaagaaattactgcagcagctttttctaaaggctcctgtgaacactgcagaactaacagatctcttaattcaacagaaccatattgggagtgtgattaagcaaacggatgtttcagaagacagcaatgatgatatggatgaagatgaggtttttggtttcataagccttttaaatttaactgaaagaaagggtacccagtgtgttgaacaaattcaagagttggttctacgcttctgtgagaagaactgtgaaaagagcatggttgaacagctggacaagtttttaaatgacaccaccaagcctgtgggccttctcctaagtgaaagattcattaatgtccctccacagatcgctctgcccatgtaccagcagcttcagaaagaactggcgggggcacacagaaccaataagccatgtgggaagtgctacttttaccttctgattagtaagacatttgtggaagcaggaaaaaacaattccaaaaagaaacctagcaacaaaaagaaagctgcgttaatgtttgcaaatgcagaggaagaatttttctatgaggagcagggaaaacctgaggtgcttggaggtccagacacaagaagaggattggaaccagttccgatacagcacaatggtggttcacgggggcaagtgacagccctggtttctctgaaggctggactaattcaatcaagatcaactctaagtgatttccagggaaccttcatgactgttggaattgctctgtcataataagtcagggatatttaggaggctcatagtctcctggagggataaaacatctcggcacctagtaatggtaaattagtcaatatttgttagtttcgtttgagatctcaaatgttaggattttctgaagtctcagtgtctttcagagtttgagataccttgttttcattttttctaatttttaatttaaaagtaataaagaatattttgtaatgattag

SEQ ID NO: 8480 - protein, 322 aa, Homo sapiens; identical to SEQ ID NO: 1244

SEQ ID NO: 8481 - DNA, 1303 bp, Homo sapiens
gtccggaaggtcaggcaaggggaagctgcgcaggcgcagtgtgagcggcaacatggcgtccaggtctaagcggcgtgccgtggaaagtggggttccgcagccgccggatcccccagtccagcgcgacgaggaagaggaaaaagaagtcgaaaatgaggatgaagacgatgatgacagtgacaaggaaaaggatgaagaggacgaggtcattgacgaggaagtgaatattgaatttgaagcttattccctatcagataatgattatgacggaattaagaaattactgcagcagctttttctaaaggctcctgtgaacactgcagaactaacagatctcttaattcaacagaaccatattgggagtgtgattaagcaaacggatgtttcagaagacagcaatgatgatatggatgaagatgaggtttttggtttcataagccttttaaatttaactgaaagaaagggtacccagtgtgttgaacaaattcaagagttggttctacgcttctgtgagaagaactgtgaaaagagcatggttgaacagctggacaagtttttaaatgacaccaccaagcctgtgggccttctcctaagtgaaagattcattaatgtccctccacagatcgctctgcccatgtaccagcagcttcagaaagaactggcgggggcacacagaaccaataagccatgtgggaagtgctacttttaccttctgattagtaagacatttgtggaagcaggaaaaaacaattccaaaaagaaacctagcaacaaaaagaaagctgcgttaatgtttgcaaatgcagaggaagaatttttctatgaggagcagggaaaacctgaggtgcttggaggtccagacacaagaagaggattggaaccagttccgatacagcacaatggtggttcacgggggcaagtgacagccctggtttctctgaaggctggactaattcaatcaagatcaactctaagtgatttccagggaaccttcatgactgttggaattgctctgtcataataagtcagggatatttaggaggctcatagtctcctggagggataaaacatctcggcacctagtaatggtaaattagtcaatatttgttagtttcgtttgagatctcaaatgttaggattttctgaagtctcagtgtctttcagagtttgagataccttgttttcattttttctaatttttaatttaaaagtaataaagaatattttgtaatgattaggatgaaaattttatcgtcaattataagccaaaatttgctaaaattaaagtcagtatacttgaaac

SEQ ID NO: 8482 - protein, 322 aa, Homo sapiens; identical to SEQ ID NO: 1244

SEQ ID NO: 8483 - DNA, 1473 bp, Homo sapiens
gtccggaaggtcaggcaaggggaagctgcgcaggcgcagtgtgagcggcaacatggcgtccaggtctaagcggcgtgccgtggaaagtggggttccgcagccgccggatcccccagtccagcgcgacgaggaagaggaaaaagaagtcgaaaatgaggatgaagacgatgatgacagtgacaaggaaaaggatgaagaggacgaggtcattgacgaggaagtgaatattgaatttgaagcttattccctatcagataatgattatgacggaattaagaaattactgcagcagctttttctaaaggctcctgtgaacactgcagaactaacagatctcttaattcaacagaaccatattgggagtgtgattaagcaaacggatgtttcagaagacagcaatgatgatatggatgaagatgaggtttttggtttcataagccttttaaatttaactgaaagaaagggtacccagtgtgttgaacaaattcaagagttggttctacgcttctgtgagaagaactgtgaaaagagcatggttgaacagctggacaagtttttaaatgacaccaccaagcctgtgggccttctcctaagtgaaagattcattaatgtccctccacagatcgctctgcccatgtaccagcagcttcagaaagaactggcgggggcacacagaaccaataagccatgtgggaagtgctacttttaccttctgattagtaagacatttgtggaagcaggaaaaaacaattccaaaaagaaacctagcaacaaaaagaaagctgcgttaatgtttgcaaatgcagaggaagaatttttctatgaggagcagggaaaacctgaggtgcttggaggtccagacacaagaagaggattggaaccagttccgatacagcacaatggtggttcacgggggcaagtgacagccctggtttctctgaaggctggactaattcaatcaagatcaactctaagtgatttccagggaaccttcatgactgttggaattgctctgtcataataagtcagggatatttaggaggctcatagtctcctggagggataaaacatctcggcacctagtaatggtaaattagtcaatatttgttagtttcgtttgagatctcaaatgttaggattttctgaagtctcagtgtctttcagagtttgagataccttgttttcattttttctaatttttaatttaaaagtaataaagaatattttgtaatgattaggatgaaaattttatcgtcaattataagccaaaatttgctaaaattaaagtcagtatacttgaaacaagtttctagtaagttctctggggtaagatactaattactctgataaaggggctatcaaaaaaatccagtaaattgttcataagaagagatcagtttaagagtcaaacaatttgctttgctagtaccttagctaaagaaaaaatactattaaagatgactatcaccttta

SEQ ID NO: 8484 - protein, 322 aa, Homo sapiens; identical to SEQ ID NO: 1244

SEQ ID NO: 8485 - DNA, 1673 bp, Homo sapiens
ggggaagctgcgcaggcgcagtgtgagcggcaacatggcgtccaggtctaagcggcgtgccgtggaaagtggggttccgcagccgccggatcccccagtccagcgcgacgaggaagaggaaaaagaagtcgaaaatgaggatgaagacgatgatgacagtgacaaggaaaaggatgaagaggacgaggtcattgacgaggaagtgaatattgaatttgaagcttattccctatcagataatgattatgacggaattaagaaattactgcagcagctttttctaaaggctcctgtgaacactgcagaactaacagatctcttaattcaacagaaccatattgggagtgtgattaagcaaacggatgtttcagaagacagcaatgatgatatggatgaagatgaggtttttggtttcataagccttttaaatttaactgaaagaaagggtacccagtgtgttgaacaaattcaagagttggttctacgcttctgtgagaagaactgtgaaaagagcatggttgaacagctggacaagtttttaaatgacaccaccaagcctgtgggccttctcctaagtgaaagattcattaatgtccctccacagatcgctctgcccatgtaccagcagcttcagaaagaactggcgggggcacacagaaccaataagccatgtgggaagtgctacttttaccttctgattagtaagacatttgtggaagcaggaaaaaacaattccaaaaagaaacctagcaacaaaaagaaagctgcgttaatgtttgcaaatgcagaggaagaatttttctatgaggtaagactatcctgcttatttgtttagatgtaaataaggattttcttgaaaatgatttatcaagatttattgttctcccactttaggtccaagtctttcaagtgtggctactctgtttttctgtttccccacaggacctagcagctaacatagtgccaggtgcatagtaggtactcaggaggctaggcaccagcctccttgcctgcactgtggttatgagcatgaggaggaggaggagaaaagtgattaacctgttaagaatgattaggcatttataatatgcttcctgtgaaatctttcattctaaaaccatgcggagaggtagacattagcctggggtttacagatgtggactttaaggcatagggaaatgagggaaattacctgcgatcacacagctggtcagtgtggaagctggggcacccctgctgctctgtgtccttagtcgtggatgtcatcctgctggtgggatatctccagcatttttttcctataaaggtagcttgtactgtgatggacagccatataccagagaatattcttaccctctcttcctctgaaaaatcttgaagtgggccaggtgcggtggtgcacacctgtaatcccagcaccttgggaagctgaggcgggcagatcacctgaggccagaaattcaagaccagcctggccaacagggagaaaccccatctctactaaaaatacaaaaaaaaaaaaattagccgggcatggtggcagatgcctgtaatcccagctactcggaaggctaaggcaggaaaattgcttgaacctgggaggcagaggctgcagtgagccgagatcgcgccactgcactccagcctgagcaacaaggaagaaactccgtctc

SEQ ID NO: 8486 - protein, 266 aa, Homo sapiens
MASRSKRRAVESGVPQPPDPPVQRDEEEEKEVENEDEDDDDSDKEKDEEDEVIDEEVNIEFEAYSLSDNDYDGIKKLLQQLFLKAPVNTAELTDLLIQQNHIGSVIKQTDVSEDSNDDMDEDEVFGFISLLNLTERKGTQCVEQIQELVLRFCEKNCEKSMVEQLDKFLNDTTKPVGLLLSERFINVPPQIALPMYQQLQKELAGAHRTNKPCGKCYFYLLISKTFVEAGKNNSKKKPSNKKKAALMFANAEEEFFYEVRLSCLFV

SEQ ID NO: 8487 - DNA, 564 bp, Homo sapiens
gtgagcggcaacatggcgtccaggtctaagcggcgtgccgtggaaagtggggttccgcagccgccggatcccccagtccagcgcgacgaggaagaggaaaaagaagtcgaaaatgaggatgaagacgatgatgacagtgacaaggaaaaggatgaagaggacgaggtcattgacgaggaagtgaatattgaatttgaagcttattccctatcagataatgattatgacggaattaagaaattactgcagcagctttttctaaaggctcctgtgaacactgcagaactaacagatctcttaattcaacagaaccatattgggagtgtgattaagggtacccagtgtgttgaacaaattcaagagttggttctacgcttctgtgagaagaactgtgaaaagagcatggttgaacagctggacaagtttttaaatgacaccaccaagcctgtgggccttctcctaagtgaaagattcattaatgtccctccacagatcgctctgcccatgtaccagcagcttcagtaagagattctgggaaaatatctttgaacagtaatttttttt

SEQ ID NO: 8488 - protein, 170 aa, Homo sapiens
MASRSKRRAVESGVPQPPDPPVQRDEEEEKEVENEDEDDDDSDKEKDEEDEVIDEEVNIEFEAYSLSDNDYDGIKKLLQQLFLKAPVNTAELTDLLIQQNHIGSVIKGTQCVEQIQELVLRFCEKNCEKSMVEQLDKFLNDTTKPVGLLLSERFINVPPQIALPMYQQLQ

SEQ ID NO: 8489 - DNA, 468 bp, Homo sapiens
ccttctcctaagtgaaagattcattaatgtccctccacagatcgctctgcccatgtaccagcagcttacaggtggttcacgggggcaagtgacagccctggtttctctgaaggctggactaattcaatcaagatcaactctaagtgatttccagggaaccttcatgactgttggaattgctctgtcataataagtcagggatatttaggaggctcatagtctcctggagggataaaacatctcggcacctagtaatggtaaattagtcaatatttgttagtttcgtttgagatctcaaatgttaggattttctgaagtctcagtgtctttcagagtttgagataccttgttttcattttttctaatttttaatttaaaagtaataaagaatattttgtaatgattaggatgaaaattttatcgtcaattataagccaaaatttgctaaaattaaagtcagtatacttg

SEQ ID NO: 8490 - protein, 45 aa, Homo sapiens
MYQQLTGGSRGQVTALVSLKAGLIQSRSTLSDFQGTFMTVGIALS

SEQ ID NO: 8491 - DNA, 641 bp, Homo sapiens
ccttctcctaagtgaaagattcattaatgtccctccacagatcgctctgcccatgtaccagcagcttacaggtggttcacgggggcaagtgacagccctggtttctctgaaggctggactaattcaatcaagatcaactctaagtgatttccagggaaccttcatgactgttggaattgctctgtcataataagtcagggatatttaggaggctcatagtctcctggagggataaaacatctcggcacctagtaatggtaaattagtcaatatttgttagtttcgtttgagatctcaaatgttaggattttctgaagtctcagtgtctttcagagtttgagataccttgttttcattttttctaatttttaatttaaaagtaataaagaatattttgtaatgattaggatgaaaattttatcgtcaattataagccaaaatttgctaaaattaaagtcagtatacttgaaacaagtttctagtaagttctctggggtaagatactaattactctgataaaggggctatcaaaaaaatccagtaaattgttcataagaagagatcagtttaagagtcaaacaatttgctttgctagtaccttagctaaagaaaaaatactattaaagatgactatcaccttt

SEQ ID NO: 8492 - protein, 45 aa, Homo sapiens; identical to SEQ ID NO: 8490

SEQ ID NO: 8493 - DNA, 1029 bp, Homo sapiens
atcaagcgaatcgagcttccctatgcagaacctgcttttggctccaaggaaaacactctaaacataaagaaagctcttctgtccggttactttatgcagattgctcgggatgttgatggatcaggtaactacttaatgctgacacataagcaggttgctcagctgcatcccctgtctggttactcaatcaccaagaagatgccagagtgggtcctcttccataaattcagcatttctgagaacaactacatcaggattacctcagaaatctctcctgaactatttatgcagctggtaccacaatactatttcagtaatctgcctcctagtgaaagtaaggacattctacagcaagtagtggatcacctatcccctgtgtcaacaatgaataaggaacagcaaatgtgtgagacgtgccctgaaactgaacagagatgcactctccagtgactccccagcaaacacaaggtgcagcagggtcccaaaggtagctggatggctgaactgctggatatgggagatacatgacgcgaagacggatttcacatccacaggacggtcttgaagaaaataacactgtgtatattattttaaaataaaaaatagaagtttttattgagttctttaaattactactccatgcttttcttcttcttggaaaagtttttaaatcaaccactcataatttgaccaaaattttaaaaaactggtattttgtaaatgtgtcagagacacatgggacagaaccctactttttgtagaggaacttaatctgaataaagtctgagtttttcagtaaatctccactgagttttctggtaattttacaaaaacaagcccatcactgtccattggaaatgggttagacagatagatattctttcagtttatccatgatttcgttcatcttgtcgcctggaattaacatcacagttcgcaagggcgtcattggtacgtcatcaaaagaccatttgcctcccagacaagtgtcgctctcctcctgcactgagtagttgaacttgagaattg

SEQ ID NO: 8494 - protein, 118 aa, Homo sapiens
MQIARDVDGSGNYLMLTHKQVAQLHPLSGYSITKKMPEWVLFHKFSISENNYIRITSEISPELFMQLVPQYYFSNLPPSESKDILQQVVDHLSPVSTMNKEQQMCETCPETEQRCTLQ

SEQ ID NO: 8495 - DNA, 3302 bp, Homo sapiens
aggcagagagcacgaggcccagtgcagaatcattttctgaaccagccaggaaataccggaacccaccaaactttaaacaccagcctaaattattcctgttcttttaagcaggcagcagaaatgacagaaacccgttaacagaaaaaaaaaaaataatgcttttcatttgaactcctgtgcattttctttttaacttatatgtgttcctaattttccttactctttttgtttgtttgtttcttagtgtggtttattgacaatcatttacaatgccgaagagtgctgtagtgagccagcacagtgggtaacacagcaacggagaacagatgcaggtttgaggaatttaacttgctaaaaccttgaactgaagtcttagagattggaacatacgggtttgtataaataggcttttaagccctgtttgcaatgggttactgataggagaaacttgcttgtggaatgtcagctgcgtgagctcactgtcagacaagatggaagaagaagggctggagtgtccaaactcttcctctgaaaaacgctattttcctgaatccctggattccagcgatggggatgaggaagaggttttggcctgtgaggatttggaacttaacccctttgatggattgccatattcatcacgttattataaacttctgaaagaaagagaagatcttcctatatggaaagaaaaatactcctttatggagaacctgcttcaaaatcaaatcgtgattgtttcaggagatgctaaatgtggtaagagcgctcaggttcctcagtggtgtgctgaatattgtctttccatccactaccagcacgggggcgtgatatgcacacaggtccacaagcagactgtggtccagctcgccctgcgggtggcggatgaaatggatgttaacattggtcatgaggttggctacgtgatccctttcgagaactgctgtaccaacgaaacaatcctgaggtattgtactgatgatatgctgcaaagagaaatgatgtccaatccttttttgggtagctatggggtcatcatcttagatgatattcatgaaagaagcattgcaactgatgtgttacttggacttcttaaagatgttttactagcaagaccagaactgaagctcataattaactcctcacctcacctgatcagcaaactcaattcttattatggaaacgtgcctgtcatagaagtgaaaaataaacaccctgtggaggttgtgtaccttagtgaggctcaaaaggattcttttgagtctattttacgccttatctttgaaattcaccactcgggtgagaaaggtgacattgtagtctttctggcctgtgaacaagatattgagaaagtctgtgaaactgtctatcaaggatctaacctaaacccagatcttggagaactggtggttgttcctttgtatccaaaagagaaatgttcattgttcaagccactcgatgaaacagaaaaaagatgccaagtttatcaaagaagagtggtgttaactactagctctggagagtttttgatctggagcaactcagtcagatttgttatcgatgtgggtgtggaaagaagaaaggtgtacaacccgagaataagagcaaactcgctcgtcatgcagcccatcagccagagccaggcagagatacgcaagcagattcttggctcatcttcttcaggaaaatttttctgcctgtacactgaagaatttgcctccaaagacatgacgccactgaagccagcagaaatgcaggaagccaacctaacaagcatggtgctttttatgaagaggatagacattgcgggcctaggccactgtgacttcatgaacagaccagcaccagaaagtttgatgcaggcattggaagacttagattatctggcagcactggataatgatggaaatctttctgaatttggaatcatcatgtcagagtttcctcttgatccacaactctcgaagtctatcttagcgtcctgtgaatttgactgtgtagatgaagtgctaacaatcgcagccatggtaacagctccaaattgcttttcacatgtgccacatggagctgaagaggctgccttgacttgttggaagacatttttacatcccgaaggagatcactttaccctcatcagcatttacaaggcttaccaagacacaactctgaattctagcagtgagtactgtgtggaaaagtggtgtcgtgattacttcctcaactgttcagcactcagaatggcagatgttattcgagctgaactcttagaaattatcaagcgaatcgagcttccctatgcagaacctgcttttggctccaaggaaaacactctaaacataaagaaagctcttctgtccggttactttatgcagattgctcgggatgttgatggatcaggtaactacttaatgctgacacataagcaggttgctcagctgcatcccctgtctggttactcaatcaccaagaagatgccagagtgggtcctcttccataaattcagcatttctgagaacaactacatcaggattacctcagaaatctctcctgaactatttatgcagctggtaccacaatactatttcagtaatctgcctcctagtgaaagtaaggacattctacagcaagtagtggatcacctatcccctgtgtcaacaatgaataaggaacagcaaatgtgtgagacgtgccctgaaactgaacagagatgcactctccagtgactccccagcaaacacaaggtgcagcagggtcccaaaggtagctggatggctgaactgctggatatgggagatacatgacgcgaagacggatttcacatccacaggacggtcttgaagaaaataacactgtgtatattattttaaaataaaaaatagaagtttttattgagttctttaaattactactccatgcttttcttcttcttggaaaagtttttaaatcaaccactcataatttgaccaaaattttaaaaaactggtattttgtaaatgtgtcagagacacatgggacagaaccctactttttgtagaggaacttaatctgaataaagtctgagtttttcagtaaatctccactgagttttctggtaattttacaaaaacaagcccatcactgtccattggaaatgggttagacagatagatattctttcagtttatccatgatttcgttcatcttgtcgcctggaattaacatcacagttcgcaagggcgtcattggtacgtcatcaaaagaccatttgcctcccagacaagtgtcgctctcctcctgcactgagtagttgaacttgagaattg

SEQ ID NO: 8496 - protein, 743 aa, Homo sapiens; identical to SEQ ID NO: 1250

SEQ ID NO: 8497 - DNA, 797 bp, Homo sapiens
atcaagcgaatcgagcttccctatgcagaacctgcttttggctccaaggaaaacactctaaacataaagaaagctcttctgtccggttactttatgcagattgctcgggatgttgatggatcaggtaactacttaatgctgacacataagcaggttgctcagctgcatcccctgtctggttactcaatcaccaagaagatgccagagtgggtcctcttccataaattcagcatttctgagaacaactacatcaggattacctcagaaatctctcctgaactatttatgcagctggtaccacaatactatttcagtaatctgcctcctagtgaaagtaaggacattctacagcaagtagtggatcacctatcccctgtgtcaacaatgaataaggaacagcaaatgtgtgagacgtgccctgaaactgaacagagatgcactctccagtgactccccagcaaacacaaggtgcagcagggtcccaaaggtagctggatggctgaactgctggatatgggagatacatgacgcgaagacggatttcacatccacaggacggtcttgaagaaaataacactgtgtatattattttaaaataaaaaatagaagtttttattgagttctttaaattactactccatgcttttcttcttcttggaaaagtttttaaatcaaccactcataatttgaccaaaattttaaaaaactggtattttgtaaatgtgtcagagacacatgggacagaaccctactttttgtagaggaacttaatctgaataaagtctgagtttttcagt

SEQ ID NO: 8498 - protein, 118 aa, Homo sapiens; identical to SEQ ID NO: 8494

SEQ ID NO: 8499 - DNA, 2386 bp, Homo sapiens
gttctcattattccaattggcaagttttcactcattaggatcaacagccatgctgtttgcttggtaaaaaatctgccccaagtaattcaattatatgtggaaaaaggaagtgcaagcaagggaccgtacctgtgtaccagctgatgtgggaccccctggagcggcctctgcccagcttcctgggagccacttagcagaccaggaaacgagcacagctcacctagttctcagtgacctgtgataccttgctatttttctagatggatctgtcttcctacaaaacccttgagttaattcaatcccattctacaaatggtatggaaaggaaagagacataagctagagacctagagaatggaattgagctgtaaaaactatggcagttgtgggaagtcatcttttttacttagatttttagtgaaatctaacaaaattaaatgggaaaacaatataaattatatttaacttccccaaagacgttttctcatttaggtgcatctttacttatttaaagatacatgtaggcagcaacacagggatttctttccctgtatctgttacgtagtattgcctaaaattttttgtaattcagacatttttttaatagtgatgttgtttgcattgtattttattttcatgggtttttttttctttaggatattgagaaagtctgtgaaactgtctatcaaggatctaacctaaacccagatcttggagaactggtggttgttcctttgtatccaaaagagaaatgttcattgttcaagccactcgatgaaacagaaaaaagatgccaagtttatcaaagaagagtggtgttaactactagctctggagagtttttgatctggagcaactcagtcagatttgttatcgatgtgggtgtggaaagaagaaaggtgtacaacccgagaataagagcaaactcgctcgtcatgcagcccatcagccagagccaggcagagatacgcaagcagattcttggctcatcttcttcaggaaaatttttctgcctgtacactgaagaatttgcctccaaagacatgacgccactgaagccagcagaaatgcaggaagccaacctaacaagcatggtgctttttatgaagaggatagacattgcgggcctaggccactgtgacttcatgaacagaccagcaccagaaagtttgatgcaggcattggaagacttagattatctggcagcactggataatgatggaaatctttctgaatttggaatcatcatgtcagagtttcctcttgatccacaactctcgaagtctatcttagcgtcctgtgaatttgactgtgtagatgaagtgctaacaatcgcagccatggtaacagctccaaattgcttttcacatgtgccacatggagctgaagaggctgccttgacttgttggaagacatttttacatcccgaaggagatcactttaccctcatcagcatttacaaggcttaccaagacacaactctgaattctagcagtgagtactgtgtggaaaagtggtgtcgtgattacttcctcaactgttcagcactcagaatggcagatgttattcgagctgaactcttagaaattatcaagcgaatcgagcttccctatgcagaacctgcttttggctccaaggaaaacactctaaacataaagaaagctcttctgtccggttactttatgcagattgctcgggatgttgatggatcaggtaactacttaatgctgacacataagcaggttgctcagctgcatcccctgtctggttactcaatcaccaagaagatgccagagtgggtcctcttccataaattcagcatttctgagaacaactacatcaggattacctcagaaatctctcctgaactatttatgcagctggtaccacaatactatttcagtaatctgcctcctagtgaaagtaaggacattctacagcaagtagtggatcacctatcccctgtgtcaacaatgaataaggaacagcaaatgtgtgagacgtgccctgaaactgaacagagatgcactctccagtgactccccagcaaacacaaggtgcagcagggtcccaaaggtagctggatggctgaactgctggatatgggagatacatgacgcgaagacggatttcacatccacaggacggtcttgaagaaaataacactgtgtatattattttaaaataaaaaatagaagtttttattgagttctttaaattactactccatgcttttcttcttcttggaaaagtttttaaatcaaccactcataatttgaccaaaattttaaaaaactggtattttgtaaatgtgtcagagacacatgggacagaaccctactttttgtagaggaacttaatctgaataaagtctgagtttttcagt

SEQ ID NO: 8500 - protein, 367 aa, Homo sapiens
MQPISQSQAEIRKQILGSSSSGKFFCLYTEEFASKDMTPLKPAEMQEANLTSMVLFMKRIDIAGLGHCDFMNRPAPESLMQALEDLDYLAALDNDGNLSEFGIIMSEFPLDPQLSKSILASCEFDCVDEVLTIAAMVTAPNCFSHVPHGAEEAALTCWKTFLHPEGDHFTLISIYKAYQDTTLNSSSEYCVEKWCRDYFLNCSALRMADVIRAELLEIIKRIELPYAEPAFGSKENTLNIKKALLSGYFMQIARDVDGSGNYLMLTHKQVAQLHPLSGYSITKKMPEWVLFHKFSISENNYIRITSEISPELFMQLVPQYYFSNLPPSESKDILQQVVDHLSPVSTMNKEQQMCETCPETEQRCTLQ

SEQ ID NO: 8501 - DNA, 3070 bp, Homo sapiens; identical to SEQ ID NO: 1249

SEQ ID NO: 8502 - protein, 743 aa, Homo sapiens; identical to SEQ ID NO: 1250

SEQ ID NO: 8503 - DNA, 2901 bp, Homo sapiens
ggggacactgagcgagggtagcggccaggtcaccggctgaggacactgctcctgaagcccggtcaggcggtcgcgccctccctggcggcccccgcggccccgcaggacctgtgccccgacgtcgccgacccgcggtccccgctgtcgccgacccgcggcgtccgtcgggcgagtgggcctgcccgcgggtaaggcgccggccctgggccgccctcccgggaatcgggagccgccgctgcagtgtggtttattgacaatcatttacaatgccgaagagtgctgtagtgagccagcacagtgggtaacacagcaacggagaacagatgcaggtttgaggaatttaacttgctaaaaccttgaactgaagtcttagagattggaacatacgggtttgtataaataggcttttaagccctgtttgcaatgggttactgataggagaaacttgcttgtggaatgtcagctgcgtgagctcactgtcagacaagatggaagaagaagggctggagtgtccaaactcttcctctgaaaaacgctattttcctgaatccctggattccagcgatggggatgaggaagaggttttggcctgtgaggatttggaacttaacccctttgatggattgccatattcatcacgttattataaacttctgaaagaaagagaagatcttcctatatggaaagaaaaatactcctttatggagaacctgcttcaaaatcaaatcgtgattgtttcaggagatgctaaatgtggtaagagcgctcaggttcctcagtggtgtgctgaatattgtctttccatccactaccagcacgggggcgtgatatgcacacaggtccacaagcagactgtggtccagctcgccctgcgggtggcggatgaaatggatgttaacattggtcatgaggttggctacgtgatccctttcgagaactgctgtaccaacgaaacaatcctgaggtattgtactgatgatatgctgcaaagagaaatgatgtccaatccttttttgggtagctatggggtcatcatcttagatgatattcatgaaagaagcattgcaactgatgtgttacttggacttcttaaagatgttttactagcaagaccagaactgaagctcataattaactcctcacctcacctgatcagcaaactcaattcttattatggaaacgtgcctgtcatagaagtgaaaaataaacaccctgtggaggttgtgtaccttagtgaggctcaaaaggattcttttgagtctattttacgccttatctttgaaattcaccactcgggtgagaaaggtgacattgtagtctttctggcctgtgaacaagatattgagaaagtctgtgaaactgtctatcaaggatctaacctaaacccagatcttggagaactggtggttgttcctttgtatccaaaagagaaatgttcattgttcaagccactcgatgaaacagaaaaaagatgccaagtttatcaaagaagagtggtgttaactactagctctggagagtttttgatctggagcaactcagtcagatttgttatcgatgtgggtgtggaaagaagaaaggtgtacaacccgagaataagagcaaactcgctcgtcatgcagcccatcagccagagccaggcagagatacgcaagcagattcttggctcatcttcttcaggaaaatttttctgcctgtacactgaagaatttgcctccaaagacatgacgccactgaagccagcagaaatgcaggaagccaacctaacaagcatggtgctttttatgaagaggatagacattgcgggcctaggccactgtgacttcatgaacagaccagcaccagaaagtttgatgcaggcattggaagacttagattatctggcagcactggataatgatggaaatctttctgaatttggaatcatcatgtcagagtttcctcttgatccacaactctcgaagtctatcttagcgtcctgtgaatttgactgtgtagatgaagtgctaacaatcgcagccatggtaacagctccaaattgcttttcacatgtgccacatggagctgaagaggctgccttgacttgttggaagacatttttacatcccgaaggagatcactttaccctcatcagcatttacaaggcttaccaagacacaactctgaattctagcagtgagtactgtgtggaaaagtggtgtcgtgattacttcctcaactgttcagcactcagaatggcagatgttattcgagctgaactcttagaaattatcaagcgaatcgagcttccctatgcagaacctgcttttggctccaaggaaaacactctaaacataaagaaagctcttctgtccggttactttatgcagattgctcgggatgttgatggatcaggtaactacttaatgctgacacataagcaggttgctcagctgcatcccctgtctggttactcaatcaccaagaagatgccagagtgggtcctcttccataaattcagcatttctgagaacaactacatcaggattacctcagaaatctctcctgaactatttatgcagctggtaccacaatactatttcagtaatctgcctcctagtgaaagtaaggacattctacagcaagtagtggatcacctatcccctgtgtcaacaatgaataaggaacagcaaatgtgtgagacgtgccctgaaactgaacagagatgcactctccagtgactccccagcaaacacaaggtgcagcagggtcccaaaggtagctggatggctgaactgctggatatgggagatacatgacgcgaagacggatttcacatccacaggacggtcttgaagaaaataacactgtgtatattattttaaaataaaaaatagaagtttttattgagttctttaaatt

SEQ ID NO: 8504 - protein, 743 aa, Homo sapiens; identical to SEQ ID NO: 1250

SEQ ID NO: 8505 - DNA, 467 bp, Homo sapiens
cggttcttatctccattcagaaaacccatggggctgggcacagtggctaatgcccataatcccagcactttgggagggcgaggcaggaggattgcttgagctctggagtttgagaccagactaggcatcacacttggctaactttttgtatttttagtagagacggggtttcgccatgttgcctgggctggtctcaaactccttagctgaggcagtttgctggcctcggcctttgaaagtgctggtattacaggcgtgagctaccgcacccagcctaagatacttcttaatatggaaagccacaaagacaaataatggtggggaaatctaataatactgttagacacgcctcaccttttaaacatctatcacatgttaggcttaggattgttttatggtaaaaacccaagcattcaattctgacacccaaaggaaatactatatattaaagtatgtattagtttcaa

SEQ ID NO: 8506 - protein, 30 aa, Homo sapiens
DQTRHHTWLTFCIFSRDGVSPCCLGWSQTP

SEQ ID NO: 8507 - DNA, 290 bp, Homo sapiens
ctaacatgtgatagatgtttaaaaggtgaggcgtgtctaacagtattattagatttccccaccattatttgtctttgtggctttccatattaagaagtatcttaggctgggtgcggtagctcacgcctgtaataccagcactttcaaaggccgaggccagcaaactgcctcagctaaggactcaagcaatcctcctgcctcgccctcccaaagtgctgggattatgggcattagccactgtgcccagccccatgggttttctgaatggagataagaaccgcaccagagtg

SEQ ID NO: 8508 - protein, 30 aa, Homo sapiens
LTCDRCLKGEACLTVLLDFPTIICLCGFPY

SEQ ID NO: 8509 - DNA, 1294 bp, Homo sapiens
cacttcgcctccgggttgtcagggcaaccgtagcgacgccggccctggctgagaggcgttaggagtccgggggttcgcccgcggaggccggggagcagccgaccatggagccccagaaaatcatgccaccctcaaagcctcatccacctgtcgtgggcaaagtgactcatcacagcattgaattatactgggatctggaaaagaaagccaaacgccaaggacctcaagagcagtggttcaggttctcgattgaagaagaagaccccaaaatgcacacttatggtatcatttatacgggatatgcaacgaagcatgttgttgaaggtctggaaccaaggacgctgtacagatttcgcctgaaggtcaccagcccctctggggagtgtgagtacagcccactcgtctcagtgtctacaaccagagagcccataagtagtgagcacttgcaccgggctgtcagtgtgaatgatgaagatttgctggtccgaatacttcaaggaggccgtgttaaggttgatgttcccaataagtttggctttaccgctctgatggttgctgcccagaaaggatacaccaggcttgtgaaaatcctagtttctaatggcacagacgtgaatctgaagaatggaagtggcaaggacagtctaatgctggcgtgctatgcgggacacctagatgttgtgaaatatctccgaagacatggcgcttcttggcaggctagagacctgggaggctgtacagctctgcactgggctgcagatggaggccactgcagtgtgattgagtggatgataaaggatggctgtgaggtagacgtcgtggacactggttcaggatggaccccactcatgagagtctctgcggtgtcgggaaatcagagggtggcctctcttctaattgatgctggggccaatgtgaatgtgaaggacagaaatggaaagacgccccttatggtggctgtgttaaataatcatgaagagttagttcagttacttcttgacaaaggggcagatgcaagtgtaaaaaatgagttcggcaaaggtgtcctagaaatggccagagtttttgacagacagagtgtagtctccttattagaagaaaggaaaaaaaagcagaggccaaagaagtcttgtgtctgctgatgagagcaccactcatctgcgaaacgcacgtaaaacaaagtgaaccgtgactgttaaactagggatgggaaattctgcatcttggggggctgtacatttatttatttagttgaagattcactgatcccactttgaaatacatctttttacct

SEQ ID NO: 8510 - protein, 345 aa, Homo sapiens
MEPQKIMPPSKPHPPVVGKVTHHSIELYWDLEKKAKRQGPQEQWFRFSIEEEDPKMHTYGIIYTGYATKHVVEGLEPRTLYRFRLKVTSPSGECEYSPLVSVSTTREPISSEHLHRAVSVNDEDLLVRILQGGRVKVDVPNKFGFTALMVAAQKGYTRLVKILVSNGTDVNLKNGSGKDSLMLACYAGHLDVVKYLRRHGASWQARDLGGCTALHWAADGGHCSVIEWMIKDGCEVDVVDTGSGWTPLMRVSAVSGNQRVASLLIDAGANVNVKDRNGKTPLMVAVLNNHEELVQLLLDKGADASVKNEFGKGVLEMARVFDRQSVVSLLEERKKKQRPKKSCVC

SEQ ID NO: 8511 - DNA, 1351 bp, Homo sapiens
ggcaaccgtagcgacgccggccctggctgagaggcgttaggagtccgggggttcgcccgcggaggccggggagcagccgaccatggagccccagaaaatcatgccaccctcaaagcctcatccacctgtcgtgggcaaagtgactcatcacagcattgaattatactgggatctggaaaagaaagccaaacgccaaggacctcaagagcagtggttcaggttctcgattgaagaagaagaccccaaaatgcacacttatggtatcatttatacgggatatgcaacgaagcatgttgttgaaggtctggaaccaaggacgctgtacagatttcgcctgaaggtcaccagcccctctggggagtgtgagtacagcccactcgtctcagtgtctacaaccaggccatctctgagcaagagccttgtaaaaattaggatggtcacaagtgttctccacggcccacccactgaaaacacaggcaaagcccataagtagtgagcacttgcaccgggctgtcagtgtgaatgatgaagatttgctggtccgaatacttcaaggaggccgtgttaaggttgatgttcccaataagtttggctttaccgctctgatggttgctgcccagaaaggatacaccaggcttgtgaaaatcctagtttctaatggcacagacgtgaatctgaagaatggaagtggcaaggacagtctaatgctggcgtgctatgcgggacacctagatgttgtgaaatatctccgaagacatggcgcttcttggcaggctagagacctgggaggctgtacagctctgcactgggctgcagatggaggccactgcagtgtgattgagtggatgataaaggatggctgtgaggtagacgtcgtggacactggttcaggatggaccccactcatgagagtctctgcggtgtcgggaaatcagagggtggcctctcttctaattgatgctggggccaatgtgaatgtgaaggacagaaatggaaagacgccccttatggtggctgtgttaaataatcatgaagagttagttcagttacttcttgacaaaggggcagatgcaagtgtaaaaaatgagttcggcaaaggtgtcctagaaatggccagagtttttgacagacagagtgtagtctccttattagaagaaaggaaaaaaaagcagaggccaaagaagtcttgtgtctgctgatgagagcaccactcatctgcgaaacgcacgtaaaacaaagtgaaccgtgactgttaaactagggatgggaaattctgcatcttggggggctgtacatttatttatttagttgaagattcactgatcccactttgaaatacatctttttacct

SEQ ID NO: 8512 - protein, 197 aa, Homo sapiens [sequence omitted]

SEQ ID NO: 8513 - DNA, 1188 bp, Homo sapiens
cgccggccctggctgagaggcgttaggagtccgggggttcgcccgcggaggccggggagcagccgaccatggagccccagagggatatgcaacgaagcatgttgttgaaggtctggaaccaaggacgctgtacagatttcgcctgaaggtcaccagcccctctggggagtgtgagtacagcccactcgtctcagtgtctacaaccagagagcccataagtagtgagcacttgcaccgggctgtcagtgtgaatgatgaagatttgctggtccgaatacttcaaggaggccgtgttaaggttgatgttcccaataagtttggctttaccgctctgatggttgctgcccagaaaggatacaccaggcttgtgaaaatcctagtttctaatggcacagacgtgaatctgaagaatggaagtggcaaggacagtctaatgctggcgtgctatgcgggacacctagatgttgtgaaatatctccgaagacatggcgcttcttggcaggctagagacctgggaggctgtacagctctgcactgggctgcagatggaggccactgcagtgtgattgagtggatgataaaggatggctgtgaggtagacgtcgtggacactggttcaggatggaccccactcatgagagtctctgcggtgtcgggaaatcagagggtggcctctcttctaattgatgctggggccaatgtgaatgtgaaggacagaaatggaaagacgccccttatggtggctgtgttaaataatcatgaagagttagttcagttacttcttgacaaaggggcagatgcaagtgtaaaaaatgagttcggcaaaggtgtcctagaaatggccagagtttttgacagacaggttgggatgctctttctgcctatcaaggctaatttttagtccttctagactcagaaaaaccaccaaaaccctggattacattcgcctgtctgttttgtttatctagagtgtagtctccttattagaagaaaggaaaaaaaagcagaggccaaagaagtcttgtgtctgctgatgagagcaccactcatctgcgaaacgcacgtaaaacaaagtgaaccgtgactgttaaactagggatgggaaattctgcatcttggggggctgtacatttatttatttagttgaagattcactgatcccactttgaaatacatctttttacctaa

SEQ ID NO: 8514 - protein, 188 aa, Homo sapiens
MVAAQKGYTRLVKILVSNGTDVNLKNGSGKDSLMLACYAGHLDVVKYLRRHGASWQARDLGGCTALHWAADGGHCSVIEWMIKDGCEVDVVDTGSGWTPLMRVSAVSGNQRVASLLIDAGANVNVKDRNGKTPLMVAVLNNHEELVQLLLDKGADASVKNEFGKGVLEMARVFDRQVGMLFLPIKANF

SEQ ID NO: 8515 - DNA, 427 bp, Homo sapiens
aggtacataatgagagatctccatcagtgagcttggcaccagccacaggtggcccactgccaccagagctgggcacaggcccacttccagctgctactcatgatggagcaaaaaccctcacttctagccatcacccctccagatctggtacagagcccggaaaaggaagccttaggtgtgagtgaagcctcagtgaacacacacacgtgtcagcaatggaccagctgctgccaaatcacacaactacgcaacacgttgctcagaaatgccaatggtgactagcagagtgcaaacattactatgacaatggagcagaggcccggggcggcaccgagccttggtaagagccgacagaaatggcaggtcacaggccgtcactgaggagaactgcaatgcggcaacacttatatgacacttaatttgggtc

SEQ ID NO: 8516 - protein, 60 aa, Homo sapiens
MMEQKPSLLAITPPDLVQSPEKEALGVSEASVNTHTCQQWTSCCQITQLRNTLLRNANGD

SEQ ID NO: 8517 - DNA, 660 bp, Homo sapiens
atgtgagtcattgtgacatcaccagccagaattgctgggattcagtgagatgactcacagtaagagaaatcatgccaccctcaaagcctcatccacctgtcgtgggcaaagtgactcatcacagcattgaattatactgggatctggaaaagaaagccaaacgccaaggacctcaagagcagtggttcaggttctcgattgaagaagaagaccccaaaatgcacacttatggtatcatttatacgtaggtgcagtgttgaattgcttgccactttgccttacttcctgattagctggaatgatttctgttgtctctaaaaagccactgcttgtttcaaattaaagaatgagtcagcatcatttgtattcatgctcttttatgaattacaatttttggaaaataggcattagcagtaactttgaaattaaacctctgtacctttgagagcttctttgacttctgaaatattttaatgatatgtatttaaaatccagaatgtagagacagactcaaacaatagcttgatgcaattaggtgagcttcccatcaggctgttgtgttcactgacgtggaatggccccgcatggtctaccctggctagcttctctgatctcatgtcataccattgtccccttgtcaactctcttataccacgctgg

SEQ ID NO: 8518 - protein, 58 aa, Homo sapiens [sequence omitted]

SEQ ID NO: 8519 - DNA, 522 bp, Homo sapiens
tgtcacacagataaatatgagtcacaggagtttgttgtacatagtattacatcacccagaaatcatgccaccctcaaagcctcatccacctgtcgtgggcaaagtgactcatcacagcattgaattatactgggatctggaaaagaaagccaaacgccaaggacctcaagagcagtggttcaggttctcgattgaagaagaagaccccaaaatgcacacttatggtatcatttatacgggatatgcaacgaagcatgttgttgaaggtctggaaccaaggacgctgtacagatttcgcctgaaggtcaccagcccctctggggagtgtgagtacagcccactcgtctcagtgtctacaaccagtagcatttggcttggaggagagcccataagtagtgagcacttgcaccgggctgtcagtgtgaatgatgaagatttgctggtccgaatacttcaaggagggtgagagaactctgtcagttgttttttttcccccatgcctataaagtgcatagaaataca

SEQ ID NO: 8520 - protein, 149 aa, Homo sapiens
MSHRSLLYIVLHHPEIMPPSKPHPPVVGKVTHHSIELYWDLEKKAKRQGPQEQWFRFSIEEEDPKMHTYGIIYTGYATKHVVEGLEPRTLYRFRLKVTSPSGECEYSPLVSVSTTSSIWLGGEPISSEHLHRAVSVNDEDLLVRILQGG

SEQ ID NO: 8521 - DNA, 5739 bp, Homo sapiens
gagcagtgaacccttgcactgctgcagctgctgctgcaggaggagctctgtgcctcgctggtcgccgagccccgcgcacgctgcctgtgctctgtgcctcactggtcgctgagccccgcgcacgctgcctgtgctcagggctgctcgtggttttagggagcggccaccaggctgggaggcgagtcttaagtccggccacacggtgccttcaggggtgtgtgtgctgcagtggctgaaccgccgtgcgtctcctgctcgatagattgcatctcagtgtgtcctcccgcatcagacatggggcgaggggcctgcgtagctgtggggtggagatgccaggaaccctggacggtggccccagtgcactgagggtccactgtacaccgcacctgctgccccacttgtttgagttttgtgagcattttcttggtgtagtttgtatgtgtgtgtggggttgtcattctgggcatcggctgcagctttgctgaggtcttcagtgcctgtggtgattgttccccaccggcacacagtttagtgacacacttgccaagctgcaaaagcatcttctagaatgcctgataaaggaagaggctcagaccgtgcagtgtttggatcagcgggcgtgacattccgtgtagtccgtccccagatgcagaggactctgtgagcccactggtcagtgaagacgagcgtgtgcagtgcaaattcacgagttctgaagggatcaaaacaccacccccagcctgctagttataaaacagactcgggtgagatttgaaagatcaaactttgatttttatatggaaggaagatgagttagtgaaggaggcgtcacagagggccctgcccaccttccccgtggctgtgcctggggttgctgtttgggggtttgcctttccagggtgtcttgcgggactggtgtttgctgagacccgaggtggccccttcctcagggaggccggtgggatgcgttgttttcttccttcagcaggagctagtgtggcacttctggaactttccgacgtttttaccaaacttgatctttgcttccagggatgcccgctgtctgtagccccggcatggtgcccgtggccctgcccccggccgccgtgaacgcccagccccgctgtagcgaggaggacctgaaagccatccaggacatgttccccaacatggaccaggaggtgatccgctccgtgctggaagcccagcgagggaacaaggatgccgccatcaactccctgctgcagatgggggaggagccatagagcctctgcctcgatgccgttttgcccccgctctttggacacgccgacccggcgctccccaaggaatgctgtcccaacaagattcccgtgaaagagcacccgtgtcgccccctcccgtggacttctgtgccgccccgtccacacctgttcttgggtgcatgtgggttttcggttcctggcggtccaggacggggcgggggctcccctcccatctcgtgctgggaggtctcagcgcgctctcctgtccctgggacgtgcgtctctccttctcatgccgttctggaaaatgctcttgctgtagagagcagctgcttctgccagggtgttggaggtggtggagcgccttccgattccattcatggcattttgtgatgtgatgtaattggaatagagctgttgatttaaggcacacacaatccctcacactgtgggttttttttagaacttcccagacgaaaactcacgcccttgccctaacgcgctttgctgtgagcctggcccctgcccagggcttgggtctggtgagctgagcagcttcctgtggatggtgtggggccggcctctggcctggctcacctggccactgtccagccagccttgtgacagactccggcctgaaggcagaatgaacccacacctggagtgaggaagggggcctggcacggttggccaggctctgcctgattgccagccagcgggcatctgaagccgggtccttcgcccgccggaggctgccgtccgtctctcctgctgcgctcgtgccagctccgtgggtgtcctcccagggagcttctcttctcaacaggccttgcgaggctggggtgagaggtgatagaggcagcactgtgcatgattccgagagggtgtggtggcactgccagccgactgctgacagcttgggagctgctgtgcccaggacgtgggttcagcgtgggcgaggaaagcctggcgagcgtggccctgtaaaagctttctgaggcgggaggcgctcacttacctctgactgcctgggcgctgcgtgtagcatcttggcctacaggacagattttaggtgacacctggttatgacagtcagaaatttgagaagcttctcacaagtgatgcactttaaataatctgcatgccattgagacacctgcatgtctggtgtttgtggttcaagtgtcttgccgccggccttcggatgtaaacccactgataacggacagaaagagaatgcccacaagtgggtcttctgtggaagatgcagaaggaggaagttagtgcttacattttagtctttttctccctcaaaaaaataggttaagtttcagtgccagctagaaaatactgctttctgccatcgattgggggtggtttttgtcaaatatactgttgataaatatttatttttgtaaacttgaagtgtgtggtggccgtgggggagggacatgctggcagcaggcgccttcttcagctgtgggtcctaaaggcctttgatcctttgaagaagaaagacatggtatttgttcagcagacgccgaccactcagacggaggggcccctgggattccctgtctcagatggcctggtcttacgcctgtgtagatttcttctccattgggaatgaaggtgtcaggcgggactggaacgttctagatggtatgttccgtgatattaacaactctaacccaggacagaccacaagccacactcagaggcctcactgtgctgggggcttcggtgtccaggcgcccaggtgtggccaccagcaccggtttctgccttcgcgttgctggggtgcagtgagactgccacacgcgtgcacatgtggctctgtgggtgtctcctagagaggacgtggcccctgctgccagcccttgagcagcccgtgtgggggcccgagggacccacacagtgggggccagcctcgctggagggagagcaaccctttgccgatgaccacgcttgccgccatctcttagttttctttttcacaagcgctttatttttttaatagacaaatcacattttgcaaggcctttaattaaataagattcttctttccttcattttatgctttatttcctgtttgaaggcttactgtagaagtggcttactgtagaagcagcttgctgagcccctccgagcggtccccagaattagctggttcacaacccccaccctcccccgcccccgcctgtgtcaggtgtggatgaggtcgtcacactcagaaggacaggcttgtctgccagctcacaaggggaggctgcagtgggtttgggagctgggtttaggcccctggtgtctgagggcccaggccttgccagcctctgctgctcctgctcctgggtttgaagatgcaggccgatcgccagctccgtggcagcggtcactaaggacagcctgactgtgccatcttggagcctcaggcggggctccggagatagaagacaggtcgccggaggctccccctcctctcctctcccctctgcagatgctccctgggcgctaccctgcagggtgccaggcaggagtggtctcagaacgtgcgcttctgattattttactggggtccattgtccagatttttctttgattgtaaaatatatttttactttttagtcttctaatttaataaatgatccatataaaaatagagaaataaagtcctttaagggaaggtttaccatgtttgttcccgagtattttttaacttaattcacaatacgcaggagtaacgaatcagtcagaatcagagttcactcgtcaacagactgggagcaggaaccttacaccttcagaccaagcctggcctttgcttcccagattgaattagaggagggaagtcccaggtgctcctccctcaacagtggcagtgggcgtgggtctgctcttccagcccaggcaccctctccccactgggtggttctgtggtgccttttcatttccaggccatttccatctgggagtgagcgtggaacacgaccccgttctgagagagcccactgggaccgtggcacccccatctcaggagtctgagcccctagtgatgactggctcatgcttagggagcaaagcgcccataaatgtgagcagcactctagagaccccgagccaccctggcacccgggcacggacgcgttgctggagcgtccatggacacggtggggtgtctgccccctctctgctgcccaacccccgaggcatgcccgccggttcctgcactccagcctgggtgacagagcaagactccgtctcaaaaagattttttgttgttgttaaagaggaaaacagagcgtaaaagttcagaaaatttgcagcccaatgatgcagtagaaaagaaaaacccattttttgaggagaaatttaagctgactgcagaaatttccttaagtagcaaggagcctaatgttaatccccaagaccatggggaaaatatctccaggccatgtcagagaccttcacggcaccccctcccatcagaaacctggaggcccaggaggaaaaaattgttttgtgggctgagcccaggatccctgttctgtgtgcaacctagggacttggtgccctgcatcccagcctctccaactgtggctgaaaggggcccaacgtggagttcaggctgtggcttcagagggtagaagctccaagccttagcaacttccatgtggtgttgagtctgtgggtgcacagaagtcaagaactgaggttttggaacctccgcctcaatttcagaacatttacggaaacacctgaatgtccaggcagaagcttgctgcaggggcggggccctcatggacaacctctgctagggcagtgcagaaaggaaatgtggggttggagcccccacacagagtccctactgggccaccgcctagtggagctgtgaaaagagggccactgtcttccagaccccagaaaggtagatccaccaacagcttgtaccatgtgcctggaaaagccacagacactcaacaccagcccatgaaagcagccaggagggaggctgtatcctccaaagccacaggggaggagctgcccaagaccatgagaacccacctcttgcatcagcgtgaactggacatgacacctggagtcaaaagagatcattttggagctttaaaatttgacagccccgctggattttggacttgcatgggccctgtagcccctttgttttggccaatttctcccatttggaacagctatatttacccaatacatgtaccctcattgtatctaggaagtaactaacttgcttttgattttacaggttcataggcagaagggacttgcctcgtctcagatgagatgttgaactgcagacttttgggttaatgctgaaatgaattaagacttttggggatggttaggaaggcatgattggttttgaaatgtgaggacatgagatttggaggtatcagggcagaatgatatggtttggctgtgtccccacccaaatctcaccttgaattgtatcttccagaattcc

SEQ ID NO: 8522 - protein, 83 aa, Homo sapiens
MTGSCLGSKAPINVSSTLETPSHPGTRARTRCWSVHGHGGVSAPSLLPNPRGMPAGSCTPAWVTEQDSVSKRFFVVVKEENRA

SEQ ID NO: 8523 - DNA, 574 bp, Homo sapiens
ccaagcctggcctttgcttcccagattgaattagaggagggaagtcccaggtgctcctccctcaacagtggcagtgggcgtgggtctgctcttccagcccaggcaccctctccccactgggtggttctgtggtgccttttcatttccaggccatttccatctgggagtgagcgtggaacacgaccccgttctgagagagcccactgggaccgtggcacccccatctcaggagtctgagcccctagtgatgactggctcatgcttagggagcaaagcgcccataaatgtgagcagcactctagagaccccgagccaccctggcacccgggcacggacgcgttgctggagcgtccatggacacggtggggtgtctgccccctctctgctgcccaacccccgaggcatgagaatcgcttgaagccaggaggcggaggttgcagcaagccaagatcgtgccattgcactccggccagggtgacagtgcgaaactccatctcaacaaaaaaaaagatatcaggactatcaacactgttgtctacagactgttgtctacagtaagacaataaatagtcca

SEQ ID NO: 8524 - protein, 99 aa, Homo sapiens
MLREQSAHKCEQHSRDPEPPWHPGTDALLERPWTRWGVCPLSAAQPPRHENRLKPGGGGCSKPRSCHCTPARVTVRNSISTKKKISGLSTLLSTDCCLQ

SEQ ID NO: 8525 - DNA, 1744 bp, Homo sapiens
gagctgttgatttaaggcacacacaatccctcacactgtgggttttttttagaacttcccagacgaaaactcacgcccttgccctaacgcgctttgctgtgagcctggcccctgcccagggcttgggtctggtgagctgagcagcttcctgtggatggtgtggggccggcctctggcctggctcacctggccactgtccagccagccttgtgacagactccggcctgaaggcagaatgaacccacacctggagtgaggaagggggcctggcacggttggccaggctctgcctgattgccagccagcgggcatctgaagccgggtccttcgcccgccggaggctgccgtccgtctctcctgctgcgctcgtgccagctccgtgggtgtcctcccagggagcttctcttctcaacaggccttgcgaggctggggtgagaggtgatagaggcagcactgtgcatgattccgagagggtgtggtggcactgccagccgactgctgacagcttgggagctgctgtgcccaggacgtgggttcagcgtgggcgaggaaagcctggcgagcgtggccctgtaaaagctttctgaggcgggaggcgctcacttacctctgactgcctgggcgctgcgtgtagcatcttggcctacaggacagattttaggtgacacctggttatgacagtcagaaatttgagaagcttctcacaagtgatgcactttaaataatctgcatgccattgagacacctgcatgtctggtgtttgtggttcaagtgtcttgccgccggccttcggatgtaaacccactgataacggacagaaagagaatgcccacaagtgggtcttctgtggaagatgcagaaggaggaagttagtgcttacattttagtctttttctccctcaaaaaaataggttaagtttcagtgccagcccttgagcagcccgtgtgggggcccgagggacccacacagtgggggccagcctcgctggagggagagcaaccctttgccgatgaccacgcttgccgccatctcttagttttctttttcacaagcgctttatttttttaatagacaaatcacattttgcaaggcctttaattaaataagattcttctttccttcattttatgctttatttcctgtttgaaggcttactgtagaagtggcttactgtagaagcagcttgctgagcccctccgagcggtccccagaattagctggttcacaacccccaccctcccccgcccccgcctgtgtcaggtgtggatgaggtcgtcacactcagaaggacaggcttgtctgccagctcacaaggggaggctgcagtgggtttgggagctgggtttaggcccctggtgtctgagggcccaggccttgccagcctctgctgctcctgctcctgggtttgaagatgcaggccgatcgccagctccgtggcagcggtcactaaggacagcctgactgtgccatcttggagcctcaggcggggctccggagatagaagacaggtcgccggaggctccccctcctctcctctcccctctgcagatgctccctgggcgctaccctgcagggtgccaggcaggagtggtctcagaacgtgcgcttctgattattttactggggtccattgtccagatttttctttgattgtaaaatatatttttactttttagtcttctaatttaataaatgatccatataaaaatagagaaataaagtcctttaagggaaggtttacca

SEQ ID NO: 8526 - protein, 64 aa, Homo sapiens
MRSSHSEGQACLPAHKGRLQWVWELGLGPWCLRAQALPASAAPAPGFEDAGRSPAPWQRSLRTA

SEQ ID NO: 8527 - DNA, 3170 bp, Homo sapiens
cgggcgtgacattccgtgtagtccgtccccagatgcagaggactctgtgagcccactggtcagtgaagacgagcgtgtgcagtgcaaattcacgagttctgaagggatcaaaacaccacccccagcctgctagttataaaacagactcgggtgagatttgaaagatcaaactttgatttttatatggaaggaagatgagttagtgaaggaggcgtcacagagggccctgcccaccttccccgtggctgtgcctggggttgctgtttgggggtttgcctttccagggtgtcttgcgggactggtgtttgctgagacccgaggtggccccttcctcagggaggccggtgggatgcgttgttttcttccttcagcaggagctagtgtggcacttctggaactttccgacgtttttaccaaacttgatctttgcttccagggatgcccgctgtctgtagccccggcatggtgcccgtggccctgcccccggccgccgtgaacgcccagccccgctgtagcgaggaggacctgaaagccatccaggacatgttccccaacatggaccaggaggtgatccgctccgtgctggaagcccagcgagggaacaaggatgccgccatcaactccctgctgcagatgggggaggagccatagagcctctgcctcgatgccgttttgcccccgctctttggacacgccgacccggcgctccccaaggaatgctgtcccaacaagattcccgtgaaagagcacccgttgcgtctctccttctcatgccgttctggaaaatgctcttgctgtagagagcagctgcttctgccagggtgttggaggtggtggagcgccttccgattccattcatggcattttgtgatgtgatgtaattggaatagagctgttgatttaaggcacacacaatccctcacactgtgggttttttttagaacttcccagacgaaaactcacgcccttgccctaacgcgctttgctgtgagcctggcccctgcccagggcttgggtctggtgagctgagcagcttcctgtggatggtgtggggccggcctctggcctggctcacctggccactgtccagccagccttgtgacagactccggcctgaaggcagaatgaacccacacctggagtgaggaagggggcctggcacggttggccaggctctgcctgattgccagccagcgggcatctgaagccgggtccttcgcccgccggaggctgccgtccgtctctcctgctgcgctcgtgccagctccgtgggtgtcctcccagggagcttctcttctcaacaggccttgcgaggctggggtgagaggtgatagaggcagcactgtgcatgattccgagagggtgtggtggcactgccagccgactgctgacagcttgggagctgctgtgcccaggacgtgggttcagcgtgggcgaggaaagcctggcgagcgtggccctgtaaaagctttctgaggcgggaggcgctcacttacctctgactgcctgggcgctgcgtgtagcatcttggcctacaggacagattttaggtgacacctggttatgacagtcagaaatttgagaagcttctcacaagtgatgcactttaaataatctgcatgccattgagacacctgcatgtctggtgtttgtggttcaagtgtcttgccgccggccttcggatgtaaacccactgataacggacagaaagagaatgcccacaagtgggtcttctgtggaagatgcagaaggaggaagttagtgcttacattttagtctttttctccctcaaaaaaataggttaagtttcagtgccagctagaaaatactgctttctgccatcgattgggggtggtttttgtcaaatatactgttgataaatatttatttttgtaaacttgaagtgtgtggtggccgtgggggagggacatgctggcagcaggcgccttcttcagctgtgggtcctaaaggcctttgatcctttgaagaagaaagacatggtatttgttcagcagacgccgaccactcagacggaggggcccctgggattccctgtctcagatggcctggtcttacgcctgtgtagatttcttctccattgggaatgaaggtgtcaggcgggactggaacgttctagatggtatgttccgtgatattaacaactctaacccaggacagaccacaagccacactcagaggcctcactgtgctgggggcttcggtgtccaggcgcccaggtgtggccaccagcaccggtttctgccttcgcgttgctggggtgcagtgagactgccacacgcgtgcacatgtggctctgtgggtgtctcctagagaggacgtggcccctgctgccagcccttgagcagcccgtgtgggggcccgagggacccacacagtgggggccagcctcgctggagggagagcaaccctttgccgatgaccacgcttgccgccatctcttagttttctttttcacaagcgctttatttttttaatagacaaatcacattttgcaaggcctttaattaaataagattcttctttccttcattttatgctttatttcctgtttgaaggcttactgtagaagtggcttactgtagaagcagcttgctgagcccctccgagcggtccccagaattagctggttcacaacccccaccctcccccgcccccgcctgtgtcaggtgtggatgaggtcgtcacactcagaaggacaggcttgtctgccagctcacaaggggaggctgcagtgggtttgggagctgggtttaggcccctggtgtctgagggcccaggccttgccagcctctgctgctcctgctcctgggtttgaagatgcaggccgatcgccagctccgtggcagcggtcactaaggacagcctgactgtgccatcttggagcctcaggcggggctccggagatagaagacaggtcgccggaggctccccctcctctcctctcccctctgcagatgctccctgggcgctaccctgcagggtgccaggcaggagtggtctcagaacgtgcgcttctgattattttactggggtccattgtccagatttttctttgattgtaaaatatatttttactttttagtcttctaatttaataaatgatccatataaaaatagagaaataaagtcctttaagggaaggtttacca

SEQ ID NO: 8528 - protein, 89 aa, Homo sapiens
MAWSYACVDFFSIGNEGVRRDWNVLDGMFRDINNSNPGQTTSHTQRPHCAGGFGVQAPRCGHQHRFLPSRCWGAVRLPHACTCGSVGVS

SEQ ID NO: 8529 - DNA, 3065 bp, Homo sapiens
cgggcgtgacattccgtgtagtccgtccccagatgcagaggactctgtgagcccactggtcagtgaagacgagcgtgtgcagtgcaaattcacgagttctgaagggatcaaaacaccacccccagcctgctagttataaaacagactcgggtgagatttgaaagatcaaactttgatttttatatggaaggaagatgagttagtgaaggaggcgtcacagagggccctgcccaccttccccgtggctgtgcctggggttgctgtttgggggtttgcctttccagggtgtcttgcgggactggtgtttgctgagacccgaggtggccccttcctcagggaggccggtgggatgcgttgttttcttccttcagcaggagctagtgtggcacttctggaactttccgacgtttttaccaaacttgatctttgcttccagggatgcccgctgtctgtagccccggcatggtgcccgtggccctgcccccggccgccgtgaacgcccagccccgctgtagcgaggaggacctgaaagccatccaggacatgttccccaacatggaccaggaggtgatccgctccgtgctggaagcccagcgagggaacaaggatgccgccatcaactccctgctgcagatgggggaggagccatagagcctctgcttctcatgccgttctggaaaatgctcttgctgtagagagcagctgcttctgccagggtgttggaggtggtggagcgccttccgattccattcatggcattttgtgatgtgatgtaattggaatagagctgttgatttaaggcacacacaatccctcacactgtgggttttttttagaacttcccagacgaaaactcacgcccttgccctaacgcgctttgctgtgagcctggcccctgcccagggcttgggtctggtgagctgagcagcttcctgtggatggtgtggggccggcctctggcctggctcacctggccactgtccagccagccttgtgacagactccggcctgaaggcagaatgaacccacacctggagtgaggaagggggcctggcacggttggccaggctctgcctgattgccagccagcgggcatctgaagccgggtccttcgcccgccggaggctgccgtccgtctctcctgctgcgctcgtgccagctccgtgggtgtcctcccagggagcttctcttctcaacaggccttgcgaggctggggtgagaggtgatagaggcagcactgtgcatgattccgagagggtgtggtggcactgccagccgactgctgacagcttgggagctgctgtgcccaggacgtgggttcagcgtgggcgaggaaagcctggcgagcgtggccctgtaaaagctttctgaggcgggaggcgctcacttacctctgactgcctgggcgctgcgtgtagcatcttggcctacaggacagattttaggtgacacctggttatgacagtcagaaatttgagaagcttctcacaagtgatgcactttaaataatctgcatgccattgagacacctgcatgtctggtgtttgtggttcaagtgtcttgccgccggccttcggatgtaaacccactgataacggacagaaagagaatgcccacaagtgggtcttctgtggaagatgcagaaggaggaagttagtgcttacattttagtctttttctccctcaaaaaaataggttaagtttcagtgccagctagaaaatactgctttctgccatcgattgggggtggtttttgtcaaatatactgttgataaatatttatttttgtaaacttgaagtgtgtggtggccgtgggggagggacatgctggcagcaggcgccttcttcagctgtgggtcctaaaggcctttgatcctttgaagaagaaagacatggtatttgttcagcagacgccgaccactcagacggaggggcccctgggattccctgtctcagatggcctggtcttacgcctgtgtagatttcttctccattgggaatgaaggtgtcaggcgggactggaacgttctagatggtatgttccgtgatattaacaactctaacccaggacagaccacaagccacactcagaggcctcactgtgctgggggcttcggtgtccaggcgcccaggtgtggccaccagcaccggtttctgccttcgcgttgctggggtgcagtgagactgccacacgcgtgcacatgtggctctgtgggtgtctcctagagaggacgtggcccctgctgccagcccttgagcagcccgtgtgggggcccgagggacccacacagtgggggccagcctcgctggagggagagcaaccctttgccgatgaccacgcttgccgccatctcttagttttctttttcacaagcgctttatttttttaatagacaaatcacattttgcaaggcctttaattaaataagattcttctttccttcattttatgctttatttcctgtttgaaggcttactgtagaagtggcttactgtagaagcagcttgctgagcccctccgagcggtccccagaattagctggttcacaacccccaccctcccccgcccccgcctgtgtcaggtgtggatgaggtcgtcacactcagaaggacaggcttgtctgccagctcacaaggggaggctgcagtgggtttgggagctgggtttaggcccctggtgtctgagggcccaggccttgccagcctctgctgctcctgctcctgggtttgaagatgcaggccgatcgccagctccgtggcagcggtcactaaggacagcctgactgtgccatcttggagcctcaggcggggctccggagatagaagacaggtcgccggaggctccccctcctctcctctcccctctgcagatgctccctgggcgctaccctgcagggtgccaggcaggagtggtctcagaacgtgcgcttctgattattttactggggtccattgtccagatttttctttgattgtaaaatatatttttactttttagtcttctaatttaataaatgatccatataaaaatagagaaataaagtcctttaagggaaggtttacca

SEQ ID NO: 8530 - protein, 52 aa, Homo sapiens
MPPSTPCCRWGRSHRASASHAVLENALAVESSCFCQGVGGGGAPSDSIHGIL

SEQ ID NO: 8531 - DNA, 3052 bp, Homo sapiens
ggggcgtccctggcacagtacggccatctagatgaagctgacactgacgcgttggggctgtaccctgcttggagcccgtctgagtccgcagcatccaggccggggtcactggccctccatggccttgcctcccttggcctggaggggtccccatcttgctcctaggggatgcccgctgtctgtagccccggcatggtgcccgtggccctgcccccggccgccgtgaacgcccagccccgctgtagcgaggaggacctgaaagccatccaggacatgttccccaacatggaccaggaggtgatccgctccgtgctggaagcccagcgagggaacaaggatgccgccatcaactccctgctgcagatgggggaggagccatagagcctctgcctcgatgccgttttgcccccgctctttggacacgccgacccggcgctccccaaggaatgctgtcccaacaagattcccgtgaaagagcacccgtgtcgccccctcccgtggacttctgtgccgccccgtccacacctgttcttgggtgcatgtgggttttcggttcctggcggtccaggacggggcgggggctcccctcccatctcgtgctgggaggtctcagcgcgctctcctgtccctgggacgtgcgtctctccttctcatgccgttctggaaaatgctcttgctgtagagagcagctgcttctgccagggtgttggaggtggtggagcgccttccgattccattcatggcattttgtgatgtgatgtaattggaatagagctgttgatttaaggcacacacaatccctcacactgtgggttttttttagaacttcccagacgaaaactcacgcccttgccctaacgcgctttgctgtgagcctggcccctgcccagggcttgggtctggtgagctgagcagcttcctgtggatggtgtggggccggcctctggcctggctcacctggccactgtccagccagccttgtgacagactccggcctgaaggcagaatgaacccacacctggagtgaggaagggggcctggcacggttggccaggctctgcctgattgccagccagcgggcatctgaagccgggtccttcgcccgccggaggctgccgtccgtctctcctgctgcgctcgtgccagctccgtgggtgtcctcccagggagcttctcttctcaacaggccttgcgaggctggggtgagaggtgatagaggcagcactgtgcatgattccgagagggtgtggtggcactgccagccgactgctgacagcttgggagctgctgtgcccaggacgtgggttcagcgtgggcgaggaaagcctggcgagcgtggccctgtaaaagctttctgaggcgggaggcgctcacttacctctgactgcctgggcgctgcgtgtagcatcttggcctacaggacagattttaggtgacacctggttatgacagtcagaaatttgagaagcttctcacaagtgatgcactttaaataatctgcatgccattgagacacctgcatgtctggtgtttgtggttcaagtgtcttgccgccggccttcggatgtaaacccactgataacggacagaaagagaatgcccacaagtgggtcttctgtggaagatgcagaaggaggaagttagtgcttacattttagtctttttctccctcaaaaaaataggttaagtttcagtgccagctagaaaatactgctttctgccatcgattgggggtggtttttgtcaaatatactgttgataaatatttatttttgtaaacttgaagtgtgtggtggccgtgggggagggacatgctggcagcaggcgccttcttcagctgtgggtcctaaaggcctttgatcctttgaagaagaaagacatggtatttgttcagcagacgccgaccactcagacggaggggcccctgggattccctgtctcagatggcctggtcttacgcctgtgtagatttcttctccattgggaatgaaggtgtcaggcgggactggaacgttctagatggtatgttccgtgatattaacaactctaacccaggacagaccacaagccacactcagaggcctcactgtgctgggggcttcggtgtccaggcgcccaggtgtggccaccagcaccggtttctgccttcgcgttgctggggtgcagtgagactgccacacgcgtgcacatgtggctctgtgggtgtctcctagagaggacgtggcccctgctgccagcccttgagcagcccgtgtgggggcccgagggacccacacagtgggggccagcctcgctggagggagagcaaccctttgccgatgaccacgcttgccgccatctcttagttttctttttcacaagcgctttatttttttaatagacaaatcacattttgcaaggcctttaattaaataagattcttctttccttcattttatgctttatttcctgtttgaaggcttactgtagaagtggcttactgtagaagcagcttgctgagcccctccgagcggtccccagaattagctggttcacaacccccaccctcccccgcccccgcctgtgtcaggtgtggatgaggtcgtcacactcagaaggacaggcttgtctgccagctcacaaggggaggctgcagtgggtttgggagctgggtttaggcccctggtgtctgagggcccaggccttgccagcctctgctgctcctgctcctgggtttgaagatgcaggccgatcgccagctccgtggcagcggtcactaaggacagcctgactgtgccatcttggagcctcaggcggggctccggagatagaagacaggtcgccggaggctccccctcctctcctctcccctctgcagatgctccctgggcgctaccctgcagggtgccaggcaggagtggtctcagaacgtgcgcttctgattattttactggggtccattgtccagatttttctttgattgtaaaatatatttttactttttagtcttctaatttaataaatgatccatataaaaatagagaaataaagtcctttaagggaaggtttacca

SEQ ID NO: 8532 - protein, 64 aa, Homo sapiens
MKLTLTRWGCTLLGARLSPQHPGRGHWPSMALPPLAWRGPHLAPRGCPLSVAPAWCPWPCPRPP

SEQ ID NO: 8533 - DNA, 3623 bp, Homo sapiens
acttatttgctcaagggttgtttattgaacatgccagtgccaggagactggcgtggagcatgaggccgaggctggctggagtgggttttggggagtgtcaggaggctggtgtggagcgtgaggccgaggctggctggagtgccaggggctgcagggtcaggtgtacatcggtgagctcccgcaggacttcctccgcatcacgcccacacagcagcagcggcaggtccagctggacgcccaggcggcccagcagctgcagtacggaggcgcagtgggcaccgtgggccgactgaacatcacggtggtacaggcaaagttggccaagaattacggcatgacccgcatggacccctactgccgactgcgcctgggctacgcggtgtacgagacgcccacggcacacaatggcgccaagaatccccgctggaataaggtcatccactgcacggtgcccccaggcgtggactctttctatctcgagatcttcgatgagagagccttctccatggacgaccgcattgcctggacccacatcaccatcccggagtccctgaggcagggcaaggtggaggacaagtggtacagcctgagcgggaggcagggggacgacaaggagggcatgatcaacctcgtcatgtcctacgcgctgcttccagctgccatggtgatgccaccccagcccgtggtcctgatgccaacagtgtaccagcagggcgttggctatgtgcccatcacagggatgcccgctgtctgtagccccggcatggtgcccgtggccctgcccccggccgccgtgaacgcccagccccgctgtagcgaggaggacctgaaagccatccaggacatgttccccaacatggaccaggaggtgatccgctccgtgctggaagcccagcgagggaacaaggatgccgccatcaactccctgctgcagatgggggaggagccatagagcctctgcctcgatgccgttttgcccccgctctttggacacgccgacccggcgctccccaaggaatgctgtcccaacaagattcccgtgaaagagcacccgtgtcgccccctcccgtggacttctgtgccgccccgtccacacctgttcttgggtgcatgtgggttttcggttcctggcggtccaggacggggcgggggctcccctcccatctcgtgctgggaggtctcagcgcgctctcctgtccctgggacgtgcgtctctccttctcatgccgttctggaaaatgctcttgctgtagagagcagctgcttctgccagggtgttggaggtggtggagcgccttccgattccattcatggcattttgtgatgtgatgtaattggaatagagctgttgatttaaggcacacacaatccctcacactgtgggttttttttagaacttcccagacgaaaactcacgcccttgccctaacgcgctttgctgtgagcctggcccctgcccagggcttgggtctggtgagctgagcagcttcctgtggatggtgtggggccggcctctggcctggctcacctggccactgtccagccagccttgtgacagactccggcctgaaggcagaatgaacccacacctggagtgaggaagggggcctggcacggttggccaggctctgcctgattgccagccagcgggcatctgaagccgggtccttcgcccgccggaggctgccgtccgtctctcctgctgcgctcgtgccagctccgtgggtgtcctcccagggagcttctcttctcaacaggccttgcgaggctggggtgagaggtgatagaggcagcactgtgcatgattccgagagggtgtggtggcactgccagccgactgctgacagcttgggagctgctgtgcccaggacgtgggttcagcgtgggcgaggaaagcctggcgagcgtggccctgtaaaagctttctgaggcgggaggcgctcacttacctctgactgcctgggcgctgcgtgtagcatcttggcctacaggacagattttaggtgacacctggttatgacagtcagaaatttgagaagcttctcacaagtgatgcactttaaataatctgcatgccattgagacacctgcatgtctggtgtttgtggttcaagtgtcttgccgccggccttcggatgtaaacccactgataacggacagaaagagaatgcccacaagtgggtcttctgtggaagatgcagaaggaggaagttagtgcttacattttagtctttttctccctcaaaaaaataggttaagtttcagtgccagctagaaaatactgctttctgccatcgattgggggtggtttttgtcaaatatactgttgataaatatttatttttgtaaacttgaagtgtgtggtggccgtgggggagggacatgctggcagcaggcgccttcttcagctgtgggtcctaaaggcctttgatcctttgaagaagaaagacatggtatttgttcagcagacgccgaccactcagacggaggggcccctgggattccctgtctcagatggcctggtcttacgcctgtgtagatttcttctccattgggaatgaaggtgtcaggcgggactggaacgttctagatggtatgttccgtgatattaacaactctaacccaggacagaccacaagccacactcagaggcctcactgtgctgggggcttcggtgtccaggcgcccaggtgtggccaccagcaccggtttctgccttcgcgttgctggggtgcagtgagactgccacacgcgtgcacatgtggctctgtgggtgtctcctagagaggacgtggcccctgctgccagcccttgagcagcccgtgtgggggcccgagggacccacacagtgggggccagcctcgctggagggagagcaaccctttgccgatgaccacgcttgccgccatctcttagttttctttttcacaagcgctttatttttttaatagacaaatcacattttgcaaggcctttaattaaataagattcttctttccttcattttatgctttatttcctgtttgaaggcttactgtagaagtggcttactgtagaagcagcttgctgagcccctccgagcggtccccagaattagctggttcacaacccccaccctcccccgcccccgcctgtgtcaggtgtggatgaggtcgtcacactcagaaggacaggcttgtctgccagctcacaaggggaggctgcagtgggtttgggagctgggtttaggcccctggtgtctgagggcccaggccttgccagcctctgctgctcctgctcctgggtttgaagatgcaggccgatcgccagctccgtggcagcggtcactaaggacagcctgactgtgccatcttggagcctcaggcggggctccggagatagaagacaggtcgccggaggctccccctcctctcctctcccctctgcagatgctccctgggcgctaccctgcagggtgccaggcaggagtggtctcagaacgtgcgcttctgattattttactggggtccattgtccagatttttctttgattgtaaaatatatttttactttttagtcttctaatttaataaatgatccatataaaaatagagaaataaagtcctttaagggaaggtttacca

SEQ ID NO: 8534 - protein, 205 aa, Homo sapiens
MTRMDPYCRLRLGYAVYETPTAHNGAKNPRWNKVIHCTVPPGVDSFYLEIFDERAFSMDDRIAWTHITIPESLRQGKVEDKWYSLSGRQGDDKEGMINLVMSYALLPAAMVMPPQPVVLMPTVYQQGVGYVPITGMPAVCSPGMVPVALPPAAVNAQPRCSEEDLKAIQDMFPNMDQEVIRSVLEAQRGNKDAAINSLLQMGEEP

SEQ ID NO: 8535 - DNA, 3471 bp, Homo sapiens
agctgactgtggcggcggcggcctcgaggtgacaactgtctccgtcgcaggctccggcgggggcgcaggaggtcgcccggcgcgtcactgtcgggtcggcgagccacgggggccgccgcagcaccatggcgaccaccgtcagcactcagcgcgggccggcaaagttggccaagaattacggcatgacccgcatggacccctactgccgactgcgcctgggctacgcggtgtacgagacgcccacggcacacaatggcgccaagaatccccgctggaataaggtcatccactgcacggtgcccccaggcgtggactctttctatctcgagatcttcgatgagagagccttctccatggacgaccgcattgcctggacccacatcaccatcccggagtccctgaggcagggcaaggtggaggacaagtggtacagcctgagcgggaggcagggggacgacaaggagggcatgatcaacctcgtcatgtcctacgcgctgcttccagctgccatggtgatgccaccccagcccgtggtcctgatgccaacagtgtaccagcagggcgttggctatgtgcccatcacagggatgcccgctgtctgtagccccggcatggtgcccgtggccctgcccccggccgccgtgaacgcccagccccgctgtagcgaggaggacctgaaagccatccaggacatgttccccaacatggaccaggaggtgatccgctccgtgctggaagcccagcgagggaacaaggatgccgccatcaactccctgctgcagatgggggaggagccatagagcctctgcctcgatgccgttttgcccccgctctttggacacgccgacccggcgctccccaaggaatgctgtcccaacaagattcccgtgaaagagcacccgtgtcgccccctcccgtggacttctgtgccgccccgtccacacctgttcttgggtgcatgtgggttttcggttcctggcggtccaggacggggcgggggctcccctcccatctcgtgctgggaggtctcagcgcgctctcctgtccctgggacgtgcgtctctccttctcatgccgttctggaaaatgctcttgctgtagagagcagctgcttctgccagggtgttggaggtggtggagcgccttccgattccattcatggcattttgtgatgtgatgtaattggaatagagctgttgatttaaggcacacacaatccctcacactgtgggttttttttagaacttcccagacgaaaactcacgcccttgccctaacgcgctttgctgtgagcctggcccctgcccagggcttgggtctggtgagctgagcagcttcctgtggatggtgtggggccggcctctggcctggctcacctggccactgtccagccagccttgtgacagactccggcctgaaggcagaatgaacccacacctggagtgaggaagggggcctggcacggttggccaggctctgcctgattgccagccagcgggcatctgaagccgggtccttcgcccgccggaggctgccgtccgtctctcctgctgcgctcgtgccagctccgtgggtgtcctcccagggagcttctcttctcaacaggccttgcgaggctggggtgagaggtgatagaggcagcactgtgcatgattccgagagggtgtggtggcactgccagccgactgctgacagcttgggagctgctgtgcccaggacgtgggttcagcgtgggcgaggaaagcctggcgagcgtggccctgtaaaagctttctgaggcgggaggcgctcacttacctctgactgcctgggcgctgcgtgtagcatcttggcctacaggacagattttaggtgacacctggttatgacagtcagaaatttgagaagcttctcacaagtgatgcactttaaataatctgcatgccattgagacacctgcatgtctggtgtttgtggttcaagtgtcttgccgccggccttcggatgtaaacccactgataacggacagaaagagaatgcccacaagtgggtcttctgtggaagatgcagaaggaggaagttagtgcttacattttagtctttttctccctcaaaaaaataggttaagtttcagtgccagctagaaaatactgctttctgccatcgattgggggtggtttttgtcaaatatactgttgataaatatttatttttgtaaacttgaagtgtgtggtggccgtgggggagggacatgctggcagcaggcgccttcttcagctgtgggtcctaaaggcctttgatcctttgaagaagaaagacatggtatttgttcagcagacgccgaccactcagacggaggggcccctgggattccctgtctcagatggcctggtcttacgcctgtgtagatttcttctccattgggaatgaaggtgtcaggcgggactggaacgttctagatggtatgttccgtgatattaacaactctaacccaggacagaccacaagccacactcagaggcctcactgtgctgggggcttcggtgtccaggcgcccaggtgtggccaccagcaccggtttctgccttcgcgttgctggggtgcagtgagactgccacacgcgtgcacatgtggctctgtgggtgtctcctagagaggacgtggcccctgctgccagcccttgagcagcccgtgtgggggcccgagggacccacacagtgggggccagcctcgctggagggagagcaaccctttgccgatgaccacgcttgccgccatctcttagttttctttttcacaagcgctttatttttttaatagacaaatcacattttgcaaggcctttaattaaataagattcttctttccttcattttatgctttatttcctgtttgaaggcttactgtagaagtggcttactgtagaagcagcttgctgagcccctccgagcggtccccagaattagctggttcacaacccccaccctcccccgcccccgcctgtgtcaggtgtggatgaggtcgtcacactcagaaggacaggcttgtctgccagctcacaaggggaggctgcagtgggtttgggagctgggtttaggcccctggtgtctgagggcccaggccttgccagcctctgctgctcctgctcctgggtttgaagatgcaggccgatcgccagctccgtggcagcggtcactaaggacagcctgactgtgccatcttggagcctcaggcggggctccggagatagaagacaggtcgccggaggctccccctcctctcctctcccctctgcagatgctccctgggcgctaccctgcagggtgccaggcaggagtggtctcagaacgtgcgcttctgattattttactggggtccattgtccagatttttctttgattgtaaaatatatttttactttttagtcttctaatttaataaatgatccatataaaaatagagaaataaagtcctttaagggaaggtttacca

SEQ ID NO: 8536 - protein, 224 aa, Homo sapiens
MATTVSTQRGPAKLAKNYGMTRMDPYCRLRLGYAVYETPTAHNGAKNPRWNKVIHCTVPPGVDSFYLEIFDERAFSMDDRIAWTHITIPESLRQGKVEDKWYSLSGRQGDDKEGMINLVMSYALLPAAMVMPPQPVVLMPTVYQQGVGYVPITGMPAVCSPGMVPVALPPAAVNAQPRCSEEDLKAIQDMFPNMDQEVIRSVLEAQRGNKDAAINSLLQMGEEP

SEQ ID NO: 8537 - DNA, 3468 bp, Homo sapiens
cggtgccgggggcggggcgcggcggctgtcagctgactgtggcggcggcggcctcgaggtgacaactgtctccgtcgcaggctccggcgggggcgcaggaggtcgcccggcgcgtcactgtcgggtcggcgagccacgggggccgccgcagcaccatggcgaccaccgtcagcactcagcgcgggccggtgtacatcggtgagctcccgcaggacttcctccgcatcacgcccacacagcagcagcggcaggtccagctggacgcccaggcggcccagcagctgcagtacggaggcgcagtgggcaccgtgggccgactgaacatcacggtggtacagagagccttctccatggacgaccgcattgcctggacccacatcaccatcccggagtccctgaggcagggcaaggtggaggacaagtggtacagcctgagcgggaggcagggggacgacaaggagggcatgatcaacctcgtcatgtcctacgcgctgcttccagctgccatggtgatgccaccccagcccgtggtcctgatgccaacagtgtaccagcagggcgttggctatgtgcccatcacagggatgcccgctgtctgtagccccggcatggtgcccgtggccctgcccccggccgccgtgaacgcccagccccgctgtagcgaggaggacctgaaagccatccaggacatgttccccaacatggaccaggaggtgatccgctccgtgctggaagcccagcgagggaacaaggatgccgccatcaactccctgctgcagatgggggaggagccatagagcctctgcctcgatgccgttttgcccccgctctttggacacgccgacccggcgctccccaaggaatgctgtcccaacaagattcccgtgaaagagcacccgtgtcgccccctcccgtggacttctgtgccgccccgtccacacctgttcttgggtgcatgtgggttttcggttcctggcggtccaggacggggcgggggctcccctcccatctcgtgctgggaggtctcagcgcgctctcctgtccctgggacgtgcgtctctccttctcatgccgttctggaaaatgctcttgctgtagagagcagctgcttctgccagggtgttggaggtggtggagcgccttccgattccattcatggcattttgtgatgtgatgtaattggaatagagctgttgatttaaggcacacacaatccctcacactgtgggttttttttagaacttcccagacgaaaactcacgcccttgccctaacgcgctttgctgtgagcctggcccctgcccagggcttgggtctggtgagctgagcagcttcctgtggatggtgtggggccggcctctggcctggctcacctggccactgtccagccagccttgtgacagactccggcctgaaggcagaatgaacccacacctggagtgaggaagggggcctggcacggttggccaggctctgcctgattgccagccagcgggcatctgaagccgggtccttcgcccgccggaggctgccgtccgtctctcctgctgcgctcgtgccagctccgtgggtgtcctcccagggagcttctcttctcaacaggccttgcgaggctggggtgagaggtgatagaggcagcactgtgcatgattccgagagggtgtggtggcactgccagccgactgctgacagcttgggagctgctgtgcccaggacgtgggttcagcgtgggcgaggaaagcctggcgagcgtggccctgtaaaagctttctgaggcgggaggcgctcacttacctctgactgcctgggcgctgcgtgtagcatcttggcctacaggacagattttaggtgacacctggttatgacagtcagaaatttgagaagcttctcacaagtgatgcactttaaataatctgcatgccattgagacacctgcatgtctggtgtttgtggttcaagtgtcttgccgccggccttcggatgtaaacccactgataacggacagaaagagaatgcccacaagtgggtcttctgtggaagatgcagaaggaggaagttagtgcttacattttagtctttttctccctcaaaaaaataggttaagtttcagtgccagctagaaaatactgctttctgccatcgattgggggtggtttttgtcaaatatactgttgataaatatttatttttgtaaacttgaagtgtgtggtggccgtgggggagggacatgctggcagcaggcgccttcttcagctgtgggtcctaaaggcctttgatcctttgaagaagaaagacatggtatttgttcagcagacgccgaccactcagacggaggggcccctgggattccctgtctcagatggcctggtcttacgcctgtgtagatttcttctccattgggaatgaaggtgtcaggcgggactggaacgttctagatggtatgttccgtgatattaacaactctaacccaggacagaccacaagccacactcagaggcctcactgtgctgggggcttcggtgtccaggcgcccaggtgtggccaccagcaccggtttctgccttcgcgttgctggggtgcagtgagactgccacacgcgtgcacatgtggctctgtgggtgtctcctagagaggacgtggcccctgctgccagcccttgagcagcccgtgtgggggcccgagggacccacacagtgggggccagcctcgctggagggagagcaaccctttgccgatgaccacgcttgccgccatctcttagttttctttttcacaagcgctttatttttttaatagacaaatcacattttgcaaggcctttaattaaataagattcttctttccttcattttatgctttatttcctgtttgaaggcttactgtagaagtggcttactgtagaagcagcttgctgagcccctccgagcggtccccagaattagctggttcacaacccccaccctcccccgcccccgcctgtgtcaggtgtggatgaggtcgtcacactcagaaggacaggcttgtctgccagctcacaaggggaggctgcagtgggtttgggagctgggtttaggcccctggtgtctgagggcccaggccttgccagcctctgctgctcctgctcctgggtttgaagatgcaggccgatcgccagctccgtggcagcggtcactaaggacagcctgactgtgccatcttggagcctcaggcggggctccggagatagaagacaggtcgccggaggctccccctcctctcctctcccctctgcagatgctccctgggcgctaccctgcagggtgccaggcaggagtggtctcagaacgtgcgcttctgattattttactggggtccattgtccagatttttctttgattgtaaaatatatttttactttttagtcttctaatttaataaatgatccatataaaaatagagaaataaagtcctttaagggaaggtttacca

SEQ ID NO: 8538 - protein, 213 aa, Homo sapiens
MATTVSTQRGPVYIGELPQDFLRITPTQQQRQVQLDAQAAQQLQYGGAVGTVGRLNITVVQRAFSMDDRIAWTHITIPESLRQGKVEDKWYSLSGRQGDDKEGMINLVMSYALLPAAMVMPPQPVVLMPTVYQQGVGYVPITGMPAVCSPGMVPVALPPAAVNAQPRCSEEDLKAIQDMFPNMDQEVIRSVLEAQRGNKDAAINSLLQMGEEP

SEQ ID NO: 8539 - DNA, 3568 bp, Homo sapiens
gcggtgccgggggcggggcgcggcggctgtcagctgactgtggcggcggcggcctcgaggtgacaactgtctccgtcgcaggctccggcgggggcgcaggaggtcgcccggcgcgtcactgtcgggtcggcgagccacgggggccgccgcagcaccatggcgaccaccgtccagctggacgcccaggcggcccagcagctgcagtacggaggcgcagtgggcaccgtgggccgactgaacatcacggtggtacaggcaaagttggccaagaattacggcatgacccgcatggacccctactgccgactgcgcctgggctacgcggtgtacgagacgcccacggcacacaatggcgccaagaatccccgctggaataaggtcatccactgcacggtgcccccaggcgtggactctttctatctcgagatcttcgatgagagagccttctccatggacgaccgcattgcctggacccacatcaccatcccggagtccctgaggcagggcaaggtggaggacaagtggtacagcctgagcgggaggcagggggacgacaaggagggcatgatcaacctcgtcatgtcctacgcgctgcttccagctgccatggtgatgccaccccagcccgtggtcctgatgccaacagtgtaccagcagggcgttggctatgtgcccatcacagggatgcccgctgtctgtagccccggcatggtgcccgtggccctgcccccggccgccgtgaacgcccagccccgctgtagcgaggaggacctgaaagccatccaggacatgttccccaacatggaccaggaggtgatccgctccgtgctggaagcccagcgagggaacaaggatgccgccatcaactccctgctgcagatgggggaggagccatagagcctctgcctcgatgccgttttgcccccgctctttggacacgccgacccggcgctccccaaggaatgctgtcccaacaagattcccgtgaaagagcacccgtgtcgccccctcccgtggacttctgtgccgccccgtccacacctgttcttgggtgcatgtgggttttcggttcctggcggtccaggacggggcgggggctcccctcccatctcgtgctgggaggtctcagcgcgctctcctgtccctgggacgtgcgtctctccttctcatgccgttctggaaaatgctcttgctgtagagagcagctgcttctgccagggtgttggaggtggtggagcgccttccgattccattcatggcattttgtgatgtgatgtaattggaatagagctgttgatttaaggcacacacaatccctcacactgtgggttttttttagaacttcccagacgaaaactcacgcccttgccctaacgcgctttgctgtgagcctggcccctgcccagggcttgggtctggtgagctgagcagcttcctgtggatggtgtggggccggcctctggcctggctcacctggccactgtccagccagccttgtgacagactccggcctgaaggcagaatgaacccacacctggagtgaggaagggggcctggcacggttggccaggctctgcctgattgccagccagcgggcatctgaagccgggtccttcgcccgccggaggctgccgtccgtctctcctgctgcgctcgtgccagctccgtgggtgtcctcccagggagcttctcttctcaacaggccttgcgaggctggggtgagaggtgatagaggcagcactgtgcatgattccgagagggtgtggtggcactgccagccgactgctgacagcttgggagctgctgtgcccaggacgtgggttcagcgtgggcgaggaaagcctggcgagcgtggccctgtaaaagctttctgaggcgggaggcgctcacttacctctgactgcctgggcgctgcgtgtagcatcttggcctacaggacagattttaggtgacacctggttatgacagtcagaaatttgagaagcttctcacaagtgatgcactttaaataatctgcatgccattgagacacctgcatgtctggtgtttgtggttcaagtgtcttgccgccggccttcggatgtaaacccactgataacggacagaaagagaatgcccacaagtgggtcttctgtggaagatgcagaaggaggaagttagtgcttacattttagtctttttctccctcaaaaaaataggttaagtttcagtgccagctagaaaatactgctttctgccatcgattgggggtggtttttgtcaaatatactgttgataaatatttatttttgtaaacttgaagtgtgtggtggccgtgggggagggacatgctggcagcaggcgccttcttcagctgtgggtcctaaaggcctttgatcctttgaagaagaaagacatggtatttgttcagcagacgccgaccactcagacggaggggcccctgggattccctgtctcagatggcctggtcttacgcctgtgtagatttcttctccattgggaatgaaggtgtcaggcgggactggaacgttctagatggtatgttccgtgatattaacaactctaacccaggacagaccacaagccacactcagaggcctcactgtgctgggggcttcggtgtccaggcgcccaggtgtggccaccagcaccggtttctgccttcgcgttgctggggtgcagtgagactgccacacgcgtgcacatgtggctctgtgggtgtctcctagagaggacgtggcccctgctgccagcccttgagcagcccgtgtgggggcccgagggacccacacagtgggggccagcctcgctggagggagagcaaccctttgccgatgaccacgcttgccgccatctcttagttttctttttcacaagcgctttatttttttaatagacaaatcacattttgcaaggcctttaattaaataagattcttctttccttcattttatgctttatttcctgtttgaaggcttactgtagaagtggcttactgtagaagcagcttgctgagcccctccgagcggtccccagaattagctggttcacaacccccaccctcccccgcccccgcctgtgtcaggtgtggatgaggtcgtcacactcagaaggacaggcttgtctgccagctcacaaggggaggctgcagtgggtttgggagctgggtttaggcccctggtgtctgagggcccaggccttgccagcctctgctgctcctgctcctgggtttgaagatgcaggccgatcgccagctccgtggcagcggtcactaaggacagcctgactgtgccatcttggagcctcaggcggggctccggagatagaagacaggtcgccggaggctccccctcctctcctctcccctctgcagatgctccctgggcgctaccctgcagggtgccaggcaggagtggtctcagaacgtgcgcttctgattattttactggggtccattgtccagatttttctttgattgtaaaatatatttttactttttagtcttctaatttaataaatgatccatataaaaatagagaaataaagtcctttaagggaaggtttacca

SEQ ID NO: 8540 - protein, 246 aa, Homo sapiens
MATTVQLDAQAAQQLQYGGAVGTVGRLNITVVQAKLAKNYGMTRMDPYCRLRLGYAVYETPTAHNGAKNPRWNKVIHCTVPPGVDSFYLEIFDERAFSMDDRIAWTHITIPESLRQGKVEDKWYSLSGRQGDDKEGMINLVMSYALLPAAMVMPPQPVVLMPTVYQQGVGYVPITGMPAVCSPGMVPVALPPAAVNAQPRCSEEDLKAIQDMFPNMDQEVIRSVLEAQRGNKDAAINSLLQMGEEP

SEQ ID NO: 8541 - DNA, 3655 bp, Homo sapiens
ggggcggtgccgggggcggggcgcggcggctgtcagctgactgtggcggcggcggcctcgaggtgacaactgtctccgtcgcaggctccggcgggggcgcaggaggtcgcccggcgcgtcactgtcgggtcggcgagccacgggggccgccgcagcaccatggcgaccaccgtcagcactcagcgcgggccggtgtacatcggtgagctcccgcaggacttcctccgcatcacgcccacacagcagcagcggcaggtccagctggacgcccaggcggcccagcagctgcagtacggaggcgcagtgggcaccgtgggccgactgaacatcacggtggtacaggcaaagttggccaagaattacggcatgacccgcatggacccctactgccgactgcgcctgggctacgcggtgtacgagacgcccacggcacacaatggcgccaagaatccccgctggaataaggtcatccactgcacggtgcccccaggcgtggactctttctatctcgagatcttcgatgagagagccttctccatggacgaccgcattgcctggacccacatcaccatcccggagtccctgaggcagggcaaggtggaggacaagtggtacagcctgagcgggaggcagggggacgacaaggagggcatgatcaacctcgtcatgtcctacgcgctgcttccagctgccatggtgatgccaccccagcccgtggtcctgatgccaacagtgtaccagcagggcgttggctatgtgcccatcacagggatgcccgctgtctgtagccccggcatggtgcccgtggccctgcccccggccgccgtgaacgcccagccccgctgtagcgaggaggacctgaaagccatccaggacatgttccccaacatggaccaggaggtgatccgctccgtgctggaagcccagcgagggaacaaggatgccgccatcaactccctgctgcagatgggggaggagccatagagcctctgcctcgatgccgttttgcccccgctctttggacacgccgacccggcgctccccaaggaatgctgtcccaacaagattcccgtgaaagagcacccgtgtcgccccctcccgtggacttctgtgccgccccgtccacacctgttcttgggtgcatgtgggttttcggttcctggcggtccaggacggggcgggggctcccctcccatctcgtgctgggaggtctcagcgcgctctcctgtccctgggacgtgcgtctctccttctcatgccgttctggaaaatgctcttgctgtagagagcagctgcttctgccagggtgttggaggtggtggagcgccttccgattccattcatggcattttgtgatgtgatgtaattggaatagagctgttgatttaaggcacacacaatccctcacactgtgggttttttttagaacttcccagacgaaaactcacgcccttgccctaacgcgctttgctgtgagcctggcccctgcccagggcttgggtctggtgagctgagcagcttcctgtggatggtgtggggccggcctctggcctggctcacctggccactgtccagccagccttgtgacagactccggcctgaaggcagaatgaacccacacctggagtgaggaagggggcctggcacggttggccaggctctgcctgattgccagccagcgggcatctgaagccgggtccttcgcccgccggaggctgccgtccgtctctcctgctgcgctcgtgccagctccgtgggtgtcctcccagggagcttctcttctcaacaggccttgcgaggctggggtgagaggtgatagaggcagcactgtgcatgattccgagagggtgtggtggcactgccagccgactgctgacagcttgggagctgctgtgcccaggacgtgggttcagcgtgggcgaggaaagcctggcgagcgtggccctgtaaaagctttctgaggcgggaggcgctcacttacctctgactgcctgggcgctgcgtgtagcatcttggcctacaggacagattttaggtgacacctggttatgacagtcagaaatttgagaagcttctcacaagtgatgcactttaaataatctgcatgccattgagacacctgcatgtctggtgtttgtggttcaagtgtcttgccgccggccttcggatgtaaacccactgataacggacagaaagagaatgcccacaagtgggtcttctgtggaagatgcagaaggaggaagttagtgcttacattttagtctttttctccctcaaaaaaataggttaagtttcagtgccagctagaaaatactgctttctgccatcgattgggggtggtttttgtcaaatatactgttgataaatatttatttttgtaaacttgaagtgtgtggtggccgtgggggagggacatgctggcagcaggcgccttcttcagctgtgggtcctaaaggcctttgatcctttgaagaagaaagacatggtatttgttcagcagacgccgaccactcagacggaggggcccctgggattccctgtctcagatggcctggtcttacgcctgtgtagatttcttctccattgggaatgaaggtgtcaggcgggactggaacgttctagatggtatgttccgtgatattaacaactctaacccaggacagaccacaagccacactcagaggcctcactgtgctgggggcttcggtgtccaggcgcccaggtgtggccaccagcaccggtttctgccttcgcgttgctggggtgcagtgagactgccacacgcgtgcacatgtggctctgtgggtgtctcctagagaggacgtggcccctgctgccagcccttgagcagcccgtgtgggggcccgagggacccacacagtgggggccagcctcgctggagggagagcaaccctttgccgatgaccacgcttgccgccatctcttagttttctttttcacaagcgctttatttttttaatagacaaatcacattttgcaaggcctttaattaaataagattcttctttccttcattttatgctttatttcctgtttgaaggcttactgtagaagtggcttactgtagaagcagcttgctgagcccctccgagcggtccccagaattagctggttcacaacccccaccctcccccgcccccgcctgtgtcaggtgtggatgaggtcgtcacactcagaaggacaggcttgtctgccagctcacaaggggaggctgcagtgggtttgggagctgggtttaggcccctggtgtctgagggcccaggccttgccagcctctgctgctcctgctcctgggtttgaagatgcaggccgatcgccagctccgtggcagcggtcactaaggacagcctgactgtgccatcttggagcctcaggcggggctccggagatagaagacaggtcgccggaggctccccctcctctcctctcccctctgcagatgctccctgggcgctaccctgcagggtgccaggcaggagtggtctcagaacgtgcgcttctgattattttactggggtccattgtccagatttttctttgattgtaaaatatatttttactttttagtcttctaatttaataaatgatccatataaaaatagagaaataaagtcctttaagggaaggtttacca

SEQ ID NO: 8542 - protein, 274 aa, Homo sapiens; identical to SEQ ID NO: 1256

SEQ ID NO: 8543 - DNA, 1249 bp, Homo sapiens
agggtgtggtggcactgccagccgactgctgacagcttgggagctgctgtgcccaggacgtgggttcagcgtgggcgaggaaagcctggcgagcgtggccctgtaaaagctttctgaggcgggaggcgctcacttacctctgactgcctgggcgctgcgtgtagcatcttggcctacaggacagattttaggtgacacctggttatgacagtcagaaatttgagaagcttctcacaagtgatgcactttaaataatctgcatgccattgagacacctgcatgtctggtgtttgtggttcaagtgtcttgccgccggccttcggatgtaaacccactgataacggacagaaagagaatgcccacaagtgggtcttctgtggaagatgcagaaggaggaagttagtgcttacattttagtctttttctccctcaaaaaaataggttaagtttcagtgccagctagaaaatactgctttctgccatcgattgggggtggtttttgtcaaatatactgttgataaatatttatttttgtaaacttgaagtgtgtggtggccgtgggggagggacatgctggcagcaggcgccttcttcagctgtgggtcctaaaggcctttgatcctttgaagaagaaagacatggtatttgttcagcagacgccgaccactcagacggaggggcccctgggattccctgtctcagatggcctggtcttacgcctgtgtagatttcttctccattgggaatgaaggtgtcaggcgggactggaacgttctagatggtatgttccgtgatattaacaactctaacccaggacagaccacaagccacactcagaggcctcactgtgctgggggcttcggtgtccaggcgcccaggtgtggccaccagcaccggtttctgccttcgcgttgctgggatgcaggccgatcgccagctccgtggcagcggtcactaaggacagcctgactgtgccatcttggagcctcaggcggggctccggagatagaagacaggtcgccggaggctccccctcctctcctctcccctctgcagatgctccctgggcgctaccctgcagggtgccaggcaggagtggtctcagaacgtgcgcttctgattattttactggggtccattgtccagatttttctttgattgtaaaatatatttttactttttagtcttctaatttaataaatgatccatataaaaatagagaaataaagtcctttaagggaaggtttac

SEQ ID NO: 8544 - protein, 88 aa, Homo sapiens
MAWSYACVDFFSIGNEGVRRDWNVLDGMFRDINNSNPGQTTSHTQRPHCAGGFGVQAPRCGHQHRFLPSRCWDAGRSPAPWQRSLRTA

SEQ ID NO: 8545 - DNA, 1900 bp, Homo sapiens
cgggcgtgacattccgtgtagtccgtccccagatgcagaggactctgtgagcccactggtcagtgaagacgagcgtgtgcagtgcaaattcacgagttctgaagggatcaaaacaccacccccagcctgctagttataaaacagactcgggtgagatttgaaagatcaaactttgatttttatatggaaggaagatgagttagtgaaggaggcgtcacagagggccctgcccaccttccccgtggctgtgcctggggttgctgtttgggggtttgcctttccagggtgtcttgcgggactggtgtttgctgagacccgaggtggccccttcctcagggaggccggtgggatgcgttgttttcttccttcagcaggagctagtgtggcacttctggaactttccgacgtttttaccaaacttgatctttgcttccagggatgcccgctgtctgtagccccggcatggtgcccgtggccctgcccccggccgccgtgaacgcccagccccgctgtagcgaggaggacctgaaagccatccaggacatgttccccaacatggaccaggaggtgatccgctccgtgctggaagcccagcgagggaacaaggatgccgccatcaactccctgctgcagatgggggaggagccatagagcctctgcctcgatgccgttttgcccccgctctttggacacgccgacccggcgctccccaaggaatgctgtcccaacaagattcccgtgaaagagcacccgttgcgtctctccttctcatgccgttctggaaaatgctcttgctgtagagagcagctgcttctgccagggtgttggaggtggtggagcgccttccgattccattcatggcattttgtgatgtgatgtaattggaatagagctgttgatttaaggcacacacaatccctcacactgtgggttttttttagaacttcccagacgaaaactcacgcccttgccctaacgcgctttgctgtgagcctggcccctgcccagggcttgggtctggtgagctgagcagcttcctgtggatggtgtggggccggcctctggcctggctcacctggccactgtccagccagccttgtgacagactccggcctgaaggcagaatgaacccacacctggagtgaggaagggggcctggcacggttggccaggctctgcctgattgccagccagcgggcatctgaagccgggtccttcgcccgccggaggctgccgtccgtctctcctgctgcgctcgtgccagctccgtgggtgtcctcccagggagcttctcttctcaacaggccttgcgaggctggggtgagaggtgatagaggcagcactgtgcatgattccgagagggtgtggtggcactgccagccgactgctgacagcttgggagctgctgtgcccaggacgtgggttcagcgtgggcgaggaaagcctggcgagcgtggccctgtaaaagctttctgaggcgggaggcgctcacttacctctgactgcctgggcgctgcgtgtagcatcttggcctacaggacagattttaggtgacacctggttatgacagtcagaaatttgagaagcttctcacaagtgatgcactttaaataatctgcatgccattgagacacctgcatgtctggtgtttgtggttcaagtgtcttgccgccggccttcggatgtaaacccactgataacggacagaaagagaatgcccacaagtgggtcttctgtggaagatgcagaaggaggaagttagtgcttacattttagtctttttctccctcaaaaaaataggttaagtttcagtgccagctagaaaatactgctttctgccatcgattgggggtggtttttgtcaaatatactgttgataaatatttatttttgtaaactt

SEQ ID NO: 8546 - protein, 70 aa, Homo sapiens [sequence omitted]

SEQ ID NO: 8547 - DNA, 1795 bp, Homo sapiens
cgggcgtgacattccgtgtagtccgtccccagatgcagaggactctgtgagcccactggtcagtgaagacgagcgtgtgcagtgcaaattcacgagttctgaagggatcaaaacaccacccccagcctgctagttataaaacagactcgggtgagatttgaaagatcaaactttgatttttatatggaaggaagatgagttagtgaaggaggcgtcacagagggccctgcccaccttccccgtggctgtgcctggggttgctgtttgggggtttgcctttccagggtgtcttgcgggactggtgtttgctgagacccgaggtggccccttcctcagggaggccggtgggatgcgttgttttcttccttcagcaggagctagtgtggcacttctggaactttccgacgtttttaccaaacttgatctttgcttccagggatgcccgctgtctgtagccccggcatggtgcccgtggccctgcccccggccgccgtgaacgcccagccccgctgtagcgaggaggacctgaaagccatccaggacatgttccccaacatggaccaggaggtgatccgctccgtgctggaagcccagcgagggaacaaggatgccgccatcaactccctgctgcagatgggggaggagccatagagcctctgcttctcatgccgttctggaaaatgctcttgctgtagagagcagctgcttctgccagggtgttggaggtggtggagcgccttccgattccattcatggcattttgtgatgtgatgtaattggaatagagctgttgatttaaggcacacacaatccctcacactgtgggttttttttagaacttcccagacgaaaactcacgcccttgccctaacgcgctttgctgtgagcctggcccctgcccagggcttgggtctggtgagctgagcagcttcctgtggatggtgtggggccggcctctggcctggctcacctggccactgtccagccagccttgtgacagactccggcctgaaggcagaatgaacccacacctggagtgaggaagggggcctggcacggttggccaggctctgcctgattgccagccagcgggcatctgaagccgggtccttcgcccgccggaggctgccgtccgtctctcctgctgcgctcgtgccagctccgtgggtgtcctcccagggagcttctcttctcaacaggccttgcgaggctggggtgagaggtgatagaggcagcactgtgcatgattccgagagggtgtggtggcactgccagccgactgctgacagcttgggagctgctgtgcccaggacgtgggttcagcgtgggcgaggaaagcctggcgagcgtggccctgtaaaagctttctgaggcgggaggcgctcacttacctctgactgcctgggcgctgcgtgtagcatcttggcctacaggacagattttaggtgacacctggttatgacagtcagaaatttgagaagcttctcacaagtgatgcactttaaataatctgcatgccattgagacacctgcatgtctggtgtttgtggttcaagtgtcttgccgccggccttcggatgtaaacccactgataacggacagaaagagaatgcccacaagtgggtcttctgtggaagatgcagaaggaggaagttagtgcttacattttagtctttttctccctcaaaaaaataggttaagtttcagtgccagctagaaaatactgctttctgccatcgattgggggtggtttttgtcaaatatactgttgataaatatttatttttgtaaactt

SEQ ID NO: 8548 - protein, 52 aa, Homo sapiens; identical to SEQ ID NO: 8530

SEQ ID NO: 8549 - DNA, 1782 bp, Homo sapiens
ggggcgtccctggcacagtacggccatctagatgaagctgacactgacgcgttggggctgtaccctgcttggagcccgtctgagtccgcagcatccaggccggggtcactggccctccatggccttgcctcccttggcctggaggggtccccatcttgctcctaggggatgcccgctgtctgtagccccggcatggtgcccgtggccctgcccccggccgccgtgaacgcccagccccgctgtagcgaggaggacctgaaagccatccaggacatgttccccaacatggaccaggaggtgatccgctccgtgctggaagcccagcgagggaacaaggatgccgccatcaactccctgctgcagatgggggaggagccatagagcctctgcctcgatgccgttttgcccccgctctttggacacgccgacccggcgctccccaaggaatgctgtcccaacaagattcccgtgaaagagcacccgtgtcgccccctcccgtggacttctgtgccgccccgtccacacctgttcttgggtgcatgtgggttttcggttcctggcggtccaggacggggcgggggctcccctcccatctcgtgctgggaggtctcagcgcgctctcctgtccctgggacgtgcgtctctccttctcatgccgttctggaaaatgctcttgctgtagagagcagctgcttctgccagggtgttggaggtggtggagcgccttccgattccattcatggcattttgtgatgtgatgtaattggaatagagctgttgatttaaggcacacacaatccctcacactgtgggttttttttagaacttcccagacgaaaactcacgcccttgccctaacgcgctttgctgtgagcctggcccctgcccagggcttgggtctggtgagctgagcagcttcctgtggatggtgtggggccggcctctggcctggctcacctggccactgtccagccagccttgtgacagactccggcctgaaggcagaatgaacccacacctggagtgaggaagggggcctggcacggttggccaggctctgcctgattgccagccagcgggcatctgaagccgggtccttcgcccgccggaggctgccgtccgtctctcctgctgcgctcgtgccagctccgtgggtgtcctcccagggagcttctcttctcaacaggccttgcgaggctggggtgagaggtgatagaggcagcactgtgcatgattccgagagggtgtggtggcactgccagccgactgctgacagcttgggagctgctgtgcccaggacgtgggttcagcgtgggcgaggaaagcctggcgagcgtggccctgtaaaagctttctgaggcgggaggcgctcacttacctctgactgcctgggcgctgcgtgtagcatcttggcctacaggacagattttaggtgacacctggttatgacagtcagaaatttgagaagcttctcacaagtgatgcactttaaataatctgcatgccattgagacacctgcatgtctggtgtttgtggttcaagtgtcttgccgccggccttcggatgtaaacccactgataacggacagaaagagaatgcccacaagtgggtcttctgtggaagatgcagaaggaggaagttagtgcttacattttagtctttttctccctcaaaaaaataggttaagtttcagtgccagctagaaaatactgctttctgccatcgattgggggtggtttttgtcaaatatactgttgataaatatttatttttgtaaactt

SEQ ID NO: 8550 - protein, 64 aa, Homo sapiens; identical to SEQ ID NO: 8532

SEQ ID NO: 8551 - DNA, 2201 bp, Homo sapiens
agctgactgtggcggcggcggcctcgaggtgacaactgtctccgtcgcaggctccggcgggggcgcaggaggtcgcccggcgcgtcactgtcgggtcggcgagccacgggggccgccgcagcaccatggcgaccaccgtcagcactcagcgcgggccggcaaagttggccaagaattacggcatgacccgcatggacccctactgccgactgcgcctgggctacgcggtgtacgagacgcccacggcacacaatggcgccaagaatccccgctggaataaggtcatccactgcacggtgcccccaggcgtggactctttctatctcgagatcttcgatgagagagccttctccatggacgaccgcattgcctggacccacatcaccatcccggagtccctgaggcagggcaaggtggaggacaagtggtacagcctgagcgggaggcagggggacgacaaggagggcatgatcaacctcgtcatgtcctacgcgctgcttccagctgccatggtgatgccaccccagcccgtggtcctgatgccaacagtgtaccagcagggcgttggctatgtgcccatcacagggatgcccgctgtctgtagccccggcatggtgcccgtggccctgcccccggccgccgtgaacgcccagccccgctgtagcgaggaggacctgaaagccatccaggacatgttccccaacatggaccaggaggtgatccgctccgtgctggaagcccagcgagggaacaaggatgccgccatcaactccctgctgcagatgggggaggagccatagagcctctgcctcgatgccgttttgcccccgctctttggacacgccgacccggcgctccccaaggaatgctgtcccaacaagattcccgtgaaagagcacccgtgtcgccccctcccgtggacttctgtgccgccccgtccacacctgttcttgggtgcatgtgggttttcggttcctggcggtccaggacggggcgggggctcccctcccatctcgtgctgggaggtctcagcgcgctctcctgtccctgggacgtgcgtctctccttctcatgccgttctggaaaatgctcttgctgtagagagcagctgcttctgccagggtgttggaggtggtggagcgccttccgattccattcatggcattttgtgatgtgatgtaattggaatagagctgttgatttaaggcacacacaatccctcacactgtgggttttttttagaacttcccagacgaaaactcacgcccttgccctaacgcgctttgctgtgagcctggcccctgcccagggcttgggtctggtgagctgagcagcttcctgtggatggtgtggggccggcctctggcctggctcacctggccactgtccagccagccttgtgacagactccggcctgaaggcagaatgaacccacacctggagtgaggaagggggcctggcacggttggccaggctctgcctgattgccagccagcgggcatctgaagccgggtccttcgcccgccggaggctgccgtccgtctctcctgctgcgctcgtgccagctccgtgggtgtcctcccagggagcttctcttctcaacaggccttgcgaggctggggtgagaggtgatagaggcagcactgtgcatgattccgagagggtgtggtggcactgccagccgactgctgacagcttgggagctgctgtgcccaggacgtgggttcagcgtgggcgaggaaagcctggcgagcgtggccctgtaaaagctttctgaggcgggaggcgctcacttacctctgactgcctgggcgctgcgtgtagcatcttggcctacaggacagattttaggtgacacctggttatgacagtcagaaatttgagaagcttctcacaagtgatgcactttaaataatctgcatgccattgagacacctgcatgtctggtgtttgtggttcaagtgtcttgccgccggccttcggatgtaaacccactgataacggacagaaagagaatgcccacaagtgggtcttctgtggaagatgcagaaggaggaagttagtgcttacattttagtctttttctccctcaaaaaaataggttaagtttcagtgccagctagaaaatactgctttctgccatcgattgggggtggtttttgtcaaatatactgttgataaatatttatttttgtaaactt

SEQ ID NO: 8552 - protein, 224 aa, Homo sapiens; identical to SEQ ID NO: 8536

SEQ ID NO: 8553 - DNA, 2298 bp, Homo sapiens
gcggtgccgggggcggggcgcggcggctgtcagctgactgtggcggcggcggcctcgaggtgacaactgtctccgtcgcaggctccggcgggggcgcaggaggtcgcccggcgcgtcactgtcgggtcggcgagccacgggggccgccgcagcaccatggcgaccaccgtccagctggacgcccaggcggcccagcagctgcagtacggaggcgcagtgggcaccgtgggccgactgaacatcacggtggtacaggcaaagttggccaagaattacggcatgacccgcatggacccctactgccgactgcgcctgggctacgcggtgtacgagacgcccacggcacacaatggcgccaagaatccccgctggaataaggtcatccactgcacggtgcccccaggcgtggactctttctatctcgagatcttcgatgagagagccttctccatggacgaccgcattgcctggacccacatcaccatcccggagtccctgaggcagggcaaggtggaggacaagtggtacagcctgagcgggaggcagggggacgacaaggagggcatgatcaacctcgtcatgtcctacgcgctgcttccagctgccatggtgatgccaccccagcccgtggtcctgatgccaacagtgtaccagcagggcgttggctatgtgcccatcacagggatgcccgctgtctgtagccccggcatggtgcccgtggccctgcccccggccgccgtgaacgcccagccccgctgtagcgaggaggacctgaaagccatccaggacatgttccccaacatggaccaggaggtgatccgctccgtgctggaagcccagcgagggaacaaggatgccgccatcaactccctgctgcagatgggggaggagccatagagcctctgcctcgatgccgttttgcccccgctctttggacacgccgacccggcgctccccaaggaatgctgtcccaacaagattcccgtgaaagagcacccgtgtcgccccctcccgtggacttctgtgccgccccgtccacacctgttcttgggtgcatgtgggttttcggttcctggcggtccaggacggggcgggggctcccctcccatctcgtgctgggaggtctcagcgcgctctcctgtccctgggacgtgcgtctctccttctcatgccgttctggaaaatgctcttgctgtagagagcagctgcttctgccagggtgttggaggtggtggagcgccttccgattccattcatggcattttgtgatgtgatgtaattggaatagagctgttgatttaaggcacacacaatccctcacactgtgggttttttttagaacttcccagacgaaaactcacgcccttgccctaacgcgctttgctgtgagcctggcccctgcccagggcttgggtctggtgagctgagcagcttcctgtggatggtgtggggccggcctctggcctggctcacctggccactgtccagccagccttgtgacagactccggcctgaaggcagaatgaacccacacctggagtgaggaagggggcctggcacggttggccaggctctgcctgattgccagccagcgggcatctgaagccgggtccttcgcccgccggaggctgccgtccgtctctcctgctgcgctcgtgccagctccgtgggtgtcctcccagggagcttctcttctcaacaggccttgcgaggctggggtgagaggtgatagaggcagcactgtgcatgattccgagagggtgtggtggcactgccagccgactgctgacagcttgggagctgctgtgcccaggacgtgggttcagcgtgggcgaggaaagcctggcgagcgtggccctgtaaaagctttctgaggcgggaggcgctcacttacctctgactgcctgggcgctgcgtgtagcatcttggcctacaggacagattttaggtgacacctggttatgacagtcagaaatttgagaagcttctcacaagtgatgcactttaaataatctgcatgccattgagacacctgcatgtctggtgtttgtggttcaagtgtcttgccgccggccttcggatgtaaacccactgataacggacagaaagagaatgcccacaagtgggtcttctgtggaagatgcagaaggaggaagttagtgcttacattttagtctttttctccctcaaaaaaataggttaagtttcagtgccagctagaaaatactgctttctgccatcgattgggggtggtttttgtcaaatatactgttgataaatatttatttttgtaaactt

SEQ ID NO: 8554 - protein, 246 aa, Homo sapiens; identical to SEQ ID NO: 8540

SEQ ID NO: 8555 - DNA, 2385 bp, Homo sapiens
ggggcggtgccgggggcggggcgcggcggctgtcagctgactgtggcggcggcggcctcgaggtgacaactgtctccgtcgcaggctccggcgggggcgcaggaggtcgcccggcgcgtcactgtcgggtcggcgagccacgggggccgccgcagcaccatggcgaccaccgtcagcactcagcgcgggccggtgtacatcggtgagctcccgcaggacttcctccgcatcacgcccacacagcagcagcggcaggtccagctggacgcccaggcggcccagcagctgcagtacggaggcgcagtgggcaccgtgggccgactgaacatcacggtggtacaggcaaagttggccaagaattacggcatgacccgcatggacccctactgccgactgcgcctgggctacgcggtgtacgagacgcccacggcacacaatggcgccaagaatccccgctggaataaggtcatccactgcacggtgcccccaggcgtggactctttctatctcgagatcttcgatgagagagccttctccatggacgaccgcattgcctggacccacatcaccatcccggagtccctgaggcagggcaaggtggaggacaagtggtacagcctgagcgggaggcagggggacgacaaggagggcatgatcaacctcgtcatgtcctacgcgctgcttccagctgccatggtgatgccaccccagcccgtggtcctgatgccaacagtgtaccagcagggcgttggctatgtgcccatcacagggatgcccgctgtctgtagccccggcatggtgcccgtggccctgcccccggccgccgtgaacgcccagccccgctgtagcgaggaggacctgaaagccatccaggacatgttccccaacatggaccaggaggtgatccgctccgtgctggaagcccagcgagggaacaaggatgccgccatcaactccctgctgcagatgggggaggagccatagagcctctgcctcgatgccgttttgcccccgctctttggacacgccgacccggcgctccccaaggaatgctgtcccaacaagattcccgtgaaagagcacccgtgtcgccccctcccgtggacttctgtgccgccccgtccacacctgttcttgggtgcatgtgggttttcggttcctggcggtccaggacggggcgggggctcccctcccatctcgtgctgggaggtctcagcgcgctctcctgtccctgggacgtgcgtctctccttctcatgccgttctggaaaatgctcttgctgtagagagcagctgcttctgccagggtgttggaggtggtggagcgccttccgattccattcatggcattttgtgatgtgatgtaattggaatagagctgttgatttaaggcacacacaatccctcacactgtgggttttttttagaacttcccagacgaaaactcacgcccttgccctaacgcgctttgctgtgagcctggcccctgcccagggcttgggtctggtgagctgagcagcttcctgtggatggtgtggggccggcctctggcctggctcacctggccactgtccagccagccttgtgacagactccggcctgaaggcagaatgaacccacacctggagtgaggaagggggcctggcacggttggccaggctctgcctgattgccagccagcgggcatctgaagccgggtccttcgcccgccggaggctgccgtccgtctctcctgctgcgctcgtgccagctccgtgggtgtcctcccagggagcttctcttctcaacaggccttgcgaggctggggtgagaggtgatagaggcagcactgtgcatgattccgagagggtgtggtggcactgccagccgactgctgacagcttgggagctgctgtgcccaggacgtgggttcagcgtgggcgaggaaagcctggcgagcgtggccctgtaaaagctttctgaggcgggaggcgctcacttacctctgactgcctgggcgctgcgtgtagcatcttggcctacaggacagattttaggtgacacctggttatgacagtcagaaatttgagaagcttctcacaagtgatgcactttaaataatctgcatgccattgagacacctgcatgtctggtgtttgtggttcaagtgtcttgccgccggccttcggatgtaaacccactgataacggacagaaagagaatgcccacaagtgggtcttctgtggaagatgcagaaggaggaagttagtgcttacattttagtctttttctccctcaaaaaaataggttaagtttcagtgccagctagaaaatactgctttctgccatcgattgggggtggtttttgtcaaatatactgttgataaatatttatttttgtaaactt

SEQ ID NO: 8556 - protein, 274 aa, Homo sapiens; identical to SEQ ID NO: 1256

SEQ ID NO: 8557 - DNA, 795 bp, Homo sapiens
ggggcgtccctggcacagtacggccatctagatgaagctgacactgacgcgttggggctgtaccctgcttggagcccgtctgagtccgcagcatccaggccggggtcactggccctccatggccttgcctcccttggcctggaggggtccccatcttgctcctaggggatgcccgctgtctgtagccccggcatggtgcccgtggccctgcccccggccgccgtgaacgcccagccccgctgtagcgaggaggacctgaaagccatccaggacatgttccccaacatggaccaggaggtgatccgctccgtgctggaagcccagcgagggaacaaggatgccgccatcaactccctgctgcagatgggggaggagccatagagcctctgcctcgatgccgttttgcccccgctctttggacacgccgacccggcgctccccaaggaatgctgtcccaacaagattcccgtgaaagagcacccgtgtcgccccctcccgtggacttctgtgccgccccgtccacacctgttcttgggtgcatgtgggttttcggttcctggcggtccaggacggggcgggggctcccctcccatctcgtgctgggaggtctcagcgcgctctcctgtccctgggacgtgcgtctctccttctcatgccgttctggaaaatgctcttgctgtagagagcagctgcttctgccagggtgttggaggtggtggagcgccttccgattccattcatggcattttgtgatgtgatgtaattggaatagagctgttgatttaaggcacacac

SEQ ID NO: 8558 - protein, 64 aa, Homo sapiens; identical to SEQ ID NO: 8532

SEQ ID NO: 8559 - DNA, 1198 bp, Homo sapiens
ggcggcctcgaggtgacaactgtctccgtcgcaggctccggcgggggcgcaggaggtcgcccggcgcgtcactgtcgggtcggcgagccacgggggccgccgcagcaccatggcgaccaccgtcagcactcagcgcgggccggcaaagttggccaagaattacggcatgacccgcatggacccctactgccgactgcgcctgggctacgcggtgtacgagacgcccacggcacacaatggcgccaagaatccccgctggaataaggtcatccactgcacggtgcccccaggcgtggactctttctatctcgagatcttcgatgagagagccttctccatggacgaccgcattgcctggacccacatcaccatcccggagtccctgaggcagggcaaggtggaggacaagtggtacagcctgagcgggaggcagggggacgacaaggagggcatgatcaacctcgtcatgtcctacgcgctgcttccagctgccatggtgatgccaccccagcccgtggtcctgatgccaacagtgtaccagcagggcgttggctatgtgcccatcacagggatgcccgctgtctgtagccccggcatggtgcccgtggccctgcccccggccgccgtgaacgcccagccccgctgtagcgaggaggacctgaaagccatccaggacatgttccccaacatggaccaggaggtgatccgctccgtgctggaagcccagcgagggaacaaggatgccgccatcaactccctgctgcagatgggggaggagccatagagcctctgcctcgatgccgttttgcccccgctctttggacacgccgacccggcgctccccaaggaatgctgtcccaacaagattcccgtgaaagagcacccgtgtcgccccctcccgtggacttctgtgccgccccgtccacacctgttcttgggtgcatgtgggttttcggttcctggcggtccaggacggggcgggggctcccctcccatctcgtgctgggaggtctcagcgcgctctcctgtccctgggacgtgcgtctctccttctcatgccgttctggaaaatgctcttgctgtagagagcagctgcttctgccagggtgttggaggtggtggagcgccttccgattccattcatggcattttgtgatgtgatgtaattggaatagagctgttgatttaaggcacacac

SEQ ID NO: 8560 - protein, 224 aa, Homo sapiens; identical to SEQ ID NO: 8536

SEQ ID NO: 8561 - DNA, 1398 bp, Homo sapiens
ggggcggtgccgggggcggggcgcggcggctgtcagctgactgtggcggcggcggcctcgaggtgacaactgtctccgtcgcaggctccggcgggggcgcaggaggtcgcccggcgcgtcactgtcgggtcggcgagccacgggggccgccgcagcaccatggcgaccaccgtcagcactcagcgcgggccggtgtacatcggtgagctcccgcaggacttcctccgcatcacgcccacacagcagcagcggcaggtccagctggacgcccaggcggcccagcagctgcagtacggaggcgcagtgggcaccgtgggccgactgaacatcacggtggtacaggcaaagttggccaagaattacggcatgacccgcatggacccctactgccgactgcgcctgggctacgcggtgtacgagacgcccacggcacacaatggcgccaagaatccccgctggaataaggtcatccactgcacggtgcccccaggcgtggactctttctatctcgagatcttcgatgagagagccttctccatggacgaccgcattgcctggacccacatcaccatcccggagtccctgaggcagggcaaggtggaggacaagtggtacagcctgagcgggaggcagggggacgacaaggagggcatgatcaacctcgtcatgtcctacgcgctgcttccagctgccatggtgatgccaccccagcccgtggtcctgatgccaacagtgtaccagcagggcgttggctatgtgcccatcacagggatgcccgctgtctgtagccccggcatggtgcccgtggccctgcccccggccgccgtgaacgcccagccccgctgtagcgaggaggacctgaaagccatccaggacatgttccccaacatggaccaggaggtgatccgctccgtgctggaagcccagcgagggaacaaggatgccgccatcaactccctgctgcagatgggggaggagccatagagcctctgcctcgatgccgttttgcccccgctctttggacacgccgacccggcgctccccaaggaatgctgtcccaacaagattcccgtgaaagagcacccgtgtcgccccctcccgtggacttctgtgccgccccgtccacacctgttcttgggtgcatgtgggttttcggttcctggcggtccaggacggggcgggggctcccctcccatctcgtgctgggaggtctcagcgcgctctcctgtccctgggacgtgcgtctctccttctcatgccgttctggaaaatgctcttgctgtagagagcagctgcttctgccagggtgttggaggtggtggagcgccttccgattccattcatggcattttgtgatgtgatgtaattggaatagagctgttgatttaaggcacacac

SEQ ID NO: 8562 - protein, 274 aa, Homo sapiens; identical to SEQ ID NO: 1256

SEQ ID NO: 8563 - DNA, 833 bp, Homo sapiens
ggcggcctcgaggtgacaactgtctccgtcgcaggctccggcgggggcgcaggaggtcgcccggcgcgtcactgtcgggtcggcgagccacgggggccgccgcagcaccatggcgaccaccgtcagcactcagcgcgggccggcaaagttggccaagaattacggcatgacccgcatggacccctactgccgactgcgcctgggctacgcggtgtacgagacgcccacggcacacaatggcgccaagaatccccgctggaataaggtcatccactgcacggtgcccccaggcgtggactctttctatctcgagatcttcgatgagagagccttctccatggacgaccgcattgcctggacccacatcaccatcccggagtccctgaggcagggcaaggtggaggacaagtggtacagcctgagcgggaggcagggggacgacaaggagggcatgatcaacctcgtcatgtcctacgcgctgcttccagctgccatggtgatgccaccccagcccgtggtcctgatgccaacagtgtaccagcagggcgttggctatgtgcccatcacagacattgtaaattttggaacagccccgcacttcatagaaaagttcccaaggagatgcaggaacatctgccagagcctgtgaggactcgtccacctgacgccccaccggagcccccagcccccatgcccaggcatgcgtttccaataagcaggggcgtccctggcacagtacggccatctagatgaagctgacactgacgcgttggggctgtaccctgcttggagcccgtctgagtccgcagcatccaggccggggtcactggccc

SEQ ID NO: 8564 - protein, 179 aa, Homo sapiens
MATTVSTQRGPAKLAKNYGMTRMDPYCRLRLGYAVYETPTAHNGAKNPRWNKVIHCTVPPGVDSFYLEIFDERAFSMDDRIAWTHITIPESLRQGKVEDKWYSLSGRQGDDKEGMINLVMSYALLPAAMVMPPQPVVLMPTVYQQGVGYVPITDIVNFGTAPHFIEKFPRRCRNICQSL

SEQ ID NO: 8565 - DNA, 613 bp, Homo sapiens
gggcggggcgcggcggctgtcagctgactgtggcggcggcggcctcgaggtgacaactgtctccgtcgcaggctccggcgggggcgcaggaggtcgcccggcgcgtcactgtcgggtcggcgagccacgggggccgccgcagcaccatggcgaccaccgtcagcactcagcgcgggccgtaatgagcagtcccactgtctttaacggacacctaaagagtgcagagcaaggagatggagcgctggacgccttcaaataccgggacaaccaggatccagagcagcgagggacccacagtgctccctcagaggcctctggaccccacgcccacacgtccctgtgaccacccacaccctcccccgactggcttctccatgctgctgtctccgggacatgagtcgcctgtctgtcccccacgtgtggccaggagggcatgagccacctgtctgtcccctacgtgtgcccaggagggcacgagccgcctgtctgtctgccatgtgtgcccaggagatacggtgcttttcctgccatgtcctcagagctgtgcatgtggcacacaggaagcagttgtcacaaataaacaggaatttggcctgtgtatgttagtcctgag

SEQ ID NO: 8566 - protein, 70 aa, Homo sapiens
MSRLSVPHVWPGGHEPPVCPLRVPRRARAACLSAMCAQEIRCFSCHVLRAVHVAHRKQLSQINRNLACVC

SEQ ID NO: 8567 - DNA, 4093 bp, Homo sapiens
gctgttcggctcagctgcacggctcggctcggctcggctcggctcggctgcgcggccgctgacgggcgtgcgctgggggcgcggggcgcggggcgcgggcctcggcggcggcggcggcggcggcggcggaagccaggtgcccccgcccgccctgtcctctcgacgaggcggaggcgtcgccgcgggccaggcctcggactgccgcgtcggagtggacgcggggggcggcggcgcgggcggacgcgggcggcgcgaagcagcggggcccgcgggggcgccccggccgggtcggcgcggacggcactcggcggacgcgggcggacgctgggcggcccctccctgcccgcgcgcccgggcgcccctggccggcgccgggccccagagcgatgacatcgacggggaaggacggcggcgcgcagcacgcgcagtatgttgggccctaccggctggagaagacgctgggcaaggggcagacaggtctggtgaagctgggggttcactgcgtcacctgccagaaggtggccatcaagatcgtcaaccgtgagaagctcagcgagtcggtgctgatgaaggtggagcgggagatcgcgatcctgaagctcattgagcacccccacgtcctaaagctgcacgacgtttatgaaaacaaaaaatatttgtacctggtgctagaacacgtgtcaggtggtgagctcttcgactacctggtgaagaaggggaggctgacgcctaaggaggctcggaagttcttccggcagatcatctctgcgctggacttctgccacagccactccatatgccacagggatctgaaacctgaaaacctcctgctggacgagaagaacaacatccgcatcgcagactttggcatggcgtccctgcaggttggcgacagcctgttggagaccagctgtgggtccccccactacgcctgccccgaggtgatccggggggagaagtatgacggccggaaggcggacgtgtggagctgcggcgtcatcctgttcgccttgctggtgggggctctgcccttcgacgatgacaacttgcgacagctgctggagaaggtgaagcggggcgtgttccacatgccgcactttatcccgcccgactgccagagtctgctacggggcatgatcgaggtggacgccgcacgccgcctcacgctagagcacattcagaaacacatatggtatatagggggcaagaatgagcccgaaccagagcagcccattcctcgcaaggtgcagatccgctcgctgcccagcctggaggacatcgaccccgacgtgctggacagcatgcactcactgggctgcttccgagaccgcaacaagctgctgcaggacctgctgtccgaggaggagaaccaggagaagatgatttacttcctcctcctggaccggaaagaaaggtacccgagccaggaggatgaggacctgcccccccggaacgagatagaccctccccggaagcgtgtggactccccgatgctgaaccggcacggcaagcggcggccagaacgcaaatccatggaggtgctcagcgtgacggacggcggctccccggtgcctgcgcggcgggccattgagatggcccagcacggccagaggtctcggtccatcagcggtgcctcctcaggcctttccaccagcccactcagcagcccccgggtgacccctcacccctcaccaaggggcagtcccctccccacccccaaggggacacctgtccacacgccaaaggagagcccggctggcacgcccaaccccacgcccccgtccagccccagcgtcggaggggtgccctggagggcgcggctcaactccatcaagaacagctttctgggctcaccccgcttccaccgccggaaactgcaagttccgacgccggaggagatgtccaacctgacaccagagtcgtccccagagctggcgaagaagtcctggtttgggaacttcatcagcctggagaaggaggagcagatcttcgtggtcatcaaagacaaacctctgagctccatcaaggctgacatcgtgcacgccttcctgtcgattcccagtctcagccacagcgtcatctcccaaacgagcttccgggccgagtacaaggccacgggggggccagccgtgttccagaagccggtcaagttccaggttgatatcacctacacggagggtggggaggcgcagaaggagaacggcatctactccgtcaccttcaccctgctctcaggccccagccgtcgcttcaagagggtggtggagaccatccaggcccagctgctgagcacacacgacccgcctgcggcccagcacttgtcagacaccactaactgtatggaaatgatgacggggcggctttccaaatgtggaattatcccgaaaagttaacatgtcacctccacgaggccatcctctgtgaccgaaggcagctgctgcggacccgccctccctccgctcctgctgttgctgccgggcagtgaggcccagcccagcgccccgtccaccccgcggcagctcctcgcctcagctccgcacggcccgtgggaggaaggccaggctcgggggagcctcctccagcccggccgacccggactcccggtcacctgacccctcagcaagaacagcctgcctggtggccttctggggccaggacccctggtgggcaacgtagccacaggaacaggccccgtccaccgcctccacgccgcacctggaggcctcctcgcaggcccgtgccccgcctccctggctgcgccgcctccgtgtagtcttggcctcctcaggctgcctcccgtcctctcgtctcacccgcgcctcccttgcctcatctggggcggctgtgggctctggcgctcctctctggctgaggtggaaacagagacaccctgcggcaccagagccttcccagcaggccaggccgctgggctgggatcagtgttatttatttgccgttttaatttatggattctccgcacctctgttcagggaagggcggcggccacatcccctgccgtctgcgtgtctcaggcagtgggggggctggggccagggcgccctctgaggacagagctggtggggcgcgggggggctggcgagctactgtaaactttaaagaattcctgcaagatatttttataaacttttttttcttggtggtttttggaaaagggtgtgggggtgggggcgccgctggggcagggccaggttttgtgttttagtcccttgctcctgcttctttctacacacacatctaaagacggtgcggctcgctctgtcatgggttccgtctctctgtggagaagcagctccacctctgggggggctcggggcagaggggcggtgtcttgtagcgggcggcagcgccagcgcccctctgtcaggctggggcaatcttggttttgtgtccaaaggtgaaggggtaggaggagggccctcagctggccctccccacacacaggacggcaggggcactgtgaggcttttcttattaaaatgaaaaaattgaaaaaaaaggacaaagagtcggtggcgctcctctgcagggcgttctgtgcagagcgaggcccagggcgcagccctcagagggctgcaggcccaccctgcccagtgcccgccgccgtgcttcaccccagctccagcttctgtgttcccttccgcccatgtgcccagccctcccaggcgggcacagcccgggtgcggcggccgtgggggacggcgggtctgatgcatgcctctgccatggagtcgtctgtctgcttcggtgcctgcccctgcctcccacccacctcgtgtatagattttaacgcttctgttaacattagacctctgccacaggctgggatttctatacataagaacaaaagcaaacacctaggacagcaaacgccaggcggtacaggcgggaaggggctctccacggagatcgaggacacgaagcaaactgcctcttgcttgccttccccttttgtgcttcggacacacgcggactccagcaggcgccacggaaatgggcaagcccctgcagtgtacccctgtcataactgtgagcagctgcagctccggaacaataaatcccttccgcaaagaca

SEQ ID NO: 8568 - protein, 668 aa, Homo sapiens; identical to SEQ ID NO: 1258

SEQ ID NO: 8569 - DNA, 4561 bp, Homo sapiens
tgttcggctcagctgcacggctcggctcggctcggctcggctcggctgcgcggccgctgacgggcgtgcgctgggggcgcggggcgcggggcgcgggcctcggcggcggcggcggcggcggcggcggaagccaggtgcccccgcccgccctgtcctctcgacgaggcggaggcgtcgccgcgggccaggcctcggactgccgcgtcggagtggacgcggggggcggcggcgcgggcggacgcgggcggcgcgaagcagcggggcccgcgggggcgccccggccgggtcggcgcggacggcactcggcggacgcgggcggacgctgggcggcccctccctgcccgcgcgcccgggcgcccctggccggcgccgggccccagagcgatgacatcgacggggaaggacggcggcgcgcagcacgcgcagtatgttgggccctaccggctggagaagacgctgggcaaggggcagacaggtctggtgaagctgggggttcactgcgtcacctgccagaaggtggccatcaagatcgtcaaccgtgagaagctcagcgagtcggtgctgatgaaggtggagcgggagatcgcgatcctgaagctcattgagcacccccacgtcctaaagctgcacgacgtttatgaaaacaaaaaatatttgtacctggtgctagaacacgtgtcaggtggtgagctcttcgactacctggtgaagaaggggaggctgacgcctaaggaggctcggaagttcttccggcagatcatctctgcgctggacttctgccacagccactccatatgccacagggatctgaaacctgaaaacctcctgctggacgagaagaacaacatccgcatcgcagactttggcatggcgtccctgcaggttggcgacagcctgttggagaccagctgtgggtccccccactacgcctgccccgaggtgatccggggggagaagtatgacggccggaaggcggacgtgtggagctgcggcgtcatcctgttcgccttgctggtgggggctctgcccttcgacgatgacaacttgcgacagctgctggagaaggtgaagcggggcgtgttccacatgccgcactttatcccgcccgactgccagagtctgctacggggcatgatcgaggtggacgccgcacgccgcctcacgctagagcacattcagaaacacatatggtatatagggggcaagaatgagcccgaaccagagcagcccattcctcgcaaggtgcagatccgctcgctgcccagcctggaggacatcgaccccgacgtgctggacagcatgcactcactgggctgcttccgagaccgcaacaagctgctgcaggacctgctgtccgaggaggagaaccaggagaagatgatttacttcctcctcctggaccggaaagaaaggtacccgagccaggaggatgaggacctgcccccccggaacgagatagaccctccccggaagcgtgtggactccccgatgctgaaccggcacggcaagcggcggccagaacgcaaatccatggaggtgctcagcgtgacggacggcggctccccggtgcctgcgcggcgggccattgagatggcccagcacggccagaggtctcggtccatcagcggtgcctcctcaggcctttccaccagcccactcagcagcccccgggtgacccctcacccctcaccaaggggcagtcccctccccacccccaaggggacacctgtccacacgccaaaggagagcccggctggcacgcccaaccccacgcccccgtccagccccagcgtcggaggggtgccctggagggcgcggctcaactccatcaagaacagctttctgggctcaccccgcttccaccgccggaaactgcaagttccgacgccggaggagatgtccaacctgacaccagagtcgtccccagagctggcgaagaagtcctggtttgggaacttcatcagcctggagaaggaggagcagatcttcgtggtcatcaaagacaaacctctgagctccatcaaggctgacatcgtgcacgccttcctgtcgattcccagtctcagccacagcgtcatctcccaaacgagcttccgggccgagtacaaggccacgggggggccagccgtgttccagaagccggtcaagttccaggttgatatcacctacacggagggtggggaggcgcagaaggagaacggcatctactccgtcaccttcaccctgctctcaggccccagccgtcgcttcaagagggtggtggagaccatccaggcccagctgctgagcacacacgacccgcctgcggcccagcacttgtcagacaccactaactgtatggaaatgatgacggggcggctttccaaatgtggcagcccattgagtaacttctttgacgtaattaaacaacttttttcagacgagaagaacgggcaggcggcccaggcccccagcacgcccgccaagcggagtgcccacggcccactcggtgactccgcggccgctggccctggccccggaggggacgccgagtacccaacgggcaaggacacggccaagatgggcccgcccaccgcccgccgcgagcagccttagacacactagcccccccccccagcacagcactgacagcggctgcctcgccgcccgccgcccgccctgccccgagtggacccgcggccgcgccgcccgtccgtccagactgttctcagagcctgggaggaaaggaaaggggcgttggggccggcctgtgggctgcgccacccgcgcccgctctcttttctctctgtctctgcctctgcctgtctctgacagcatcgcttgtttccactctgataccaggaattatcccgaaaagttaacatgtcacctccacgaggccatcctctgtgaccgaaggcagctgctgcggacccgccctccctccgctcctgctgttgctgccgggcagtgaggcccagcccagcgccccgtccaccccgcggcagctcctcgcctcagctccgcacggcccgtgggaggaaggccaggctcgggggagcctcctccagcccggccgacccggactcccggtcacctgacccctcagcaagaacagcctgcctggtggccttctggggccaggacccctggtgggcaacgtagccacaggaacaggccccgtccaccgcctccacgccgcacctggaggcctcctcgcaggcccgtgccccgcctccctggctgcgccgcctccgtgtagtcttggcctcctcaggctgcctcccgtcctctcgtctcacccgcgcctcccttgcctcatctggggcggctgtgggctctggcgctcctctctggctgaggtggaaacagagacaccctgcggcaccagagccttcccagcaggccaggccgctgggctgggatcagtgttatttatttgccgttttaatttatggattctccgcacctctgttcagggaagggcggcggccacatcccctgccgtctgcgtgtctcaggcagtgggggggctggggccagggcgccctctgaggacagagctggtggggcgcgggggggctggcgagctactgtaaactttaaagaattcctgcaagatatttttataaacttttttttcttggtggtttttggaaaagggtgtgggggtgggggcgccgctggggcagggccaggttttgtgttttagtcccttgctcctgcttctttctacacacacatctaaagacggtgcggctcgctctgtcatgggttccgtctctctgtggagaagcagctccacctctgggggggctcggggcagaggggcggtgtcttgtagcgggcggcagcgccagcgcccctctgtcaggctggggcaatcttggttttgtgtccaaaggtgaaggggtaggaggagggccctcagctggccctccccacacacaggacggcaggggcactgtgaggcttttcttattaaaatgaaaaaattgaaaaaaaaggacaaagagtcggtggcgctcctctgcagggcgttctgtgcagagcgaggcccagggcgcagccctcagagggctgcaggcccaccctgcccagtgcccgccgccgtgcttcaccccagctccagcttctgtgttcccttccgcccatgtgcccagccctcccaggcgggcacagcccgggtgcggcggccgtgggggacggcgggtctgatgcatgcctctgccatggagtcgtctgtctgcttcggtgcctgcccctgcctcccacccacctcgtgtatagattttaacgcttctgttaacattagacctctgccacaggctgggatttctatacataagaacaaaagcaaacacctaggacagcaaacgccaggcggtacaggcgggaaggggctctccacggagatcgaggacacgaagcaaactgcctcttgcttgccttccccttttgtgcttcggacacacgcggactccagcaggcgccacggaaatgggcaagcccctgcagtgtacccctgtcataactgtgagcagctgcagctccggaacaataaatcccttccgcaaagaca

SEQ ID NO: 8570 - protein, 736 aa, Homo sapiens
MTSTGKDGGAQHAQYVGPYRLEKTLGKGQTGLVKLGVHCVTCQKVAIKIVNREKLSESVLMKVEREIAILKLIEHPHVLKLHDVYENKKYLYLVLEHVSGGELFDYLVKKGRLTPKEARKFFRQIISALDFCHSHSICHRDLKPENLLLDEKNNIRIADFGMASLQVGDSLLETSCGSPHYACPEVIRGEKYDGRKADVWSCGVILFALLVGALPFDDDNLRQLLEKVKRGVFHMPHFIPPDCQSLLRGMIEVDAARRLTLEHIQKHIWYIGGKNEPEPEQPIPRKVQIRSLPSLEDIDPDVLDSMHSLGCFRDRNKLLQDLLSEEENQEKMIYFLLLDRKERYPSQEDEDLPPRNEIDPPRKRVDSPMLNRHGKRRPERKSMEVLSVTDGGSPVPARRAIEMAQHGQRSRSISGASSGLSTSPLSSPRVTPHPSPRGSPLPTPKGTPVHTPKESPAGTPNPTPPSSPSVGGVPWRARLNSIKNSFLGSPRFHRRKLQVPTPEEMSNLTPESSPELAKKSWFGNFISLEKEEQIFVVIKDKPLSSIKADIVHAFLSIPSLSHSVISQTSFRAEYKATGGPAVFQKPVKFQVDITYTEGGEAQKENGIYSVTFTLLSGPSRRFKRVVETIQAQLLSTHDPPAAQHLSDTTNCMEMMTGRLSKCGSPLSNFFDVIKQLFSDEKNGQAAQAPSTPAKRSAHGPLGDSAAAGPGPGGDAEYPTGKDTAKMGPPTARREQP

SEQ ID NO: 8571 - DNA, 4138 bp, Homo sapiens
tgttcggctcagctgcacggctcggctcggctcggctcggctcggctgcgcggccgctgacgggcgtgcgctgggggcgcggggcgcggggcgcgggcctcggcggcggcggcggcggcggcggcggaagccaggtgcccccgcccgccctgtcctctcgacgaggcggaggcgtcgccgcgggccaggcctcggactgccgcgtcggagtggacgcggggggcggcggcgcgggcggacgcgggcggcgcgaagcagcggggcccgcgggggcgccccggccgggtcggcgcggacggcactcggcggacgcgggcggacgctgggcggcccctccctgcccgcgcgcccgggcgcccctggccggcgccgggccccagagcgatgacatcgacggggaaggacggcggcgcgcagcacgcgcagtatgttgggccctaccggctggagaagacgctgggcaaggggcagacaggtctggtgaagctgggggttcactgcgtcacctgccagaaggtggccatcaagatcgtcaaccgtgagaagctcagcgagtcggtgctgatgaaggtggagcgggagatcgcgatcctgaagctcattgagcacccccacgtcctaaagctgcacgacgtttatgaaaacaaaaaatatttgtacctggtgctagaacacgtgtcaggtggtgagctcttcgactacctggtgaagaaggggaggctgacgcctaaggaggctcggaagttcttccggcagatcatctctgcgctggacttctgccacagccactccatatgccacagggatctgaaacctgaaaacctcctgctggacgagaagaacaacatccgcatcgcagactttggcatggcgtccctgcaggttggcgacagcctgttggagaccagctgtgggtccccccactacgcctgccccgaggtgatccggggggagaagtatgacggccggaaggcggacgtgtggagctgcggcgtcatcctgttcgccttgctggtgggggctctgcccttcgacgatgacaacttgcgacagctgctggagaaggtgaagcggggcgtgttccacatgccgcactttatcccgcccgactgccagagtctgctacggggcatgatcgaggtggacgccgcacgccgcctcacgctagagcacattcagaaacacatatggtatatagggggcaagaatgagcccgaaccagagcagcccattcctcgcaaggtgcagatccgctcgctgcccagcctggaggacatcgaccccgacgtgctggacagcatgcactcactgggctgcttccgagaccgcaacaagctgctgcaggacctgctgtccgaggaggagaaccaggagaagatgatttacttcctcctcctggaccggaaagaaaggtacccgagccaggaggatgaggacctgcccccccggaacgagatagaccctccccggaagcgtgtggactccccgatgctgaaccggcacggcaagcggcggccagaacgcaaatccatggaggtgctcagcgtgacggacggcggctccccggtgcctgcgcggcgggccattgagatggcccagcacggccagaggtctcggtccatcagcggtgcctcctcaggcctttccaccagcccactcagcagcccccgggtgacccctcacccctcaccaaggggcagtcccctccccacccccaaggggacacctgtccacacgccaaaggagagcccggctggcacgcccaaccccacgcccccgtccagccccagcgtcggaggggtgccctggagggcgcggctcaactccatcaagaacagctttctgggctcaccccgcttccaccgccggaaactgcaagttccgacgccggaggagatgtccaacctgacaccagagtcgtccccagagctggcgaagaagtcctggtttgggaacttcatcagcctggagaaggaggagcagatcttcgtggtcatcaaagacaaacctctgagctccatcaaggctgacatcgtgcacgccttcctgtcgattcccagtctcagccacagcgtcatctcccaaacgagcttccgggccgagtacaaggccacgggggggccagccgtgttccagaagccggtcaagttccaggttgatatcacctacacggagggtggggaggcgcagaaggagaacggcatctactccgtcaccttcaccctgctctcaggccccagccgtcgcttcaagagggtggtggagaccatccaggcccagctgctgagcacacacgacccgcctgcggcccagcacttgtcagaaccccccccaccagcgccaggactaagctggggtgctgggcttaagggccagaaggtggccaccagctacgagagtagcctctgacgctggcaggaattatcccgaaaagttaacatgtcacctccacgaggccatcctctgtgaccgaaggcagctgctgcggacccgccctccctccgctcctgctgttgctgccgggcagtgaggcccagcccagcgccccgtccaccccgcggcagctcctcgcctcagctccgcacggcccgtgggaggaaggccaggctcgggggagcctcctccagcccggccgacccggactcccggtcacctgacccctcagcaagaacagcctgcctggtggccttctggggccaggacccctggtgggcaacgtagccacaggaacaggccccgtccaccgcctccacgccgcacctggaggcctcctcgcaggcccgtgccccgcctccctggctgcgccgcctccgtgtagtcttggcctcctcaggctgcctcccgtcctctcgtctcacccgcgcctcccttgcctcatctggggcggctgtgggctctggcgctcctctctggctgaggtggaaacagagacaccctgcggcaccagagccttcccagcaggccaggccgctgggctgggatcagtgttatttatttgccgttttaatttatggattctccgcacctctgttcagggaagggcggcggccacatcccctgccgtctgcgtgtctcaggcagtgggggggctggggccagggcgccctctgaggacagagctggtggggcgcgggggggctggcgagctactgtaaactttaaagaattcctgcaagatatttttataaacttttttttcttggtggtttttggaaaagggtgtgggggtgggggcgccgctggggcagggccaggttttgtgttttagtcccttgctcctgcttctttctacacacacatctaaagacggtgcggctcgctctgtcatgggttccgtctctctgtggagaagcagctccacctctgggggggctcggggcagaggggcggtgtcttgtagcgggcggcagcgccagcgcccctctgtcaggctggggcaatcttggttttgtgtccaaaggtgaaggggtaggaggagggccctcagctggccctccccacacacaggacggcaggggcactgtgaggcttttcttattaaaatgaaaaaattgaaaaaaaaggacaaagagtcggtggcgctcctctgcagggcgttctgtgcagagcgaggcccagggcgcagccctcagagggctgcaggcccaccctgcccagtgcccgccgccgtgcttcaccccagctccagcttctgtgttcccttccgcccatgtgcccagccctcccaggcgggcacagcccgggtgcggcggccgtgggggacggcgggtctgatgcatgcctctgccatggagtcgtctgtctgcttcggtgcctgcccctgcctcccacccacctcgtgtatagattttaacgcttctgttaacattagacctctgccacaggctgggatttctatacataagaacaaaagcaaacacctaggacagcaaacgccaggcggtacaggcgggaaggggctctccacggagatcgaggacacgaagcaaactgcctcttgcttgccttccccttttgtgcttcggacacacgcggactccagcaggcgccacggaaatgggcaagcccctgcagtgtacccctgtcataactgtgagcagctgcagctccggaacaataaatcccttccgcaaagaca

SEQ ID NO: 8572 - protein, 674 aa, Homo sapiens
MTSTGKDGGAQHAQYVGPYRLEKTLGKGQTGLVKLGVHCVTCQKVAIKIVNREKLSESVLMKVEREIAILKLIEHPHVLKLHDVYENKKYLYLVLEHVSGGELFDYLVKKGRLTPKEARKFFRQIISALDFCHSHSICHRDLKPENLLLDEKNNIRIADFGMASLQVGDSLLETSCGSPHYACPEVIRGEKYDGRKADVWSCGVILFALLVGALPFDDDNLRQLLEKVKRGVFHMPHFIPPDCQSLLRGMIEVDAARRLTLEHIQKHIWYIGGKNEPEPEQPIPRKVQIRSLPSLEDIDPDVLDSMHSLGCFRDRNKLLQDLLSEEENQEKMIYFLLLDRKERYPSQEDEDLPPRNEIDPPRKRVDSPMLNRHGKRRPERKSMEVLSVTDGGSPVPARRAIEMAQHGQRSRSISGASSGLSTSPLSSPRVTPHPSPRGSPLPTPKGTPVHTPKESPAGTPNPTPPSSPSVGGVPWRARLNSIKNSFLGSPRFHRRKLQVPTPEEMSNLTPESSPELAKKSWFGNFISLEKEEQIFVVIKDKPLSSIKADIVHAFLSIPSLSHSVISQTSFRAEYKATGGPAVFQKPVKFQVDITYTEGGEAQKENGIYSVTFTLLSGPSRRFKRVVETIQAQLLSTHDPPAAQHLSEPPPPAPGLSWGAGLKGQKVATSYESSL

SEQ ID NO: 8573 - DNA, 5916 bp, Homo sapiens
tgttcggctcagctgcacggctcggctcggctcggctcggctcggctgcgcggccgctgacgggcgtgcgctgggggcgcggggcgcggggcgcgggcctcggcggcggcggcggcggcggcggcggaagccaggtgcccccgcccgccctgtcctctcgacgaggcggaggcgtcgccgcgggccaggcctcggactgccgcgtcggagtggacgcggggggcggcggcgcgggcggacgcgggcggcgcgaagcagcggggcccgcgggggcgccccggccgggtcggcgcggacggcactcggcggacgcgggcggacgctgggcggcccctccctgcccgcgcgcccgggcgcccctggccggcgccgggccccagagcgatgacatcgacggggaaggacggcggcgcgcagcacgcgcagtatgttgggccctaccggctggagaagacgctgggcaaggggcagacaggtctggtgaagctgggggttcactgcgtcacctgccagaaggtggccatcaagatcgtcaaccgtgagaagctcagcgagtcggtgctgatgaaggtggagcgggagatcgcgatcctgaagctcattgagcacccccacgtcctaaagctgcacgacgtttatgaaaacaaaaaatatttgtacctggtgctagaacacgtgtcaggtggtgagctcttcgactacctggtgaagaaggggaggctgacgcctaaggaggctcggaagttcttccggcagatcatctctgcgctggacttctgccacagccactccatatgccacagggatctgaaacctgaaaacctcctgctggacgagaagaacaacatccgcatcgcagactttggcatggcgtccctgcaggttggcgacagcctgttggagaccagctgtgggtccccccactacgcctgccccgaggtgatccggggggagaagtatgacggccggaaggcggacgtgtggagctgcggcgtcatcctgttcgccttgctggtgggggctctgcccttcgacgatgacaacttgcgacagctgctggagaaggtgaagcggggcgtgttccacatgccgcactttatcccgcccgactgccagagtctgctacggggcatgatcgaggtggacgccgcacgccgcctcacgctagagcacattcagaaacacatatggtatatagggggcaagaatgagcccgaaccagagcagcccattcctcgcaaggtgcagatccgctcgctgcccagcctggaggacatcgaccccgacgtgctggacagcatgcactcactgggctgcttccgagaccgcaacaagctgctgcaggacctgctgtccgaggaggagaaccaggagaagatgatttacttcctcctcctggaccggaaagaaaggtacccgagccaggaggatgaggacctgcccccccggaacgagatagaccctccccggaagcgtgtggactccccgatgctgaaccggcacggcaagcggcggccagaacgcaaatccatggaggtgctcagcgtgacggacggcggctccccggtgcctgcgcggcgggccattgagatggcccagcacggccagaggtctcggtccatcagcggtgcctcctcaggcctttccaccagcccactcagcagcccccgggtgacccctcacccctcaccaaggggcagtcccctccccacccccaaggggacacctgtccacacgccaaaggagagcccggctggcacgcccaaccccacgcccccgtccagccccagcgtcggaggggtgccctggagggcgcggctcaactccatcaagaacagctttctgggctcaccccgcttccaccgccggaaactgcaagttccgacgccggaggagatgtccaacctgacaccagagtcgtccccagagctggcgaagaagtcctggtttgggaacttcatcagcctggagaaggaggagcagatcttcgtggtcatcaaagacaaacctctgagctccatcaaggctgacatcgtgcacgccttcctgtcgattcccagtctcagccacagcgtcatctcccaaacgagcttccgggccgagtacaaggccacgggggggccagccgtgttccagaagccggtcaagttccaggttgatatcacctacacggagggtggggaggcgcagaaggagaacggcatctactccgtcaccttcaccctgctctcaggccccagccgtcgcttcaagagggtggtggagaccatccaggcccagctgctgagcacacacgacccgcctgcggcccagcacttgtcagaaccccccccaccagcgccaggactaagctggggtgctgggcttaagggccagaaggtggccaccagctacgagagtagcctctgacgctggcagacaccactaactgtatggaaatgatgacggggcggctttccaaatgtggtaagaatcccccacgctcacctggcacctccacctgccacttcaccgctcaccctcagcccgctgtggccgccacctgccgcccgggttgtcccggcctccctgtgtagatgtaggcacccagcagcccagatgtccccggccccatcctctaccaggagcagcccaggtcgctcccctaccacagcaagcccaggcggggttcctggccagactcacctctgccaggccctaggatcagggcaggcccaagaaggggctcccaaggcctgaagccagtgagggtcccgctggtcccactggtgcaggctgtggcctaggggaggggccggtgcccatccctctgtccactggaggctgtgcctggcagggagcggaggggcccacagctcagggctcaggtgggggttaggcttaggaagtgggattgaggggcctccatcgacacacctgggcagtgagcacagggccccaagaagggtgggctccccatttccgcccctcttctcaggactgcccccatcccagggacccgggacatgactctagctgcttgcccccagccccccagcctgcctcccacatccacccctccatgcttgtccacccatctgttcatctgtctgtctgctgctaaactgtgtccaagctggccaggggtcgggcttcaggcctctctggggaggtgtggtgggcacaccctctccctgtcatccactgggcctcatgcagtggggccagcagctgcccccagggtcctgcgaggcttcagagctcccagcaggcccttgtctttacgctgtcatctccggcgttggggtgggtcggccctcacggctgcaaggtggggagggaaggggggtggggcagggccttccgggccaggccttggtggggagggaggggtctcaccacctgccccgagcctcgcttcgccaaaggagcactgggtcctgcgcaacagctcggaggcgctggggtcctaagttcctggccccacggcgcacagcttccccaccgcacagcccccagcgtacagggcccctgccggccgccgcctgcccaccctgcttgccgcccaccggtccccgctcggccccatctcagcctcatctctgggttctttccctcgtcgaggcctcttcgttcatttgtttgtttgttctctttctctctccttccctcccctcctctttctctcccccttttttttcttttttcctttttttttttttttttgtctctgttctgtgtacccaggcagcccattgagtaacttctttgacgtaattaaacaacttttttcagacgagaagaacgggcaggcggcccaggcccccagcacgcccgccaagcggagtgcccacggcccactcggtgactccgcggccgctggccctggccccggaggggacgccgagtacccaacgggcaaggacacggccaagatgggcccgcccaccgcccgccgcgagcagccttagacacactagcccccccccccagcacagcactgacagcggctgcctcgccgcccgccgcccgccctgccccgagtggacccgcggccgcgccgcccgtccgtccagactgttctcagagcctgggaggaaaggaaaggggcgttggggccggcctgtgggctgcgccacccgcgcccgctctcttttctctctgtctctgcctctgcctgtctctgacagcatcgcttgtttccactctgataccaggaattatcccgaaaagttaacatgtcacctccacgaggccatcctctgtgaccgaaggcagctgctgcggacccgccctccctccgctcctgctgttgctgccgggcagtgaggcccagcccagcgccccgtccaccccgcggcagctcctcgcctcagctccgcacggcccgtgggaggaaggccaggctcgggggagcctcctccagcccggccgacccggactcccggtcacctgacccctcagcaagaacagcctgcctggtggccttctggggccaggacccctggtgggcaacgtagccacaggaacaggccccgtccaccgcctccacgccgcacctggaggcctcctcgcaggcccgtgccccgcctccctggctgcgccgcctccgtgtagtcttggcctcctcaggctgcctcccgtcctctcgtctcacccgcgcctcccttgcctcatctggggcggctgtgggctctggcgctcctctctggctgaggtggaaacagagacaccctgcggcaccagagccttcccagcaggccaggccgctgggctgggatcagtgttatttatttgccgttttaatttatggattctccgcacctctgttcagggaagggcggcggccacatcccctgccgtctgcgtgtctcaggcagtgggggggctggggccagggcgccctctgaggacagagctggtggggcgcgggggggctggcgagctactgtaaactttaaagaattcctgcaagatatttttataaacttttttttcttggtggtttttggaaaagggtgtgggggtgggggcgccgctggggcagggccaggttttgtgttttagtcccttgctcctgcttctttctacacacacatctaaagacggtgcggctcgctctgtcatgggttccgtctctctgtggagaagcagctccacctctgggggggctcggggcagaggggcggtgtcttgtagcgggcggcagcgccagcgcccctctgtcaggctggggcaatcttggttttgtgtccaaaggtgaaggggtaggaggagggccctcagctggccctccccacacacaggacggcaggggcactgtgaggcttttcttattaaaatgaaaaaattgaaaaaaaaggacaaagagtcggtggcgctcctctgcagggcgttctgtgcagagcgaggcccagggcgcagccctcagagggctgcaggcccaccctgcccagtgcccgccgccgtgcttcaccccagctccagcttctgtgttcccttccgcccatgtgcccagccctcccaggcgggcacagcccgggtgcggcggccgtgggggacggcgggtctgatgcatgcctctgccatggagtcgtctgtctgcttcggtgcctgcccctgcctcccacccacctcgtgtatagattttaacgcttctgttaacattagacctctgccacaggctgggatttctatacataagaacaaaagcaaacacctaggacagcaaacgccaggcggtacaggcgggaaggggctctccacggagatcgaggacacgaagcaaactgcctcttgcttgccttccccttttgtgcttcggacacacgcggactccagcaggcgccacggaaatgggcaagcccctgcagtgtacccctgtcataactgtgagcagctgcagctccggaacaataaatcccttccgcaaagaca

SEQ ID NO: 8574 - protein, 674 aa, Homo sapiens; identical to SEQ ID NO: 8572

SEQ ID NO: 8575 - DNA, 4186 bp, Homo sapiens
tgttcggctcagctgcacggctcggctcggctcggctcggctcggctgcgcggccgctgacgggcgtgcgctgggggcgcggggcgcggggcgcgggcctcggcggcggcggcggcggcggcggcggaagccaggtgcccccgcccgccctgtcctctcgacgaggcggaggcgtcgccgcgggccaggcctcggactgccgcgtcggagtggacgcggggggcggcggcgcgggcggacgcgggcggcgcgaagcagcggggcccgcgggggcgccccggccgggtcggcgcggacggcactcggcggacgcgggcggacgctgggcggcccctccctgcccgcgcgcccgggcgcccctggccggcgccgggccccagagcgatgacatcgacggggaaggacggcggcgcgcagcacgcgcagtatgttgggccctaccggctggagaagacgctgggcaaggggcagacaggtctggtgaagctgggggttcactgcgtcacctgccagaaggtggccatcaagatcgtcaaccgtgagaagctcagcgagtcggtgctgatgaaggtggagcgggagatcgcgatcctgaagctcattgagcacccccacgtcctaaagctgcacgacgtttatgaaaacaaaaaatatttgtacctggtgctagaacacgtgtcaggtggtgagctcttcgactacctggtgaagaaggggaggctgacgcctaaggaggctcggaagttcttccggcagatcatctctgcgctggacttctgccacagccactccatatgccacagggatctgaaacctgaaaacctcctgctggacgagaagaacaacatccgcatcgcagactttggcatggcgtccctgcaggttggcgacagcctgttggagaccagctgtgggtccccccactacgcctgccccgaggtgatccggggggagaagtatgacggccggaaggcggacgtgtggagctgcggcgtcatcctgttcgccttgctggtgggggctctgcccttcgacgatgacaacttgcgacagctgctggagaaggtgaagcggggcgtgttccacatgccgcactttatcccgcccgactgccagagtctgctacggggcatgatcgaggtggacgccgcacgccgcctcacgctagagcacattcagaaacacatatggtatatagggggcaagaatgagcccgaaccagagcagcccattcctcgcaaggtgcagatccgctcgctgcccagcctggaggacatcgaccccgacgtgctggacagcatgcactcactgggctgcttccgagaccgcaacaagctgctgcaggacctgctgtccgaggaggagaaccaggagaagatgatttacttcctcctcctggaccggaaagaaaggtacccgagccaggaggatgaggacctgcccccccggaacgagatagaccctccccggaagcgtgtggactccccgatgctgaaccggcacggcaagcggcggccagaacgcaaatccatggaggtgctcagcgtgacggacggcggctccccggtgcctgcgcggcgggccattgagatggcccagcacggccagaggtctcggtccatcagcggtgcctcctcaggcctttccaccagcccactcagcagcccccgggtgacccctcacccctcaccaaggggcagtcccctccccacccccaaggggacacctgtccacacgccaaaggagagcccggctggcacgcccaaccccacgcccccgtccagccccagcgtcggaggggtgccctggagggcgcggctcaactccatcaagaacagctttctgggctcaccccgcttccaccgccggaaactgcaagttccgacgccggaggagatgtccaacctgacaccagagtcgtccccagagctggcgaagaagtcctggtttgggaacttcatcagcctggagaaggaggagcagatcttcgtggtcatcaaagacaaacctctgagctccatcaaggctgacatcgtgcacgccttcctgtcgattcccagtctcagccacagcgtcatctcccaaacgagcttccgggccgagtacaaggccacgggggggccagccgtgttccagaagccggtcaagttccaggttgatatcacctacacggagggtggggaggcgcagaaggagaacggcatctactccgtcaccttcaccctgctctcaggccccagccgtcgcttcaagagggtggtggagaccatccaggcccagctgctgagcacacacgacccgcctgcggcccagcacttgtcagaaccccccccaccagcgccaggactaagctggggtgctgggcttaagggccagaaggtggccaccagctacgagagtagcctctgacgctggcagacaccactaactgtatggaaatgatgacggggcggctttccaaatgtggaattatcccgaaaagttaacatgtcacctccacgaggccatcctctgtgaccgaaggcagctgctgcggacccgccctccctccgctcctgctgttgctgccgggcagtgaggcccagcccagcgccccgtccaccccgcggcagctcctcgcctcagctccgcacggcccgtgggaggaaggccaggctcgggggagcctcctccagcccggccgacccggactcccggtcacctgacccctcagcaagaacagcctgcctggtggccttctggggccaggacccctggtgggcaacgtagccacaggaacaggccccgtccaccgcctccacgccgcacctggaggcctcctcgcaggcccgtgccccgcctccctggctgcgccgcctccgtgtagtcttggcctcctcaggctgcctcccgtcctctcgtctcacccgcgcctcccttgcctcatctggggcggctgtgggctctggcgctcctctctggctgaggtggaaacagagacaccctgcggcaccagagccttcccagcaggccaggccgctgggctgggatcagtgttatttatttgccgttttaatttatggattctccgcacctctgttcagggaagggcggcggccacatcccctgccgtctgcgtgtctcaggcagtgggggggctggggccagggcgccctctgaggacagagctggtggggcgcgggggggctggcgagctactgtaaactttaaagaattcctgcaagatatttttataaacttttttttcttggtggtttttggaaaagggtgtgggggtgggggcgccgctggggcagggccaggttttgtgttttagtcccttgctcctgcttctttctacacacacatctaaagacggtgcggctcgctctgtcatgggttccgtctctctgtggagaagcagctccacctctgggggggctcggggcagaggggcggtgtcttgtagcgggcggcagcgccagcgcccctctgtcaggctggggcaatcttggttttgtgtccaaaggtgaaggggtaggaggagggccctcagctggccctccccacacacaggacggcaggggcactgtgaggcttttcttattaaaatgaaaaaattgaaaaaaaaggacaaagagtcggtggcgctcctctgcagggcgttctgtgcagagcgaggcccagggcgcagccctcagagggctgcaggcccaccctgcccagtgcccgccgccgtgcttcaccccagctccagcttctgtgttcccttccgcccatgtgcccagccctcccaggcgggcacagcccgggtgcggcggccgtgggggacggcgggtctgatgcatgcctctgccatggagtcgtctgtctgcttcggtgcctgcccctgcctcccacccacctcgtgtatagattttaacgcttctgttaacattagacctctgccacaggctgggatttctatacataagaacaaaagcaaacacctaggacagcaaacgccaggcggtacaggcgggaaggggctctccacggagatcgaggacacgaagcaaactgcctcttgcttgccttccccttttgtgcttcggacacacgcggactccagcaggcgccacggaaatgggcaagcccctgcagtgtacccctgtcataactgtgagcagctgcagctccggaacaataaatcccttccgcaaagaca

SEQ ID NO: 8576 - protein, 674 aa, Homo sapiens; identical to SEQ ID NO: 8572

SEQ ID NO: 8577 - DNA, 4124 bp, Homo sapiens
gggggcgccgtgaaagcacccagcgtagtcatgctgctgtgtgcgatgggtgctgggcccgcagacttcggtgcttcaaaggcctcactgctgagcacgagacgccgcttttgatgtcgtcaggctctctggtccccgggagtggactcgggggctccgagtgcagggctcacactgtgtctttgagggctggtcacccacccaggcacacctgtggccctgagtcagcactgcctgacgcccaccctcaggagcccccgcctgcctagggtgggaccatgggggaggctggtcctccattctcaggggctgggggacaccccttctggttgagaaggccacaggtggcccccccgccacccggcaggcacagcagggcaccaccgagaccactgtggcctgaggaggagcttcagcagccacttggtaggagggccttcgacggcccttttgtgcagaaggtctggtgaagctgggggttcactgcgtcacctgccagaaggtggccatcaagatcgtcaaccgtgagaagctcagcgagtcggtgctgatgaaggtggagcgggagatcgcgatcctgaagctcattgagcacccccacgtcctaaagctgcacgacgtttatgaaaacaaaaaatatttgtacctggtgctagaacacgtgtcaggtggtgagctcttcgactacctggtgaagaaggggaggctgacgcctaaggaggctcggaagttcttccggcagatcatctctgcgctggacttctgccacagccactccatatgccacagggatctgaaacctgaaaacctcctgctggacgagaagaacaacatccgcatcgcagactttggcatggcgtccctgcaggttggcgacagcctgttggagaccagctgtgggtccccccactacgcctgccccgaggtgatccggggggagaagtatgacggccggaaggcggacgtgtggagctgcggcgtcatcctgttcgccttgctggtgggggctctgcccttcgacgatgacaacttgcgacagctgctggagaaggtgaagcggggcgtgttccacatgccgcactttatcccgcccgactgccagagtctgctacggggcatgatcgaggtggacgccgcacgccgcctcacgctagagcacattcagaaacacatatggtatatagggggcaagaatgagcccgaaccagagcagcccattcctcgcaaggtgcagatccgctcgctgcccagcctggaggacatcgaccccgacgtgctggacagcatgcactcactgggctgcttccgagaccgcaacaagctgctgcaggacctgctgtccgaggaggagaaccaggagaagatgatttacttcctcctcctggaccggaaagaaaggtacccgagccaggaggatgaggacctgcccccccggaacgagatagaccctccccggaagcgtgtggactccccgatgctgaaccggcacggcaagcggcggccagaacgcaaatccatggaggtgctcagcgtgacggacggcggctccccggtgcctgcgcggcgggccattgagatggcccagcacggccagaggtctcggtccatcagcggtgcctcctcaggcctttccaccagcccactcagcagcccccgggtgacccctcacccctcaccaaggggcagtcccctccccacccccaaggggacacctgtccacacgccaaaggagagcccggctggcacgcccaaccccacgcccccgtccagccccagcgtcggaggggtgccctggagggcgcggctcaactccatcaagaacagctttctgggctcaccccgcttccaccgccggaaactgcaagttccgacgccggaggagatgtccaacctgacaccagagtcgtccccagagctggcgaagaagtcctggtttgggaacttcatcagcctggagaaggaggagcagatcttcgtggtcatcaaagacaaacctctgagctccatcaaggctgacatcgtgcacgccttcctgtcgattcccagtctcagccacagcgtcatctcccaaacgagcttccgggccgagtacaaggccacgggggggccagccgtgttccagaagccggtcaagttccaggttgatatcacctacacggagggtggggaggcgcagaaggagaacggcatctactccgtcaccttcaccctgctctcaggccccagccgtcgcttcaagagggtggtggagaccatccaggcccagctgctgagcacacacgacccgcctgcggcccagcacttgtcagaaccccccccaccagcgccaggactaagctggggtgctgggcttaagggccagaaggtggccaccagctacgagagtagcctctgacgctggcaggaattatcccgaaaagttaacatgtcacctccacgaggccatcctctgtgaccgaaggcagctgctgcggacccgccctccctccgctcctgctgttgctgccgggcagtgaggcccagcccagcgccccgtccaccccgcggcagctcctcgcctcagctccgcacggcccgtgggaggaaggccaggctcgggggagcctcctccagcccggccgacccggactcccggtcacctgacccctcagcaagaacagcctgcctggtggccttctggggccaggacccctggtgggcaacgtagccacaggaacaggccccgtccaccgcctccacgccgcacctggaggcctcctcgcaggcccgtgccccgcctccctggctgcgccgcctccgtgtagtcttggcctcctcaggctgcctcccgtcctctcgtctcacccgcgcctcccttgcctcatctggggcggctgtgggctctggcgctcctctctggctgaggtggaaacagagacaccctgcggcaccagagccttcccagcaggccaggccgctgggctgggatcagtgttatttatttgccgttttaatttatggattctccgcacctctgttcagggaagggcggcggccacatcccctgccgtctgcgtgtctcaggcagtgggggggctggggccagggcgccctctgaggacagagctggtggggcgcgggggggctggcgagctactgtaaactttaaagaattcctgcaagatatttttataaacttttttttcttggtggtttttggaaaagggtgtgggggtgggggcgccgctggggcagggccaggttttgtgttttagtcccttgctcctgcttctttctacacacacatctaaagacggtgcggctcgctctgtcatgggttccgtctctctgtggagaagcagctccacctctgggggggctcggggcagaggggcggtgtcttgtagcgggcggcagcgccagcgcccctctgtcaggctggggcaatcttggttttgtgtccaaaggtgaaggggtaggaggagggccctcagctggccctccccacacacaggacggcaggggcactgtgaggcttttcttattaaaatgaaaaaattgaaaaaaaaggacaaagagtcggtggcgctcctctgcagggcgttctgtgcagagcgaggcccagggcgcagccctcagagggctgcaggcccaccctgcccagtgcccgccgccgtgcttcaccccagctccagcttctgtgttcccttccgcccatgtgcccagccctcccaggcgggcacagcccgggtgcggcggccgtgggggacggcgggtctgatgcatgcctctgccatggagtcgtctgtctgcttcggtgcctgcccctgcctcccacccacctcgtgtatagattttaacgcttctgttaacattagacctctgccacaggctgggatttctatacataagaacaaaagcaaacacctaggacagcaaacgccaggcggtacaggcgggaaggggctctccacggagatcgaggacacgaagcaaactgcctcttgcttgccttccccttttgtgcttcggacacacgcggactccagcaggcgccacggaaatgggcaagcccctgcagtgtacccctgtcataactgtgagcagctgcagctccggaacaataaatcccttccgcaaagaca

SEQ ID NO: 8578 - protein, 614 aa, Homo sapiens
MKVEREIAILKLIEHPHVLKLHDVYENKKYLYLVLEHVSGGELFDYLVKKGRLTPKEARKFFRQIISALDFCHSHSICHRDLKPENLLLDEKNNIRIADFGMASLQVGDSLLETSCGSPHYACPEVIRGEKYDGRKADVWSCGVILFALLVGALPFDDDNLRQLLEKVKRGVFHMPHFIPPDCQSLLRGMIEVDAARRLTLEHIQKHIWYIGGKNEPEPEQPIPRKVQIRSLPSLEDIDPDVLDSMHSLGCFRDRNKLLQDLLSEEENQEKMIYFLLLDRKERYPSQEDEDLPPRNEIDPPRKRVDSPMLNRHGKRRPERKSMEVLSVTDGGSPVPARRAIEMAQHGQRSRSISGASSGLSTSPLSSPRVTPHPSPRGSPLPTPKGTPVHTPKESPAGTPNPTPPSSPSVGGVPWRARLNSIKNSFLGSPRFHRRKLQVPTPEEMSNLTPESSPELAKKSWFGNFISLEKEEQIFVVIKDKPLSSIKADIVHAFLSIPSLSHSVISQTSFRAEYKATGGPAVFQKPVKFQVDITYTEGGEAQKENGIYSVTFTLLSGPSRRFKRVVETIQAQLLSTHDPPAAQHLSEPPPPAPGLSWGAGLKGQKVATSYESSL

SEQ ID NO: 8579 - DNA, 2905 bp, Homo sapiens
tctgaacagccacccaggcgcgctctgcctgagtctcgggctgtgctagaggcgcctctggccatggtcctctcacggctgggcttcctggcccccgcgctggtgggtggggttcgggtgctcttgagctggagagcagagggcctctgcatgttggggtgagcctgccagcaagacaggagtagccttctgtggcctcagaagcgcctccccactctcctgttggaagcgagttgcaggccccgcctgctcctgggggtggggggcacagctgacttcaggagcccagcttgagccacctctcacagcggccttggtgagggggggctcacctgtggggggctcacctgtggaggggcatccccagacttgggagtgggtggcatatgggccagggtcagggcgttagggcttggagaaaggttagggttggggttggggttagagccacggtgatggtcagggcatatgggctagggttagggcgttggggtcagggccatgggttctggctagcactgtggagacagccgtttctatcacgaagcgatggaagattccgccgttccaaccccagattcgagggaggcaggggtgtggacggtgccacacctcaatcctcacagcctctgtctcccactgcccaggctggcgaagaagtcctggtttgggaacttcatcagcctggagaaggaggagcagatcttcgtggtcatcaaagacaaacctctgagctccatcaaggctgacatcgtgcacgccttcctgtcgattcccagtctcagccacagcgtcatctcccaaacgagcttccgggccgagtacaaggccacgggggggccagccgtgttccagaagccggtcaagttccaggttgatatcacctacacggagggtggggaggcgcagaaggagaacggcatctactccgtcaccttcaccctgctctcaggccccagccgtcgcttcaagagggtggtggagaccatccaggcccagctgctgagcacacacgacccgcctgcggcccagcacttgtcagaaccccccccaccagcgccaggactaagctggggtgctgggcttaagggccagaaggtggccaccagctacgagagtagcctctgacgctggcagacaccactaactgtatggaaatgatgacggggcggctttccaaatgtggaattatcccgaaaagttaacatgtcacctccacgaggccatcctctgtgaccgaaggcagctgctgcggacccgccctccctccgctcctgctgttgctgccgggcagtgaggcccagcccagcgccccgtccaccccgcggcagctcctcgcctcagctccgcacggcccgtgggaggaaggccaggctcgggggagcctcctccagcccggccgacccggactcccggtcacctgacccctcagcaagaacagcctgcctggtggccttctggggccaggacccctggtgggcaacgtagccacaggaacaggccccgtccaccgcctccacgccgcacctggaggcctcctcgcaggcccgtgccccgcctccctggctgcgccgcctccgtgtagtcttggcctcctcaggctgcctcccgtcctctcgtctcacccgcgcctcccttgcctcatctggggcggctgtgggctctggcgctcctctctggctgaggtggaaacagagacaccctgcggcaccagagccttcccagcaggccaggccgctgggctgggatcagtgttatttatttgccgttttaatttatggattctccgcacctctgttcagggaagggcggcggccacatcccctgccgtctgcgtgtctcaggcagtgggggggctggggccagggcgccctctgaggacagagctggtggggcgcgggggggctggcgagctactgtaaactttaaagaattcctgcaagatatttttataaacttttttttcttggtggtttttggaaaagggtgtgggggtgggggcgccgctggggcagggccaggttttgtgttttagtcccttgctcctgcttctttctacacacacatctaaagacggtgcggctcgctctgtcatgggttccgtctctctgtggagaagcagctccacctctgggggggctcggggcagaggggcggtgtcttgtagcgggcggcagcgccagcgcccctctgtcaggctggggcaatcttggttttgtgtccaaaggtgaaggggtaggaggagggccctcagctggccctccccacacacaggacggcaggggcactgtgaggcttttcttattaaaatgaaaaaattgaaaaaaaaggacaaagagtcggtggcgctcctctgcagggcgttctgtgcagagcgaggcccagggcgcagccctcagagggctgcaggcccaccctgcccagtgcccgccgccgtgcttcaccccagctccagcttctgtgttcccttccgcccatgtgcccagccctcccaggcgggcacagcccgggtgcggcggccgtgggggacggcgggtctgatgcatgcctctgccatggagtcgtctgtctgcttcggtgcctgcccctgcctcccacccacctcgtgtatagattttaacgcttctgttaacattagacctctgccacaggctgggatttctatacataagaacaaaagcaaacacctaggacagcaaacgccaggcggtacaggcgggaaggggctctccacggagatcgaggacacgaagcaaactgcctcttgcttgccttccccttttgtgcttcggacacacgcggactccagcaggcgccacggaaatgggcaagcccctgcagtgtacccctgtcataactgtgagcagctgcagctccggaacaataaatcccttccgcaaagaca

SEQ ID NO: 8580 - protein, 192 aa, Homo sapiens
MEDSAVPTPDSREAGVWTVPHLNPHSLCLPLPRLAKKSWFGNFISLEKEEQIFVVIKDKPLSSIKADIVHAFLSIPSLSHSVISQTSFRAEYKATGGPAVFQKPVKFQVDITYTEGGEAQKENGIYSVTFTLLSGPSRRFKRVVETIQAQLLSTHDPPAAQHLSEPPPPAPGLSWGAGLKGQKVATSYESSL

SEQ ID NO: 8581 - DNA, 1072 bp, Homo sapiens
aagcgagttgcaggccccgcctgctcctgggggtggggggcacagctgacttcaggagcccagcttgagccacctctcacagcggccttggtgagggggggctcacctgtggggggctcacctgtggaggggcatccccagacttgggagtgggtggcatatgggccagggtcagggcgttagggcttggagaaaggttagggttggggttggggttagagccacggtgatggtcagggcatatgggctagggttagggcgttggggtcagggccatgggttctggctagcactgtggagacagccgtttctatcacgaagcgatggaagattccgccgttccaaccccagattcgagggaggcaggggtgtggacggtgccacacctcaatcctcacagcctctgtctcccactgcccaggctggcgaagaagtcctggtttgggaacttcatcagcctggagaaggaggagcagatcttcgtggtcatcaaagacaaacctctgagctccatcaaggctgacatcgtgcacgccttcctgtcgattcccagtctcagccacagcgtcatctcccaaacgagcttccgggccgagtacaaggccacgggggggccagccgtgttccagaagccggtcaagttccaggttgatatcacctacacggagggtggggaggcgcagaaggagaacggcatctactccgtcaccttcaccctgctctcaggccccagccgtcgcttcaagagggtggtggagaccatccaggcccagctgctgagcacacacgacccgcctgcggcccagcacttgtcagacaccactaactgtatggaaatgatgacggggcggctttccaaatgtggtaagaatcccccacgctcacctggcacctccacctgccacttcaccgctcaccctcagcccgctgtggccgccacctgccgcccgggttgtcccggcctccctgtgtagatgtaggcacccagcagcccagatgtccccggccccatcctctaccaggagcagcccaggtcgctcccctaccacagcaagcccaggcggggttcctg

SEQ ID NO: 8582 - protein, 216 aa, Homo sapiens
MEDSAVPTPDSREAGVWTVPHLNPHSLCLPLPRLAKKSWFGNFISLEKEEQIFVVIKDKPLSSIKADIVHAFLSIPSLSHSVISQTSFRAEYKATGGPAVFQKPVKFQVDITYTEGGEAQKENGIYSVTFTLLSGPSRRFKRVVETIQAQLLSTHDPPAAQHLSDTTNCMEMMTGRLSKCGKNPPRSPGTSTCHFTAHPQPAVAATCRPGCPGLPV

SEQ ID NO: 8583 - DNA, 1858 bp, Homo sapiens
actagagcacacccttgtcatggctggacccaacagtaagaggcaaacccagggtgtccatgtccctaggatgctccagcctgctctggggccacgagtctcacatgaggactggccgcccttgtgtacaggggcaagagggggccaggtccctgtcctggccaggctgttagccgcaggtacccacagagaccaccgccctcctctgctttccccggagaggggcttggcttctagcagtcagagcagggctctcccaaagggtggggcctggccggcgagccacagcacagcttcctgggaagagaaggagcctctgtgtgctttcaaaatacaacagaaaaacagcagcacgcacttgtgtaaacgaatacaactgaagccatgtagaagcggagaaaacgaagatgaccccttcatttaatcacacacctgtacagccatgtggctggcaggctccccagcgtgatcctggcgtagttctaagtcagcgcaggcagacccctccatagagtgcagtgtggtccccgcagacagtgtgtggggacagtgtgcatgtccagggagggagacacctgggtctgccacacctccgctgctggcgccacctctgcccgcagatgacctgagcgggtgggacccagtggctgggtgggtgtgcagcgggcgcatgccctgaccgtgtctctgtctccacagacagtactactggtatgacgagcgggggaagaaggtcaagtgcacggccccacagtacgttgacttcgtcatgagctccgtgcagaagctggtgacggatgaggacgtgttccccacaaaatacggcagagaattccccagctcctttgagtccctggtgaggaagatctgcagacacctgttccacgtgctggcacacatctactgggcccacttcaaggagacgctggccctggagctgcacggacacttgaacacgctctacgtccacttcatcctctttgctcgggagttcaacctgctggaccccaaagagaccgccatcatggacgacctcaccgaggtgctatgcagcggggccggcggggtccacagtgggggcagtggggatggggccggcagcgggggcccgggagcacagaaccacgtgaaggagagatgagccccccgggccggacaggggcacacgtgtgcaaagagacggtggtgtgtgttctctcctgcatctgcgtgtgcacacatgtgctgggcacgcgtgtggtgaggtctgagagggccccgggctgcactggtgtgggctgcacaggcacagacgcagacggccccggccgtgtcctgtggccccctgtcggatggatgcgtgccgtttgtagagaagagcctttgggcccattcactcgttcagcagacacgcatgggactgatgctttgagttttcttctgtggggttttcctttctctggtctccgtgcagcccctgccctccctcgggtgctgctggcctcaaaggaggaactcgtggggggagggtgtgatttgcagacctgggtctctgctctgctctgggggtggggcttgctttcacagagaccctccttccctctcacccctcctctcccggcctcgccaggagtcttggctgttggcagctcagaggtgggggaggcctgtggtgtgaggtgccctgcacctgctcctgctcctgtcaccccttcctgctgcctcctccatgcccaaggaacacccatggtgcagtcctcaggcaaggccaggacggggctgaggccctgcgtggagatgctgcaccagcggaaggctgagacccgcttaccttagttcatctgttcactcgtaataaaaagaattctctcaggtcaga

SEQ ID NO: 8584 - protein, 123 aa, Homo sapiens
MSSVQKLVTDEDVFPTKYGREFPSSFESLVRKICRHLFHVLAHIYWAHFKETLALELHGHLNTLYVHFILFAREFNLLDPKETAIMDDLTEVLCSGAGGVHSGGSGDGAGSGGPGAQNHVKER

SEQ ID NO: 8585 - DNA, 1503 bp, Homo sapiens
ctccccaccttcccgtcgcccactcatgctgggagaccactgcagtctccctgaagaccaagcccggcccggccagtccctgcaaagtggactctgctgcaaaatggtgcttcaggctgtcagcaaagtgctcaggaagtccaaagccaagcctaatggcaagaagcccgctgcggaggagaggaaggcctacctggagcctgagcacaccaaggccaggatcaccgacttccagttcaaggagctggtgccacgacgtttttccaccacatcaacctgcagtatagcaccatctccgagttctgcacaggagagacgtgtcagacgatggccgtgtgcaacacacagtactactggtatgacgagcgggggaagaaggtcaagtgcacggccccacagtacgttgacttcgtcatgagctccgtgcagaagctggtgacggatgaggacgtgttccccacaaaatacggcagagaattccccagctcctttgagtccctggtgaggaagatctgcagacacctgttccacgtgctggcacacatctactgggcccacttcaaggagacgctggccctggagctgcacggacacttgaacacgctctacgtccacttcatcctctttgctcgggagttcaacctgctggaccccaaagagaccgccatcatggacgacctcaccgaggtgctatgcagcggggccggcggggtccacagtgggggcagtggggatggggccggcagcgggggcccgggagcacagaaccacgtgaaggagagatgagccccccgggccggacaggggcacacgtgtgcaaagagacggtggtgtgtgttctctcctgcatctgcgtgtgcacacatgtgctgggcacgcgtgtggtgaggtctgagagggccccgggctgcactggtgtgggctgcacaggcacagacgcagacggccccggccgtgtcctgtggccccctgtcggatggatgcgtgccgtttgtagagaagagcctttgggcccattcactcgttcagcagacacgcatgggactgatgctttgagttttcttctgtggggttttcctttctctggtctccgtgcagcccctgccctccctcgggtgctgctggcctcaaaggaggaactcgtggggggagggtgtgatttgcagacctgggtctctgctctgctctgggggtggggcttgctttcacagagaccctccttccctctcacccctcctctcccggcctcgccaggagtcttggctgttggcagctcagaggtgggggaggcctgtggtgtgaggtgccctgcacctgctcctgctcctgtcaccccttcctgctgcctcctccatgcccaaggaacacccatggtgcagtcctcaggcaaggccaggacggggctgaggccctgcgtggagatgctgcaccagcggaaggctgagacccgcttaccttagttcatctgttcactcgtaataaaaagaattctctcaggtcaga

SEQ ID NO: 8586 - protein, 152 aa, Homo sapiens
MAVCNTQYYWYDERGKKVKCTAPQYVDFVMSSVQKLVTDEDVFPTKYGREFPSSFESLVRKICRHLFHVLAHIYWAHFKETLALELHGHLNTLYVHFILFAREFNLLDPKETAIMDDLTEVLCSGAGGVHSGGSGDGAGSGGPGAQNHVKER

SEQ ID NO: 8587 - DNA, 1553 bp, Homo sapiens
tctcctccccaccttcccgtcgcccactcatgctgggagaccactgcagtctccctgaagaccaagcccggcccggccagtccctgcaaagtggactctgctgcaaaatggtgcttcaggctgtcagcaaagtgctcaggaagtccaaagccaagcctaatggcaagaagcccgctgcggaggagaggaaggcctacctggagcctgagcacaccaaggccaggatcaccgacttccagttcaaggagctggtggtgctgccccgcgagattgaccttaacgagtggctggccagcaacaccacgacgtttttccaccacatcaacctgcagtatagcaccatctccgagttctgcacaggagagacgtgtcagacgatggccgtgtgcaacacacagtactactggtatgacgagcgggggaagaaggtcaagtgcacggccccacagtacgttgacttcgtcatgagctccgtgcagaagctggtgacggatgaggacgtgttccccacaaaatacggcagagaattccccagctcctttgagtccctggtgaggaagatctgcagacacctgttccacgtgctggcacacatctactgggcccacttcaaggagacgctggccctggagctgcacggacacttgaacacgctctacgtccacttcatcctctttgctcgggagttcaacctgctggaccccaaagagaccgccatcatggacgacctcaccgaggtgctatgcagcggggccggcggggtccacagtgggggcagtggggatggggccggcagcgggggcccgggagcacagaaccacgtgaaggagagatgagccccccgggccggacaggggcacacgtgtgcaaagagacggtggtgtgtgttctctcctgcatctgcgtgtgcacacatgtgctgggcacgcgtgtggtgaggtctgagagggccccgggctgcactggtgtgggctgcacaggcacagacgcagacggccccggccgtgtcctgtggccccctgtcggatggatgcgtgccgtttgtagagaagagcctttgggcccattcactcgttcagcagacacgcatgggactgatgctttgagttttcttctgtggggttttcctttctctggtctccgtgcagcccctgccctccctcgggtgctgctggcctcaaaggaggaactcgtggggggagggtgtgatttgcagacctgggtctctgctctgctctgggggtggggcttgctttcacagagaccctccttccctctcacccctcctctcccggcctcgccaggagtcttggctgttggcagctcagaggtgggggaggcctgtggtgtgaggtgccctgcacctgctcctgctcctgtcaccccttcctgctgcctcctccatgcccaaggaacacccatggtgcagtcctcaggcaaggccaggacggggctgaggccctgcgtggagatgctgcaccagcggaaggctgagacccgcttaccttagttcatctgttcactcgtaataaaaagaattctctcaggtcaga

SEQ ID NO: 8588 - protein, 268 aa, Homo sapiens
MLGDHCSLPEDQARPGQSLQSGLCCKMVLQAVSKVLRKSKAKPNGKKPAAEERKAYLEPEHTKARITDFQFKELVVLPREIDLNEWLASNTTTFFHHINLQYSTISEFCTGETCQTMAVCNTQYYWYDERGKKVKCTAPQYVDFVMSSVQKLVTDEDVFPTKYGREFPSSFESLVRKICRHLFHVLAHIYWAHFKETLALELHGHLNTLYVHFILFAREFNLLDPKETAIMDDLTEVLCSGAGGVHSGGSGDGAGSGGPGAQNHVKER

SEQ ID NO: 8589 - DNA, 1714 bp, Homo sapiens
ggatttctcctggctggggcacacccattggtgttcagtggaagtagaaacaattggaacaaacaaaatgtggaagcttaaagagaaaagaaggagatggtgggcagggcttccaggccacgtgtgatctgtggcactgcttggcctgtggactgtggccacagtcgcgttgctgtccctggctcccttctctttgaaggtctcctttgccagcgcacacggctccctgggctggaatgtctgttcattcatccctgcagttgtttgcggatgtcccggggctaacgtgagttagttaatgaagtccaaagccaagcctaatggcaagaagcccgctgcggaggagaggaaggcctacctggagcctgagcacaccaaggccaggatcaccgacttccagttcaaggagctggtggtgctgccccgcgagattgaccttaacgagtggctggccagcaacaccacgacgtttttccaccacatcaacctgcagtatagcaccatctccgagttctgcacaggagagacgtgtcagacgatggccgtgtgcaacacacagtactactggtatgacgagcgggggaagaaggtcaagtgcacggccccacagtacgttgacttcgtcatgagctccgtgcagaagctggtgacggatgaggacgtgttccccacaaaatacggcagagaattccccagctcctttgagtccctggtgaggaagatctgcagacacctgttccacgtgctggcacacatctactgggcccacttcaaggagacgctggccctggagctgcacggacacttgaacacgctctacgtccacttcatcctctttgctcgggagttcaacctgctggaccccaaagagaccgccatcatggacgacctcaccgaggtgctatgcagcggggccggcggggtccacagtgggggcagtggggatggggccggcagcgggggcccgggagcacagaaccacgtgaaggagagatgagccccccgggccggacaggggcacacgtgtgcaaagagacggtggtgtgtgttctctcctgcatctgcgtgtgcacacatgtgctgggcacgcgtgtggtgaggtctgagagggccccgggctgcactggtgtgggctgcacaggcacagacgcagacggccccggccgtgtcctgtggccccctgtcggatggatgcgtgccgtttgtagagaagagcctttgggcccattcactcgttcagcagacacgcatgggactgatgctttgagttttcttctgtggggttttcctttctctggtctccgtgcagcccctgccctccctcgggtgctgctggcctcaaaggaggaactcgtggggggagggtgtgatttgcagacctgggtctctgctctgctctgggggtggggcttgctttcacagagaccctccttccctctcacccctcctctcccggcctcgccaggagtcttggctgttggcagctcagaggtgggggaggcctgtggtgtgaggtgccctgcacctgctcctgctcctgtcaccccttcctgctgcctcctccatgcccaaggaacacccatggtgcagtcctcaggcaaggccaggacggggctgaggccctgcgtggagatgctgcaccagcggaaggctgagacccgcttaccttagttcatctgttcactcgtaataaaaagaattctctcaggtcaga

SEQ ID NO: 8590 - protein, 232 aa, Homo sapiens
MKSKAKPNGKKPAAEERKAYLEPEHTKARITDFQFKELVVLPREIDLNEWLASNTTTFFHHINLQYSTISEFCTGETCQTMAVCNTQYYWYDERGKKVKCTAPQYVDFVMSSVQKLVTDEDVFPTKYGREFPSSFESLVRKICRHLFHVLAHIYWAHFKETLALELHGHLNTLYVHFILFAREFNLLDPKETAIMDDLTEVLCSGAGGVHSGGSGDGAGSGGPGAQNHVKER

SEQ ID NO: 8591 - DNA, 2507 bp, Homo sapiens
tcgcccgacgggccctggtgcttcagccccgagggcgcacagggggcgggcggggtgctgtttgcgcccttcggccgggcgggcgccccgggaccaggcggcggcagcgacctgcggcggcgggaggcagcgagggctgagccccgggacgcgcggaccggctggcccgaggagccggccccggagacgcagttcaagcgccgcagctgccagatggagttcgaggagggcatggtggaggggcgcgcgcgcggcgaggagctggccgccctgggcaagcaggcgagcttctcgggcagcgtggaggtcatcgaggtgtcctgacccctccgctgccctcggccccgccgcccgcagccaggcccgttataaatgtatattatatataatgcaaagaaaggtaaatggttttactgggatttttatcgagaagtaaatatttcgattttttatttatttaagctgttcattctggcaatgatttggcaacagtgcgggtggtcctcgagctctatttttactgtctggtatttaaactgaaacatacgtttctaagcaatacgaggccaccttcagtcgcaagctgggtgccaggcctggggcccctcccagttcccccgccccaggaaacactgctgacctttgcaaaggctgccgagctttcgtgcactttttacataacaaaaaggtgaaaaaaaggaaaaaaaaacttctttgccacaaactgagccgcagaaccccccttctccccccacccacctcccctgctccctcccttctctgcgccggcctagggctctgcaccaaagccataggatggaggagcaggagctggtgtgccccggagaggtgcggccagccctccatcagctccaggcaccaaatcttggtggcaaggagggcaccccgctgcccgttgccccagagctgttctctggcaggggaggacaggcattgggcttcatggtgccagggtgttcagaggggctgagaaatagaacagtgtgtgtaggggcttcgggcagggggttctggaacgtcagatgaggtgcagcccaggggaggacagaggtgttagtgcccccaactcctgccagagccccagtccagccacagagtggctcagaaaggccattcctagagggctgcggccctcccttctcccttgcccatgcccccagagctgcctgccgggcagggtggcaccattgcaggagaggagcttggcctccgggggtcaggcaggaggcgcctggctagccagtgctggctccactgggcaggaagccctggacccccaggtatgaggagggggtggtcttagggttctgttccaggtctgccccgcccccctcccagccatgccccaggcagaacttggaattcaggtgtgcacctgcaggctgaggggctctgtgagcaggtgctgctcacacagggagttcaggcgccagccaagcccctgtgctgctgggataggcctgcttcacttagggagcactgcctcaagacaggtaaagccccctcgtttgcccccacccccatggggccgctcaggagagaaactcccattcacccctttcccagggtgctctctctctaggtggcatgccagcccccaaacacaagtggcttttgggcccaggtgggtcagcctgctgcccctgccccataccccctcgggccattgggacccctgcccttcagatgtcctagggtctaggagtggggccagtcactgtgggaagaggccaggggcttggccggagaggcagcccagggcaggacccagtcctgagtcctggagcagggccagggaggcgcccatcccgccccagccagccgccctctctgctgtttcttctatttgttcttcttttcacccacagtggttgggcccccttctcccttcccccttccccttgtcccttctgcaggccgttgaggggggctgtctgtctcagtctgtctctgctcccactcttgaggcactggttaccgcaaagtgagcagccagcaggggggcgaaggtcctgtgttggccactgcctcctccagtgctgcaggaggcgggctgaggccccacctggtggctttcacctgacccagccctgagtcctctccaagcctctctccggcccctcccacctggccactgcctcctccagtgctgcgggaggcgggccagggccccacctggtggctttcacctgacccagccctgagtcctctccaagcctctctccggcccctcccacctggccactgcctggcattgggatcgccccaaaatggacccggcccctcctgttatttgctgggaagtccagcggaggagagggtgcaggtcccccgctgagcctccagtctctgtagactgggctgccggcccttcagccccccttggagcccctcccgccacagccgcaccttctgctcccggcccctccctttgtatttggagacaatgtgttgtaataaagcttaaagtggatgttttccccacg

SEQ ID NO: 8592 - protein, 215 aa, Homo sapiens
MPQAELGIQVCTCRLRGSVSRCCSHREFRRQPSPCAAGIGLLHLGSTASRQVKPPRLPPPPWGRSGEKLPFTPFPGCSLSRWHASPQTQVAFGPRWVSLLPLPHTPSGHWDPCPSDVLGSRSGASHCGKRPGAWPERQPRAGPSPESWSRAREAPIPPQPAALSAVSSICSSFHPQWLGPLLPSPFPLSLLQAVEGGCLSQSVSAPTLEALVTAK

SEQ ID NO: 8593 - DNA, 2364 bp, Homo sapiens
aggtccagcaccatgtgctaggtcactcccagcgcgaggccacacctgggccgtcggagcagcccctcctcacttcaggggtcaccctccccagcacccattgccccaccatggctggggaccggctcccgaggaaggtgatggatgccaagaagctggccagcctgctgcggggcgggcctggggggccgctggtcatcgacagccgctccttcgtggagtacaacagctggcatgtgctcagctccgtcaacatctgctgctccaagctggtgaagcggcggctgcagcagggcaaggtgaccattgcggagctcatccagccggctgcacgcagccaggtggaggctacggagccacaggacgtggtggtctatgaccagagcacgcgggacgccagcgtgctggccgcagacagcttcctctccatcctgctgagcaagctggacggctgcttcgacagcgtggccatcctcactgggggcttcgccaccttctcctcctgcttccccggcctctgcgagggcaagcctgctgccctgctacccatgagcctctcccagccctgcctgcctgtgcccagcgtgggcctgacccgcatcctgcctcacctctacctgggctcgcagaaggacgtcctaaacaaggatctgatgacgcaaaatggaataagctacgtcctcaacgccagcaactcctgccccaagcctgacttcatctgcgagagccgcttcatgcgggtccccatcaacgacaactactgtgaaaaactgctgccctggctggacaagtccatcgagttcatcgataaagccaagctctccagctgccaagtcatcgtccactgtctggctggcatctcccgctctgccaccatcgccatcgcctacatcatgaagaccatgggcatgtcctccgacgacgcctacaggttcgtgaaggacaggcgcccgtccatctcgcccaacttcaacttcctgggccagctgctggagtacgagcgcagcctgaagctgctggccgccctgcagggcgacccgggcaccccctcagggacgccggagcctccgcccagtcctgccgccggggccccgctgccacggctgccaccacctacctcagagagcgctgccacagggaatgcggctgccagggagggcggcctgagcgcgggcggggagccccccgcgccccccacgcccccggcgaccagcgcactgcagcagggcctgcgcggcctgcacctctcctcggaccgcctgcaggacactaaccgcctcaagcgctccttctccctggacatcaagtctgcctacgcccctagcaggcggcccgacggccccgggccccccgaccccggcgaggccccgaagctctgcaagctggacagcccgtcgggggccgcgctgggcctgtcctcgcccagcccggacagcccggacgccgcgcctgaggcgcgcccacggccccgccggcggccccggccccccgccggctcccccgcgcgctcccccgcgcacagcctcggcctgaacttcggcgatgcggcccggcagactccgcggcacggcctctcggccctgtcggcgcccgggctgcccggccctggccagccggccggccccggggcctgggcaccgccgctcgactccccaggcacgccgtcgcccgacgggccctggtgcttcagccccgagggcgcacagggggcgggcggggtgctgtttgcgcccttcggccgggcgggcgccccgggaccaggcggcggcagcgacctgcggcggcgggaggcagcgagggctgagccccgggacgcgcggaccggctggcccgaggagccggccccggagacgcagttcaagcgccgcagctgccagatggagttcgaggagggcatggtggaggggcgcgcgcgcggcgaggagctggccgccctgggcaagcaggcgagcttctcgggcagcgtggaggtcatcgaggtgtcctgacccctccgctgccctcggccccgccgcccgcagccaggcccgttataaatgtatattatatataatgcaaagaaaggtaaatggttttactgggatttttatcgagaagtaaatatttcgattttttatttatttaagctgttcattctggcaatgatttggcaacagtgcgggtggtcctcgagctctatttttactgtctggtatttaaactgaaacatacgtttctaagcaatacgaggccaccttcagtcgcaagctgggtgccaggcctggggcccctcccagttcccccgccccaggaaacactgctgacctttgcaaaggctgccgagctttcgtgcactttttacataacaaaaaggtgaaaaaaagg

SEQ ID NO: 8594 - protein, 625 aa, Homo sapiens
MAGDRLPRKVMDAKKLASLLRGGPGGPLVIDSRSFVEYNSWHVLSSVNICCSKLVKRRLQQGKVTIAELIQPAARSQVEATEPQDVVVYDQSTRDASVLAADSFLSILLSKLDGCFDSVAILTGGFATFSSCFPGLCEGKPAALLPMSLSQPCLPVPSVGLTRILPHLYLGSQKDVLNKDLMTQNGISYVLNASNSCPKPDFICESRFMRVPINDNYCEKLLPWLDKSIEFIDKAKLSSCQVIVHCLAGISRSATIAIAYIMKTMGMSSDDAYRFVKDRRPSISPNFNFLGQLLEYERSLKLLAALQGDPGTPSGTPEPPPSPAAGAPLPRLPPPTSESAATGNAAAREGGLSAGGEPPAPPTPPATSALQQGLRGLHLSSDRLQDTNRLKRSFSLDIKSAYAPSRRPDGPGPPDPGEAPKLCKLDSPSGAALGLSSPSPDSPDAAPEARPRPRRRPRPPAGSPARSPAHSLGLNFGDAARQTPRHGLSALSAPGLPGPGQPAGPGAWAPPLDSPGTPSPDGPWCFSPEGAQGAGGVLFAPFGRAGAPGPGGGSDLRRREAARAEPRDARTGWPEEPAPETQFKRRSCQMEFEEGMVEGRARGEELAALGKQASFSGSVEVIEVS

SEQ ID NO: 8595 - DNA, 2123 bp, Homo sapiens
aggtccagcaccatgtgctaggtcactcccagcgcgaggccacacctgggccgtcggagcagcccctcctcacttcaggggtcaccctccccagcacccattgccccaccatggctggggaccggctcccgaggaaggtgatggatgccaagaagctggccagcctgctgcggggcgggcctggggggccgctggtcatcgacagccgctccttcgtggagtacaacagctggcatgtgctcagctccgtcaacatctgctgctccaagctggtgaagcggcggctgcagcagggcaaggtgaccattgcggagctcatccagccggctgcacgcagccaggtggaggctacggagccacaggacgtggtggtctatgaccagagcacgcgggacgccagcgtgctggccgcagacagcttcctctccatcctgctgagcaagctggacggctgcttcgacagcgtggccatcctcactgggggcttcgccaccttctcctcctgcttccccggcctctgcgagggcaagcctgctgccctgctacccatgagcctctcccagccctgcctgcctgtgcccagcgtgggcctgacccgcatcctgcctcacctctacctgggctcgcagaaggacgtcctaaacaaggatctgatgacgcaaaatggaataagctacgtcctcaacgccagcaactcctgccccaagcctgacttcatctgcgagagccgcttcatgcgggtccccatcaacgacaactactgtgaaaaactgctgccctggctggacaagtccatcgagttcatcgataaagccaagctctccagctgccaagtcatcgtccactgtctggctggcatctcccgctctgccaccatcgccatcgcctacatcatgaagaccatgggcatgtcctccgacgacgcctacaggttcgtgaaggacaggcgcccgtccatctcgcccaacttcaacttcctgggccagctgctggagtacgagcgcagcctgaagctgctggccgccctgcagggcgacccgggcaccccctcagggacgccggagcctccgcccagtcctgccgccggggccccgctgccacggctgccaccacctacctcagagagcgctgccacagggaatgcggctgccagggagggcggcctgagcgcgggcggggagccccccgcgccccccacgcccccggcgaccagcgcactgcagcagggcctgcgcggcctgcacctctcctcggaccgcctgcaggacactaaccgcctcaagcgctccttctccctggacatcaagtctgcctacgcccctagcaggcggcccgacggccccgggccccccgaccccggcgaggccccgaagctctgcaagctggacagcccgtcgggggccgcgctgggcctgtcctcgcccagcccggacagcccggacgccgcgcctgaggcgcgcccacggccccgccggcggccccggccccccgccggctcccccgcgcgctcccccgcgcacagcctcggcctgaacttcggcgatgcggcccggcagactccgcggcacggcctctcggccctgtcggcgcccgggctgcccggccctggccagccggccggccccggggcctgggcaccgccgctcgactccccaggcacgccgtcgcccgacgggccctggtgcttcagccccgagggcgcacagggggcgggcggggtgctgtttgcgcccttcggccgggcgggcgccccgggaccaggcggcggcagcgacctgcggcggcgggaggcagcgagggctgagccccgggacgcgcggaccggctggcccgaggagccggccccggagacgcagttcaagcgccgcagctgccagatggagttcgaggagggcatggtggaggggcgcgcgcgcggcgaggagctggccgccctgggcaagcaggcgagcttctcgggcagcgtggaggtcatcgaggtgtcctgacccctccgctgccctcggccccgccgcccgcagccaggcccgttataaatgtatattatatataatgcaaagaaaggtaaatggttttactgggatttttatcgagaagtaaatatttcgattttttatttattt

SEQ ID NO: 8596 - protein, 625 aa, Homo sapiens; identical to SEQ ID NO: 8594

SEQ ID NO: 8597 - DNA, 561 bp, Homo sapiens
gctgtgtgacacacaccctcagcaggagacccctgtggcctctgagcccacccctgcctgggcccagcgcgtgccgtgatggccagccacctcaacgccacctttacgggcatcctagcggcgtcctcagctggggggcttcgccaccttctcctcctgcttccccggcctctgcgagggcaagcctgctgccctgctacccatgagcctctcccagccctgcctgcctgtgcccagcgtgggcctgacccgcatcctgcctcacctctacctgggctcgcagaaggacgtcctaaacaaggatctgatgacgcaaaatggaataagctacgtcctcaacgccagcaactcctgccccaagcctgacttcatctgcgagagccgcttcatgcgggtccccatcaacgacaactactgtgaaaaactgctgccctggctggacaagtccatcgagttcatcgataaagccaagctctccagctgccaagtcatcgtccactgtctggctggcatctcccgctctgccaccatcgccatcgcctacatcatgaagaccatggg

SEQ ID NO: 8598 - protein, 118 aa, Homo sapiens
MSLSQPCLPVPSVGLTRILPHLYLGSQKDVLNKDLMTQNGISYVLNASNSCPKPDFICESRFMRVPINDNYCEKLLPWLDKSIEFIDKAKLSSCQVIVHCLAGISRSATIAIAYIMKT

SEQ ID NO: 8599 - DNA, 1626 bp, Homo sapiens
agacatttctaaaaggccccctccccgctgccgggtggagagggagcgtggggggatccgccttctgcccccgagcccccagccagcctgggccccccagggtcaccctggggctctgaagggggcttcggccgctggttgaatgaagggccacagaaaatgaagctggcgcaacgaccgcagaaccctcagtgggcaccaggaccacggagctcagggtgccaatggtgatggctgggggtggggagtactgtgggcagcaggggatgctgagcggggtttggggctccccctttccatactcagtcttcctgccagcctcagagctgagtacaccgttggcgattaataagcgcttgcagctcccttccctggccagcctgaggggagcggcagtggcccgtatggggtgggggtggcggtggagtgcgtcctggcgcagagctggcacacagcacaaacaaacgccttggcgggagtgggtctgtcccggaagggagcccaggggttattggggttggggctgcgccccaaagcgggagggccctgcgagaagggaggccctggctggagggggaccctgagactggaggtgccggacccggatgcggggccagatggagacaacaggaaggaaagagaccttcctggtcacacttgggccacaggagaacaggcagcggcccaggaggatccagggtcctgatggtggttgagaagctggttcttagtgatcactcagaaacgtcggcctggccttgtggggtcagaccttgcatctcagtcagcccagggagaagaagaagatggtccacacccaagtgcagggaacatcgtggcagtcggctgggtgcctgcgtccaggcgaggacacctcccgcatcagggaaacacacgtttctggagtgaggaggctgaaggcagggcccagaggagagctgagccatggaaggaggtgtgtgcatggatggtgagctagagcaggtgcaggtgcctcagggagaattgcttgaaccaaggaggcagaggttgtagtaagctgacattgtgccactgcactccaacaaccgagcgagaccctgtctcaaaaaaaaaatctataaaacattagtagctcttacaaattgacaagtagaatacaaacaaccaagtttttaaaaagatgattctctgataaacaaatggaagtgtgcaattaaaaatataaaaagtaaatcagactcactggtagtcagatacacgggatcttttctgtggagtcctaatgatggaaaaggagccaggttggttggaccaagggaaagcaaaaagagaaggcagatgaactacaagtctgcctttcttcctggtgcaggacttagccctcctatgcaaataactcacataactcacaatcttcctgcactcaacttatgacctcagttgatagaaaaatgcaaattagctcactgaaaccttggcattatcagcactgcatgtaaccctctccggcacaagcaccatcctataaaatccccagcaagcctttgtctcctggcagccagctcctcccttgctgacctgccctttccattcttgcaacgtattttcctacattctctaataaatctgcctttccttacctac

SEQ ID NO: 8600 - protein, 36 aa, Homo sapiens
MRGQMETTGRKETFLVTLGPQENRQRPRRIQGPDGG

SEQ ID NO: 8601 - DNA, 2176 bp, Homo sapiens
ggcgcatgccactacacccggctaatattttgtatttttagttgagacaggattttaccatgttggccaggctggtctcgatttcctgacctgtgatctgcctgcctcggcctcccaaagtgctgagattacaggcgtgagccactgtgcccagcccttggctactttttatatttttagtacagacagggtttcatcatgtcggccagtctggtcttgaactcctgaccttgtgatacactcacctcggcctcgcaaagtgctgggattacaggcgtgagccaccgtgcctggcccttggctactttttatatttttagtagagatggggtttcaccatgttggccagtctggtctcgaactcctgacctcaggtgatccgccctcctcggcctcccaaagcactgggattacaagcgtgagccactgtgcctggcccaatcatagttattttaaagcccttgtttcctaactccaatatgtggcttatctgtaatctgcttcttctgttagctttccgcatgattattgatcactgtttcctgctgtgtcctgtatctcgtgctttctgtcagaggtatgcctcaaaggaccgtgggggtccatatctagggaccgtggggggtccatatgtcgggaccgtgggggtgtctatatctcgggaccgtgggggtccatatctaaggaccgtgggggtccatatcttgggaccatggggggtctatatgtcaggaccgtgggggtctatatctaaggaccgtggggttctgtatctcaggaccgtgggggtccatatctagggaccgtgggggtccatatctagggaccgtggggggtccatatgtcgggaccgtgggggtgtctatatctcgggaccgtgggggtccatatctaaggactgtgggggtccatatcttggagcccccacaagaaccacaggcccccttggagcacccacaggagccacagccccctttgccacagctggagcaggaacaagctggcacacagcagcacatgggcttgcagcagcagacaggcacacagcagctggagccacatcccccacagccggaaccacagccacccttggatcccccacaagagccacagccccccttggagcccccacaggagccacaaccccccttggatcccccacaagagccacagccccccttgcagcctccacaggagccacagccccccttggagcccccagaagagccacagccccctttgccacagctggagcaggaacaggttggcacacggcagcacacgggcttgcagcagcagacgggcacacagcagctggagccagaacctccacagccagagccacagcccccacagccggagccacagcccccacagccggagccacagcccccacagctggagccacagcctccggagcagccgcaacagcccatggttctggtggattgagggtggagcaggtagaggagcaggtgagagggaggtgcaggtgtggagctccctgagcctggaccctttatatccctgcccagggtcatgtgtgaggctgggcacacatttcctggttcctgtttgtgccatttttagggcccctttttcttgtttcctctagaaatccgccccttggtgtatgggctgctcagtgggctgctgctctcttgctgaatctgtgtccagacttaatggaggcccccaagggtctagcctctccctgttgactccagagtcacactggatttacaaaagcatctattttaggctgggcatggtggctcacacctgtaatctcagcactttgggaggcctaggcaggtggatcacttgaggtgaggggttggagaccagcctggccaaaatggtgaaatctcgtgtctactaaaaacacaaaaattaactgggtgtggtggctcacatctgtaatcccagcactttgggaggccgaggcaggtggatcatttgaggtcaggagttggagaccagcctgcccaacatggcaaaaccccatctctactaaaaatacaaaaattagccaggcatggtggtgcatgcttgtaactccagctacttgggaggctgaggcaggagaatggcttgaacccagaggtgaaggttgcagtgagcagagatcacaccactgcactctagtgtgggcaacagagcgggactctgtctc

SEQ ID NO: 8602 - protein, 144 aa, Homo sapiens
MGLQQQTGTQQLEPHPPQPEPQPPLDPPQEPQPPLEPPQEPQPPLDPPQEPQPPLQPPQEPQPPLEPPEEPQPPLPQLEQEQVGTRQHTGLQQQTGTQQLEPEPPQPEPQPPQPEPQPPQPEPQPPQLEPQPPEQPQQPMVLVD

SEQ ID NO: 8603 - DNA, 975 bp, Homo sapiens
gggctgcaaggggggctgtggctcctgtggaggctccaaggggggctgtggctccagctgctgtgtgcccgtctgctgctcctccagctgtggctcctgtgggggttccaagggggtctgtggatttcgtgggggctccaaggggggctgcggttcttgtggctgctcccagtgcagctgctataagccctgctgctgctcctcaggctgtgggtcatcctgctgccagtccagctgctgcaagcccagctgctcccagtccagctgctgtaagccctgctgttcccagtccagctgctgtaagccctgctgctgctcctcaggctgtgggtcatcctgctgccagtccagctgctgcaaaccctgctgttcccagtccagctgctgtaagccctgctgctgctcctcaggctgtgggtcatcctgctgccagtccagctgctgcaagccctgctcctcccagtccagctgctgtgtcccaatttgctgccagtgcaagatctgaggctctgcccacaaacctcagtgggtcctacagatccgggctctccaggaatgattgcagctgtgtcctgaattcctgaagcacgtctctgaatctgtcctcctctggactaaggcagcctagcgtccagggctcagtactcagccgctcagcctctgaggtcatgagggcttctggcatgctgggtcctgcccatcaaccctcccggaatcccgtcttcctttcctgaccccaccacttcaaccttctcagggcttcaagatcccacatccctgagctgccaccgctccgattgcttttggagttgacctagaggactcggaattattggagaccccaggatcctctcctgaggaggaggggcgcccagtctcctcttctacctccgacctggccctgtttctttccccagggcttcgccttgtaagtgcctaggctagatcttctaaataaatacgatctgcacctcc

SEQ ID NO: 8604 - protein, 46 aa, Homo sapiens
GLLACWVLPINPPGIPSSFPDPTTSTFSGLQDPTSLSCHRSDCFWS

SEQ ID NO: 8605 - DNA, 680 bp, Homo sapiens
atggctacacagaatggactcagacacccatgctcacagccgtgcagtcacaatagcccaaaggtggaaacaacccagcagaacacactagagggtcccggcatcctgatgagtccactgtccccgcgatggttttcagggatggagaaggctccctgtcctccgctggaaccctgcagccgggctgacggtacccccaccacccacccaggggccccagaccctccccatctccaccgccaacccaggccccggctgcgcacgcggggccaggccgtgagctgctgtccccggatggggccgccccgggctggcctggctcactccgtgtcacagatattcccacagagaccccagcgagacctgcagaacattacagcagaatgaaggagagccagaggaagaggcagatgtgctggcctgtaaacagtctgatttccaatgtaaaccagattcaggcccacgacatcaggtaaacatctgcatcagagcccccggccccccaccgcccgggaggccccggggtccacacggccgactctgggacccgtcacagtgaccgccgagacatttcgtaattaggcaaaattgatccttgcattccttccctaaatcccaaatctctgcaattttacttcttctcaaaaatgaaaacatttggcaattagctgatccaagtg

SEQ ID NO: 8606 - protein, 128 aa, Homo sapiens
MATQNGLRHPCSQPCSHNSPKVETTQQNTLEGPGILMSPLSPRWFSGMEKAPCPPLEPCSRADGTPTTHPGAPDPPHLHRQPRPRLRTRGQAVSCCPRMGPPRAGLAHSVSQIFPQRPQRDLQNITAE

SEQ ID NO: 8607 - DNA, 1784 bp, Homo sapiens
gtggatgttggaagccgcagattcccatccagtatcctagaggaggagacccagggctgtgtcctaggaggcccaggaagcctggtcagcctggaggctgagggcgggcccgggagatctggtaaggacatcagtgtctccacgaagagcagcagggtctcagcccatggcagccgcaggccccatgactggggccgcagcctccagagccgccacagcagcccattgttctggggggtcaaaggtggaggctgtcagaggggcagtgcagggggctgctggggtgaagccccctgtagcagcagcacccagcctgctgtggctctgccctcctggaccccctgtcctcctggacccccttccctcctgggcccctctgccctcctggaccccctgccctcctggacccctcctggaccccctgcctgtcctgggtcctctgccctcctggaccccctgccctcctggaccccctgtctgtggcccctgctcccctcctccttccccgacacatgactggaccccccgatctgcagccggggtctgggcactgggggtcctgtgggcctctcggtgtctggggacaatcacaggttcccgtgcccacacccagcctctgcttccagaacacactagagggtcccggcatcctgatgagtccactgtccccgcgatggttttcagggatggagaaggctccctgtcctccgctggaaccctgcagccgggctgacggtacccccaccacccacccaggggcccccagaccctccccatctccaccgccaacccaggccccggctgcgcacgcggggccaggccgtgagctgctgtccccggatggggccgccccgggctggcctggctcactccgtgtcacagatattcccacagagaccccagcgagacctgcagaacattacagcagaatgaaggagagccagaggaagaggcagatgtgctggcctgtaaacagtctgatttccaatgtaaaccagattcaggcccacgacatcaggtaaacatctgcatcagagcccccggccccccaccgcccgggaggccccggggtccacacggccgactctgggacccgtcacagtgaccgccgagacatttcgtaattaggcaaaattgatccttgcattccttccctaaatcccaaatctctgcaattttacttcttctcaaaaatgaaaacatttggcaattagctgatccaagtgaaaaaggtagagaatgtgctctcaactggaaaatgccaattaaggaagcagctctgacttcccacccgccctggctaagctgggagcttatcttccccgagaagaatctgctgggataagggggcttgggaaacaccgagggcagggctgcctcctcacctcctcagcttcctctgagagcagattagccgtggccttgtgccagcagggcctgggtgccacaccgggtggcagcgggtggcagagccgggccccgctccggcactgggatttggggtggcgggacccagtggggcacccgcttgtgggcagcactgagggcggtgacgtaggcagcgggtgccggtgtctgcccctccatctggccgggctccccaccctgctcctgcagccctggacctcagggcccatttgcggtgcaaggcggctcttggtcggtctccactcctaaacatttatgcgttgaaaatgcccatttgtttgttttcttgtgttccatttatgtgttctgtatccttttttacttaatttaaataatttttaaatgtgaaatcgtta

SEQ ID NO: 8608 - protein, 188 aa, Homo sapiens
MAAAGPMTGAAASRAATAAHCSGGSKVEAVRGAVQGAAGVKPPVAAAPSLLWLCPPGPPVLLDPLPSWAPLPSWTPCPPGPLLDPLPVLGPLPSWTPCPPGPPVCGPCSPPPSPTHDWTPRSAAGVWALGVLWASRCLGTITGSRAHTQPLLPEHTRGSRHPDESTVPAMVFRDGEGSLSSAGTLQPG

SEQ ID NO: 8609 - DNA, 1239 bp, Homo sapiens
atggctacacagaatggactcagacacccatgctcacagccgtgcagtcacaatagcccaaaggtggaaacaacccagcagaacacactagagggtcccggcatcctgatgagtccactgtccccgcgatggttttcagggatggagaaggctccctgtcctccgctggaaccctgcagccgggctgacggtacccccaccacccacccaggggcccccagaccctccccatctccaccgccaacccaggccccggctgcgcacgcggggccaggccgtgagctgctgtccccggatggggccgccccgggctggcctggctcactccgtgtcacagatattcccacagagaccccagcgagacctgcagaacattacagcagaatgaaggagagccagaggaagaggcagatgtgctggcctgtaaacagtctgatttccaatgtaaaccagattcaggcccacgacatcaggtaaacatctgcatcagagcccccggccccccaccgcccgggaggccccggggtccacacggccgactctgggacccgtcacagtgaccgccgagacatttcgtaattaggcaaaattgatccttgcattccttccctaaatcccaaatctctgcaattttacttcttctcaaaaatgaaaacatttggcaattagctgatccaagtgaaaaaggtagagaatgtgctctcaactggaaaatgccaattaaggaagcagctctgacttcccacccgccctggctaagctgggagcttatcttccccgagaagaatctgctgggataagggggcttgggaaacaccgagggcagggctgcctcctcacctcctcagcttcctctgagagcagattagccgtggccttgtgccagcagggcctgggtgccacaccgggtggcagcgggtggcagagccgggccccgctccggcactgggatttggggtggcgggacccagtggggcacccgcttgtgggcagcactgagggcggtgacgtaggcagcgggtgccggtgtctgcccctccatctggccgggctccccaccctgctcctgcagccctggacctcagggcccatttgcggtgcaaggcggctcttggtcggtctccactcctaaacatttatgcgttgaaaatgcccatttgtttgttttcttgtgttccatttatgtgttctgtatccttttttacttaatttaaataatttttaaatgtgaaatcgtta

SEQ ID NO: 8610 - protein, 158 aa, Homo sapiens
MATQNGLRHPCSQPCSHNSPKVETTQQNTLEGPGILMSPLSPRWFSGMEKAPCPPLEPCSRADGTPTTHPGAPRPSPSPPPTQAPAAHAGPGRELLSPDGAAPGWPGSLRVTDIPTETPARPAEHYSRMKESQRKRQMCWPVNSLISNVNQIQAHDIR

SEQ ID NO: 8611 - DNA, 587 bp, Homo sapiens
cagaaatgaaaagtctgccttatggaagacaaggcaccgacgctttccctgacagcatcatcatcacccaactagggcagctgacccgcgtcttcctcacgacgtggaatggtttgagtcaagggttttcatggccatgagccacgtggaggctgtgccttttgtttcctgtgagaaatcttcaaccagcgccactctcagcctcccctctgccagcgcttctgtggctgcacctgcattcgtgggctgtggctgcgaagcacaggaataattgatggctctggggcactttgctgggctgcttccagaaaagttgacccctccctgcaaaccagcactgcccagcattcttgtcccgccaagcctgactgtgagctgttgtgacgttgccactttgctcggaaaggaccccttaccttttatttcccttgcatttctttcaattctaccattgaccatttctcatacgtgtggtcatcattgtatttcgcccccattttgtgaggtttagtgtattcttaaagtttcctgggttttgatgagagcatattctgtcattatatttaacaggtgttttccccagcttg

SEQ ID NO: 8612 - protein, 44 aa, Homo sapiens
MKSLPYGRQGTDAFPDSIIITQLGQLTRVFLTTWNGLSQGFSWP

SEQ ID NO: 8613 - DNA, 1453 bp, Homo sapiens
gccggtttccagagccttaaggagcccgctggagcggtggccagggcagggtagaaagatggggcacccaccagtctctcccagtgccccggccccagctggcaccacagctatacctgggcttattccagaccttgtcgccgggaccccctggccccgctgggctctcattgccggcgcccttgccgcgggcgtcctcctcgtctcctgcctcctctgtgctgcctgctgctgctgccgccgccacaggaagaagcccagggacaaggagtccgtgggtctgggcagtgcccgcggcaccaccaccacccacctggtgcaacctgatgtggatggcctggagtccagcccgggggatgctcagcaatgggggtgcctgcagctctccctggagttcgactttggaagccaggaggtgaagggccccgctgcgcaggaccagcggttctgcgagtttccggaaagggtgacgggggaagggcagaccccatgccctgggtggtggggagctgacagggcaggggcccttggctgagcccaccccgctggctcccagatcagggtgggcctgaggcaggcagccgacctgaggcctgggggcaccgtggacccctatgcccgggtcagcgtctccacccaggccggacacagacatgagacaaaagtgcaccgaggcacgctctgccccgtgtttgacgagacctgctgcttccacatcccgcaggcggagctgccaggggccaccctgcaggtgcagcttttcaacttcaagcgcttctcggggcatgagcccctgggtgagctccgtctgccactgggcaccgtggatctgcagcatgttctggagcactggtacctgctgggcccgccggctgccactcagcccgagcaggtcggggagctgtgcttctctctccggtacgtgcccagctcaggccggctgaccgtggtggtgctggaggctcgaggcctgcgtccaggacttgcagagccctacgtgaaggtccagctcatgctgaaccagaggaagtggaagaagagaaagacagccaccaaaaagggcacggcggccccctacttcaatgaggccttcaccttcctggtgcccttcagccaggtccagaatgtggacctggtgctggctgtctgggaccgcagcctgccgctccgaactgagcccgtaggcaaggtgcacctgggtgcccgggcctcggggcagcccctgcagcactgggcagacatgctggcccacgcccggcggcccattgcccagcggcaccccctgcggccagccagggaggtggaccgcatgctggccctgcagccccgccttcgcctgcgcctgcccttgccccactcctgaatgcaccacatgcctctgtctccccgctgagcccaggcacttgcccaggccgccctgcaggaccactgcaataaacgccttctcctgcca

SEQ ID NO: 8614 - protein, 158 aa, Homo sapiens
MGHPPVSPSAPAPAGTTAIPGLIPDLVAGTPWPRWALIAGALAAGVLLVSCLLCAACCCCRRHRKKPRDKESVGLGSARGTTTTHLVQPDVDGLESSPGDAQQWGCLQLSLEFDFGSQEVKGPAAQDQRFCEFPERVTGEGQTPCPGWWGADRAGALG

SEQ ID NO: 8615 - DNA, 3533 bp, Homo sapiens
ggcattgatgctgtgtgcgcgtgcgtgtgtgtgtgtgtgtgtgtgtgtgtgtgtgtgtgtgtgtgtgtgtgtctggagtcatggcagggtccctttctgtctgtctccttgctctgccccagactggggggctgcagaggtgagggtatctggcctcaacagctgcttattcccgatgggatggcctgggctgggcccctgaggccaggctgacttggacatggcaagaggggtcccaggctcttgtgggcaaagcaggggaggcgccaatgtggaggaacagagtctcctggctggctgctgctctctggagcgggtggagtcagggaagagctgagctggggagtcaccctgggcctggggtcaccgtaggccccatgtagcaccctggttcccctgcctgtaggtgacaggagccagcccagccaggtgtgctccctccccaggccctaggcaggcgggtacaggggccagcagctgcgcccgccccaccttccttcccacccacatgccgaagggtggccaggcaggcaggtggacgagtccaggcagcggctgagtcagtgtgtgtggaatgttctggccgctcccagctgcaccctgcccctacctgccaccacctcaccttcatcctcaggcgctgcggccctgagcccctgccaggaatgcacctttagcccaggcctgctcagtgagctccgccgacagccagccctgctcctcccgccatgaccctgcagacccctctgggcttccaagttcctgggggctgcagtgaacatgctccacctgcatggctggcaaaccatggtgggccccagctgtggtgcgtgctggggtagaggcaaggaagtgatgggaccgcagagatgagacccccagggatgagatgggacccccaggcagggcccagggtccagggcccaggagagagaagcagggagggagagagcttcctggtggaggacgcatcctacagtgggggcaagggtgctctgaggtccggtgaaggcagggactaggctgcccaggccctgcctgcttggctggggctgggggctgctgggaggtggctgggaggctgggcctgggcagctaagctggagctttggccagggtccagagcctccctcccttcagcttcctgctgcacagaaccctcgcccctggccaccccgtgctgcctccttgccctggcagacccagcactggctgctgctagtcagatggggtagcgggcaggggccggaggggccaccctcccagctgacccagcctcctgggccgcttcttccaaaccagcagggtagaaagatggggcacccaccagtctctcccagtgccccggccccagctggcaccacagctatacctgggcttattccagaccttgtcgccgggaccccctgtgagttgtgggattcccaagaggggtgtggggataacccagccaagtgggggctgcagctgtccacagatgcactcagcctggcctctaccccagggccccgctgggctctcattgccggcgcccttgccgcgggcgtcctcctcgtctcctgcctcctctgtgctgcctgctgctgctgccgccgccacaggaagaagcccagggacaaggagtccgtgggtctgggcagtgcccgcggcaccaccaccacccacctggtgaggagcggctccttgctcactcagtccagagagggcttgaaatccaggctccagagcccagggcagcgaggcgagttcagccccagggatggtttaacccccacagaggcagggcgttgaggaccttcctggcagggaaagtgggtgaacagaggtgagaaggaggccatgcaacaggggctgccccatgggcccgagggagccacagcgggttcttgaggaaggcagggggtaccccagatgccacgttttgggtgggtttggccggtctcacagagcgaagccgacgatttgtgcctgttgggtggcctggcctggaggcggggggtcttgacccatgtcatgcaagggctgcccgggagcccagggctctgatgaggcatgatgtcagcaccacctgccccttgtcccaactcactccaggtgcaacctgatgtggatggcctggagtccagcccgggggatgctcagcaatgggggtgcctgcagctctccctggagttcgactttggaagccaggaggtgaagggccccgctgcgcaggaccagcggttctgcgagtttccggaaagggtgacgggggaagggcagaccccatgccctgggtggtggggagctgacagggcaggggcccttggctgagcccaccccgctggctcccagatcagggtgggcctgaggcaggcagccgacctgaggcctgggggcaccgtggacccctatgcccgggtcagcgtctccacccaggccggacacagacatgagacaaaagtgcaccgaggcacgctctgccccgtgtttgacgagacctgctgcttccacgtgagtcagggatggtcggctgggtgggcctggacggctggatgggcctgggctgggtgggcctgggcagctgggtgggcctgggcagctgggtgggcctgagctagggcagcagggcctggctcacgccgctgcctcagatcccgcaggcggagctgccaggggccaccctgcaggtgcagcttttcaacttcaagcgcttctcggggcatgagcccctgggtgagctccgtctgccactgggcaccgtggatctgcagcatgttctggagcactggtacctgctgggcccgccggctgccactcaggtgaggtgctggtcaccaggccacagcccaaggcagagctggcagggaccctgccctatgggccatcggaaagacaggcctgatgggcagcattttcgggggtctgagccccaactcggccagaatcaccctcccgggctgaagcccctcttgctgcccacagcccgagcaggtcggggagctgtgcttctctctccggtacgtgcccagctcaggccggctgaccgtggtggtgctggaggctcgaggcctgcgtccaggacttgcagagccctacgtgaaggtccagctcatgctgaaccagaggaagtggaagaagagaaagacagccaccaaaaagggcacggcggccccctacttcaatgaggccttcaccttcctggtgcccttcagccaggtccagaatgtggacctggtgctggctgtctgggaccgcagcctgccgctccgaactgagcccgtaggcaaggtgcacctgggtgcccgggcctcggggcagcccctgcagcactgggcagacatgctggcccacgcccggcggcccattgcccagcggcaccccctgcggccagccagggaggtggaccgcatgctggccctgcagccccgccttcgcctgcgcctgcccttgccccactcctgaatgcaccacatgcctctgtctccccgctgagcccaggcacttgcccaggccgccctgcaggaccactgcaataaacgccttctcctgcc

SEQ ID NO: 8616 - protein, 116 aa, Homo sapiens
MLNQRKWKKRKTATKKGTAAPYFNEAFTFLVPFSQVQNVDLVLAVWDRSLPLRTEPVGKVHLGARASGQPLQHWADMLAHARRPIAQRHPLRPAREVDRMLALQPRLRLRLPLPHS

SEQ ID NO: 8617 - DNA, 1838 bp, Homo sapiens
gtggccaggcaggcaggtggacgagtccaggcagcggctgagtcagtgtgtgtggaatgttctggccgctcccagctgcaccctgcccctacctgccaccacctcaccttcatcctcaggcgctgcggccctgagcccctgccaggaatgcacctttagcccaggcctgctcagtgagctccgccgacagccagccctgctcctcccgccatgaccctgcagacccctctgggcttccaagttcctgggggctgcagtgaacatgctccacctgcatggctggcaaaccatgcagggtagaaagatggggcacccaccagtctctcccagtgccccggccccagctggcaccacagctatacctgggcttattccagaccttgtcgccgggaccccctggccccgctgggctctcattgccggcgcccttgccgcgggcgtcctcctcgtctcctgcctcctctgtgctgcctgctgctgctgccgccgccacaggaagaagcccagggacaaggagtccgtgggtctgggcagtgcccgcggcaccaccaccacccacctggtgcaacctgatgtggatggcctggagtccagcccgggggatgctcagcaatgggggtgcctgcagctctccctggagttcgactttggaagccaggaggtgaagggccccgctgcgcaggaccagcggttctgcgagtttccggaaagggtgacgggggaagggcagaccccatgccctgggtggtggggagctgacagggcaggggcccttggctgagcccaccccgctggctcccagatcagggtgggcctgaggcaggcagccgacctgaggcctgggggcaccgtggacccctatgcccgggtcagcgtctccacccaggccggacacagacatgagacaaaagtgcaccgaggcacgctctgccccgtgtttgacgagacctgctgcttccacgtgagtcagggatggtcggctgggtgggcctggacggctggatgggcctgggctgggtgggcctgggcagctgggtgggcctgggcagctgggtgggcctgagctagggcagcagggcctggctcacgccgctgcctcagatcccgcaggcggagctgccaggggccaccctgcaggtgcagcttttcaacttcaagcgcttctcggggcatgagcccctgggtgagctccgtctgccactgggcaccgtggatctgcagcatgttctggagcactggtacctgctgggcccgccggctgccactcagcccgagcaggtcggggagctgtgcttctctctccggtacgtgcccagctcaggccggctgaccgtggtggtgctggaggctcgaggcctgcgtccaggacttgcagagccctacgtgaaggtccagctcatgctgaaccagaggaagtggaagaagagaaagacagccaccaaaaagggcacggcggccccctacttcaatgaggccttcaccttcctggtgcccttcagccaggtccagaatgtggacctggtgctggctgtctgggaccgcagcctgccgctccgaactgagcccgtaggcaaggtgcacctgggtgcccgggcctcggggcagcccctgcagcactgggcagacatgctggcccacgcccggcggcccattgcccagcggcaccccctgcggccagccagggaggtggaccgcatgctggccctgcagccccgccttcgcctgcgcctgcccttgccccactcctgaatgcaccacatgcctctgtctccccgctgagcccaggcacttgcccaggccgccctgcaggaccactgcaataaacgccttctcctgcc

SEQ ID NO: 8618 - protein, 172 aa, Homo sapiens
MLHLHGWQTMQGRKMGHPPVSPSAPAPAGTTAIPGLIPDLVAGTPWPRWALIAGALAAGVLLVSCLLCAACCCCRRHRKKPRDKESVGLGSARGTTTTHLVQPDVDGLESSPGDAQQWGCLQLSLEFDFGSQEVKGPAAQDQRFCEFPERVTGEGQTPCPGWWGADRAGALG

SEQ ID NO: 8619 - DNA, 381 bp, Homo sapiens
atggggcacccaccagtctctcccagtgccccggccccagctggcaccacagctatacctgggcttattccagaccttgtcgccgggaccccctggccccgctgggctctcattgccggcgcccttgccgcgggcgtcctcctcgtctcctgcctcctctgtgctgcctgctgctgctgccgccgccacaggaagaagcccagggacaaggagtccgtgggtctgggcagtgcccgcggcaccaccaccacccacctggtgaggagcggctccttgctcactcagtccagagagggcttgaaatccaggctccagagcccagggcagcgaggcgagttcagccccagggatggtttaacccccacagaggcagggcgttga

SEQ ID NO: 8620 - protein, 126 aa, Homo sapiens
MGHPPVSPSAPAPAGTTAIPGLIPDLVAGTPWPRWALIAGALAAGVLLVSCLLCAACCCCRRHRKKPRDKESVGLGSARGTTTTHLVRSGSLLTQSREGLKSRLQSPGQRGEFSPRDGLTPTEAGR

SEQ ID NO: 8621 - DNA, 740 bp, Homo sapiens
cggcctgacctcgctcccagccctgctgcccagattctaggctccaagctcaggacctcaggatgggagatgaggagaagcggaacagggccatcacggcccgcaggcagcacctgaagagtgtgatgctgcagatagcggccacggagctggagaaggaggagagccgccgtgaggcagagaagcagaactacctggcggagcactgcccgccgctgcatatcccgggctccatgtctgaagtgcaggagctctgcaaacagctgcacgccaagatcgatgcggctgaagaggagaagtacgacatggaggtgagggtgcagaagaccagcaaggagctggaggacatgaaccagaagctatttgatctgcggggcaagttcaagcggcccccactgcggagggtgcgcatgtcggccgatgccatgctcaaggccctgctgggctcgaagcacaaggtgtgcatggacctgagggccaacctgaagcaggtcaagaaggaggacacagagaaggagcgggacctgcgagacgtgggtgactggaggaagaacatcgaggagaagtctggcatggagggccggaagaagatgtttgagtccgagtcctaggccactcgctgcccctacgcctgccccggtgcccggctcccagcagaacatactagggagatgcacccagagcctgccagggagggctggcctcaccaccaccgtcaataaaggatttgaatccccatg

SEQ ID NO: 8622 - protein, 182 aa, Homo sapiens; identical to SEQ ID NO: 1278

SEQ ID NO: 8623 - DNA, 747 bp, Homo sapiens
tcttacttctcaccctggggaattccaagacattgtccttgaaggaggctccaagctcaggacctcaggatgggagatgaggagaagcggaacagggccatcacggcccgcaggcagcacctgaagagtgtgatgctgcagatagcggccacggagctggagaaggaggagagccgccgtgaggcagagaagcagaactacctggcggagcactgcccgccgctgcatatcccgggctccatgtctgaagtgcaggagctctgcaaacagctgcacgccaagatcgatgcggctgaagaggagaagtacgacatggaggtgagggtgcagaagaccagcaaggagctggaggacatgaaccagaagctatttgatctgcggggcaagttcaagcggcccccactgcggagggtgcgcatgtcggccgatgccatgctcaaggccctgctgggctcgaagcacaaggtgtgcatggacctgagggccaacctgaagcaggtcaagaaggaggacacagagaaggagcgggacctgcgagacgtgggtgactggaggaagaacatcgaggagaagtctggcatggagggccggaagaagatgtttgagtccgagtcctaggccactcgctgcccctacgcctgccccggtgcccggctcccagcagaacatactagggagatgcacccagagcctgccagggagggctggcctcaccaccaccgtcaataaaggatttgaatccccatg

SEQ ID NO: 8624 - protein, 182 aa, Homo sapiens; identical to SEQ ID NO: 1278

SEQ ID NO: 8625 - DNA, 736 bp, Homo sapiens
ctcaccctggggaattccaagacattgtccttgaaggaggctccaagctcaggacctcaggatgggagagtaaaagcggaacagggccatcacggcccgcaggcagcacctgaagagtgtgatgctgcagatagcggccacggagctggagaaggaggagagccgccgtgaggcagagaagcagaactacctggcggagcactgcccgccgctgcatatcccgggctccatgtctgaagtgcaggagctctgcaaacagctgcacgccaagatcgatgcggctgaagaggagaagtacgacatggaggtgagggtgcagaagaccagcaaggagctggaggacatgaaccagaagctatttgatctgcggggcaagttcaagcggcccccactgcggagggtgcgcatgtcggccgatgccatgctcaaggccctgctgggctcgaagcacaaggtgtgcatggacctgagggccaacctgaagcaggtcaagaaggaggacacagagaaggagcgggacctgcgagacgtgggtgactggaggaagaacatcgaggagaagtctggcatggagggccggaagaagatgtttgagtccgagtcctaggccactcgctgcccctacgcctgccccggtgcccggctcccagcagaacatactagggagatgcacccagagcctgccagggagggctggcctcaccaccaccgtcaataaaggatttgaatccccatg

SEQ ID NO: 8626 - protein, 161 aa, Homo sapiens
MLQIAATELEKEESRREAEKQNYLAEHCPPLHIPGSMSEVQELCKQLHAKIDAAEEEKYDMEVRVQKTSKELEDMNQKLFDLRGKFKRPPLRRVRMSADAMLKALLGSKHKVCMDLRANLKQVKKEDTEKERDLRDVGDWRKNIEEKSGMEGRKKMFESES

SEQ ID NO: 8627 - DNA, 708 bp, Homo sapiens
ctggcaaagtgtcacacaccacacagcaccatgtcccagtgcaagaagcggaacagggccatcacggcccgcaggcagcacctgaagagtgtgatgctgcagatagcggccacggagctggagaaggaggagagccgccgtgaggcagagaagcagaactacctggcggagcactgcccgccgctgcatatcccgggctccatgtctgaagtgcaggagctctgcaaacagctgcacgccaagatcgatgcggctgaagaggagaagtacgacatggaggtgagggtgcagaagaccagcaaggagctggaggacatgaaccagaagctatttgatctgcggggcaagttcaagcggcccccactgcggagggtgcgcatgtcggccgatgccatgctcaaggccctgctgggctcgaagcacaaggtgtgcatggacctgagggccaacctgaagcaggtcaagaaggaggacacagagaaggagcgggacctgcgagacgtgggtgactggaggaagaacatcgaggagaagtctggcatggagggccggaagaagatgtttgagtccgagtcctaggccactcgctgcccctacgcctgccccggtgcccggctcccagcagaacatactagggagatgcacccagagcctgccagggagggctggcctcaccaccaccgtcaataaaggatttgaatccccatg

SEQ ID NO: 8628 - protein, 182 aa, Homo sapiens
MSQCKKRNRAITARRQHLKSVMLQIAATELEKEESRREAEKQNYLAEHCPPLHIPGSMSEVQELCKQLHAKIDAAEEEKYDMEVRVQKTSKELEDMNQKLFDLRGKFKRPPLRRVRMSADAMLKALLGSKHKVCMDLRANLKQVKKEDTEKERDLRDVGDWRKNIEEKSGMEGRKKMFESES

SEQ ID NO: 8629 - DNA, 1713 bp, Homo sapiens
gattaaaaaacaacaccctgacccaagccgagacaggttccaaacctcaacctgcagccggaagggggaagtgaaactcggctgggggtgggggctcagaagccgccccagaaagcactgaaagccacagcacgtacacccactccagggatctgccagcaccctgtggggcccagactacaggctgatggcggaggcttcgagtgacccgggtgccgaggagcgggaagagttgctggggcccactgctcagtggagcgtggaggacgaggaggaggccgtccacgagcaatgccagcatgagagagacaggcagcttcaggcccaggacgaggagggaggcggccatgtccccgagcggccgaagcaggagatgctcctcagcctgaagccctcggaggcccctgaactggatgaggacgagggctttggcgactggtcccagaggccagagcagcggcagcagcacgagggggcgcagggcgccttggacagcggagagcccccccagtgcaggagtcctgagggggagcaagaggacaggcccggcctgcatgcctacgaaaaggaggacagtgatgaagtccacctggaggagttgagtctgagcaaggaggggccaggcccagaggacactgtccaggacaacctgggggccgcaggggctgaggaggaacaggaggagcaccagaaatgtcagcagcccaggacacccagccccttggtcttggaggggaccatcgaacagagctcgcctcccctgagccctaccaccaaactcatcgacaggaccgagtccctaaaccgctccatagagaagagtaacagtgtgaagaaatcccagccagacttgcccatctccaagattgatcagtggctggaacaatacacccaggccatcgagaccgctggccggacccccaagctagcccgccaggcctccatagagctgcccagcatggctgtggccagtaccaagagtcggtgggagacgggtgaggtacaggctcagtctgcggccaagactccgtcctgcaaggatattgtggctggagacatgagcaagaaaagcctctgggagcagaagggaggctccaagacctcatcaacaattaagagcaccccatctgggaagaggtataagtttgtggccaccgggcatgggaagtatgagaaggtgcttgtggaagggggcccggctccctaggcgtcccatctcgcttcctgggtctgcaggtccagccggctggcaccctccatgtacccaggggagattccagccagacacccgccccccggccctggctaagaagttgcttcctgttgccagcatgacctaccctcgcctctttgatgccatccgctgccacctccttttgctcctggaccctttagcctctctgcccttccactctctgaccaccgcccccgccctccccacccagctccgcttcttgttacttgggggaggaaagaaactcctgatcattggccaaagggacttacccctggagaggccaagtgccttctaggaagttaggaggttgaggcacagcctgtgcagagagggtgggtcacccccccagatccaaggagaaactgcaggtcaagggctgataacggccatgcaggatgcttgatgctgcgtcccccgctgcttgccgccccccaccccgccattttgtataataaagctccctgtgtattctcatg

SEQ ID NO: 8630 - protein, 339 aa, Homo sapiens; identical to SEQ ID NO: 1286

SEQ ID NO: 8631 - DNA, 2018 bp, Homo sapiens
ggtcaggccaggtcgccgcctgagcagaggctgcagcctgggcagtcccgggcttctgaggaggaactctagcagacagggcctggatacctcttgagatgcagagagatggctccgatctggtccccacctggcagggtctccggctgtcacctgagttcaggaccagcaccaggatctgcagtgggcccctggctgggcacacctcatcccagcctccccctacccctggccccccataagcctcctcctcctgggcttccaggctctgctggtcagacctccctccctgcccaacgggaatgtgttttcccaggggacgctgctgtccaccaggagctctgtggcctgggatttgaggagtgcctggggtcaatcccccaggctcaccagtgctacttaacaaatgggcccaagagaaggaagtgcagcccccggaggaggggcagagcccctgcctggctgtgcggtggctcacccccttgtcaccaggggctcggccatgagcatccgtccagcgggcccagcaccaactgcagccccaggcccactgctcagtggagcgtggaggacgaggaggaggccgtccacgagcaatgccagcatgagagagacaggcagcttcaggcccaggacgaggagggaggcggccatgtccccgagcggccgaagcaggagatgctcctcagcctgaagccctcggaggcccctgaactggatgaggacgagggctttggcgactggtcccagaggccagagcagcggcagcagcacgagggggcgcagggcgccttggacagcggagagcccccccagtgcaggagtcctgagggggagcaagaggacaggcccggcctgcatgcctacgaaaaggaggacagtgatgaagtccacctggaggagttgagtctgagcaaggaggggccaggcccagaggacactgtccaggacaacctgggggccgcaggggctgaggaggaacaggaggagcaccagaaatgtcagcagcccaggacacccagccccttggtcttggaggggaccatcgaacagagctcgcctcccctgagccctaccaccaaactcatcgacaggaccgagtccctaaaccgctccatagagaagagtaacagtgtgaagaaatcccagccagacttgcccatctccaagattgatcagtggctggaacaatacacccaggccatcgagaccgctggccggacccccaagctagcccgccaggcctccatagagctgcccagcatggctgtggccagtaccaagagtcggtgggagacgggtgaggtacaggctcagtctgcggccaagactccgtcctgcaaggatattgtggctggagacatgagcaagaaaagcctctgggagcagaagggaggctccaagacctcatcaacaattaagagcaccccatctgggaagaggtataagtttgtggccaccgggcatgggaagtatgagaaggtgcttgtggaagggggcccggctccctaggcgtcccatctcgcttcctgggtctgcaggtccagccggctggcaccctccatgtacccaggggagattccagccagacacccgccccccggccctggctaagaagttgcttcctgttgccagcatgacctaccctcgcctctttgatgccatccgctgccacctccttttgctcctggaccctttagcctctctgcccttccactctctgaccaccgcccccgccctccccacccagctccgcttcttgttacttgggggaggaaagaaactcctgatcattggccaaagggacttacccctggagaggccaagtgccttctaggaagttaggaggttgaggcacagcctgtgcagagagggtgggtcacccccccagatccaaggagaaactgcaggtcaagggctgataacggccatgcaggatgcttgatgctgcgtcccccgctgcttgccgccccccaccccgccattttgtataataaagctccctgtgtattctcatg

SEQ ID NO: 8632 - protein, 467 aa, Homo sapiens
MAPIWSPPGRVSGCHLSSGPAPGSAVGPWLGTPHPSLPLPLAPHKPPPPGLPGSAGQTSLPAQRECVFPGDAAVHQELCGLGFEECLGSIPQAHQCYLTNGPKRRKCSPRRRGRAPAWLCGGSPPCHQGLGHEHPSSGPSTNCSPRPTAQWSVEDEEEAVHEQCQHERDRQLQAQDEEGGGHVPERPKQEMLLSLKPSEAPELDEDEGFGDWSQRPEQRQQHEGAQGALDSGEPPQCRSPEGEQEDRPGLHAYEKEDSDEVHLEELSLSKEGPGPEDTVQDNLGAAGAEEEQEEHQKCQQPRTPSPLVLEGTIEQSSPPLSPTTKLIDRTESLNRSIEKSNSVKKSQPDLPISKIDQWLEQYTQAIETAGRTPKLARQASIELPSMAVASTKSRWETGEVQAQSAAKTPSCKDIVAGDMSKKSLWEQKGGSKTSSTIKSTPSGKRYKFVATGHGKYEKVLVEGGPAP

SEQ ID NO: 8633 - DNA, 2642 bp, Homo sapiens
ataccccattttgcaaacaggaaagctgaggctcagggaggcaccaaagcttactcccatcctggggcttggcagggggtgcccgcagcacccggggacatacaccggggagtctcctgggaaagaagtgccggcccaggggcagactcttttctgctctgccatgtcttccctgcacccccagggatgatgagtctgggaggggctggtcagccatgaaagcttcggggaggggccggtggccaggccgggcaccccagagctccacaggcagacatggtgtgggggtgtcaggaagagggcctggctgctgggtgctacggtaggaagatcccggtgctgtgggagtggagcaggtggttgaatgccaggctggcttggtccttctctctgggtgccggctgtggctcccgcccaggtgggcaccacgtctgaataatgtatgaagcctctggttgcgtggaggatgggagcgcttcgggcagcatctgtgggcagagacttcagggatgtgaggtacatctgggcatggctagctgggaaggaaagaggatggcagagcctcgagccgttgccagggactggttgcgtgtcccagaacgtgccaaaagcctgcctcgtgagcacggcaagagctctgccagggcagtcccagctggcccaggcgccgcagcgctcccgagggccgtcgagcaaaggcgggaggcgcagccgggctgtcggtggacctgtaggtatcagggctccttggtcccctcctgcgggaagcaggcaccgagtggggctgcatgtagacgcatgcgagggtgagagctgcggcggaggacgctgatcgcggagtgcaggcgagggccccagaaaggtcccgcaggtcgcctcgctcgtggcacgggctcggcagcgttgtggttagtgacacggaggaagacagaaagccatatgcacagcacgcagaacaggaggaggggggaagaaagagcaggcacggggcaggcagagccgcagccacgccgccgggatgcagcaggcagggccacccacgagcagggcggggccctaacctccgacccaggctggtcgccgcagatgggggcagagatgtgaaacagctgcagagcgggacaagggtgctgccggcacagggctgaccacagagcacatcaaaagaggcccactgctcagtggagcgtggaggacgaggaggaggccgtccacgagcaatgccagcatgagagagacaggcagcttcaggcccaggacgaggagggaggcggccatgtccccgagcggccgaagcaggagatgctcctcagcctgaagccctcggaggcccctgaactggatgaggacgagggctttggcgactggtcccagaggccagagcagcggcagcagcacgagggggcgcagggcgccttggacagcggagagcccccccagtgcaggagtcctgagggggagcaagaggacaggcccggcctgcatgcctacgaaaaggaggacagtgatgaagtccacctggaggagttgagtctgagcaaggaggggccaggcccagaggacactgtccaggacaacctgggggccgcaggggctgaggaggaacaggaggagcaccagaaatgtcagcagcccaggacacccagccccttggtcttggaggggaccatcgaacagagctcgcctcccctgagccctaccaccaaactcatcgacaggaccgagtccctaaaccgctccatagagaagagtaacagtgtgaagaaatcccagccagacttgcccatctccaagattgatcagtggctggaacaatacacccaggccatcgagaccgctggccggacccccaagctagcccgccaggcctccatagagctgcccagcatggctgtggccagtaccaagagtcggtgggagacgggtgaggtacaggctcagtctgcggccaagactccgtcctgcaaggatattgtggctggagacatgagcaagaaaagcctctgggagcagaagggaggctccaagacctcatcaacaattaagagcaccccatctgggaagaggtataagtttgtggccaccgggcatgggaagtatgagaaggtgcttgtggaagggggcccggctccctaggcgtcccatctcgcttcctgggtctgcaggtccagccggctggcaccctccatgtacccaggggagattccagccagacacccgccccccggccctggctaagaagttgcttcctgttgccagcatgacctaccctcgcctctttgatgccatccgctgccacctccttttgctcctggaccctttagcctctctgcccttccactctctgaccaccgcccccgccctccccacccagctccgcttcttgttacttgggggaggaaagaaactcctgatcattggccaaagggacttacccctggagaggccaagtgccttctaggaagttaggaggttgaggcacagcctgtgcagagagggtgggtcacccccccagatccaaggagaaactgcaggtcaagggctgataacggccatgcaggatgcttgatgctgcgtcccccgctgcttgccgccccccaccccgccattttgtataataaagctccctgtgtattctcatg

SEQ ID NO: 8634 - protein, 277 aa, Homo sapiens; identical to SEQ ID NO: 1280

SEQ ID NO: 8635 - DNA, 2020 bp, Homo sapiens
ctccaagtcagcagccttgggcagagtggggttcagcggtcaccatagtcaggcccttggccacccccaccaagggccccagctatccaggggctccccctgccacatgggaggcctgagaagtcggggcttaggaggacctcatgtagggtcctcatgtggggaccagggcagcccttggggagccccaggatgatgggggaggcacagccctgccctagggagccccagactgatgggggaagcacagccctgctgttagggagccacaggctgacgggggaggcccagccctgccctagcgagtcccagagtgatgggggaggcacagccctgctcttagggagccacaggctgacaggggaggcacagccctgtcctcagggagccctacactgatcgaagaggcacagccttaccctcagggagccccaaactgatgagggaggcatagccctgccctcaggtagccccaggctgatggaggaggcatagccctgctgagcctcaaggagtcctggactgatggaggaagcacagttctcaggctgccccagaactgacgggggaggcatagccctgccctcaggtattctgaccacaggagacacagcccagagccagctctgtggcagacagggtctcccacacttggagtccagggcctgagcgggcgccgtgagcctcagcctgaagccctcggaggcccctgaactggatgaggacgagggctttggcgactggtcccagaggccagagcagcggcagcagcacgagggggcgcagggcgccttggacagcggagagcccccccagtgcaggagtcctgagggggagcaagaggacaggcccggcctgcatgcctacgaaaaggaggacagtgatgaagtccacctggaggagttgagtctgagcaaggaggggccaggcccagaggacactgtccaggacaacctgggggccgcaggggctgaggaggaacaggaggagcaccagaaatgtcagcagcccaggacacccagccccttggtcttggaggggaccatcgaacagagctcgcctcccctgagccctaccaccaaactcatcgacaggaccgagtccctaaaccgctccatagagaagagtaacagtgtgaagaaatcccagccagacttgcccatctccaagattgatcagtggctggaacaatacacccaggccatcgagaccgctggccggacccccaagctagcccgccaggcctccatagagctgcccagcatggctgtggccagtaccaagagtcggtgggagacgggtgaggtacaggctcagtctgcggccaagactccgtcctgcaaggatattgtggctggagacatgagcaagaaaagcctctgggagcagaagggaggctccaagacctcatcaacaattaagagcaccccatctgggaagaggtataagtttgtggccaccgggcatgggaagtatgagaaggtgcttgtggaagggggcccggctccctaggcgtcccatctcgcttcctgggtctgcaggtccagccggctggcaccctccatgtacccaggggagattccagccagacacccgccccccggccctggctaagaagttgcttcctgttgccagcatgacctaccctcgcctctttgatgccatccgctgccacctccttttgctcctggaccctttagcctctctgcccttccactctctgaccaccgcccccgccctccccacccagctccgcttcttgttacttgggggaggaaagaaactcctgatcattggccaaagggacttacccctggagaggccaagtgccttctaggaagttaggaggttgaggcacagcctgtgcagagagggtgggtcacccccccagatccaaggagaaactgcaggtcaagggctgataacggccatgcaggatgcttgatgctgcgtcccccgctgcttgccgccccccaccccgccattttgtataataaagctccctgtgtattctcatgtg

SEQ ID NO: 8636 - protein, 123 aa, Homo sapiens
MGSMRRCLWKGARLPRRPISLPGSAGPAGWHPPCTQGRFQPDTRPPALAKKLLPVASMTYPRLFDAIRCHLLLLLDPLASLPFHSLTTAPALPTQLRFLLLGGGKKLLIIGQRDLPLERPSAF

SEQ ID NO: 8637 - DNA, 466 bp, Homo sapiens
gcctcagcctgaagccctcggaggcccctgaactggatgaggacgagggctttggcgactggtcccagaggccagagcagcggcacatgacctaccctcgcctctttgatgccatccgctgccacctccttttgctcctggaccctttagcctctctgcccttccactctctgaccaccgcccccgccctccccacccagctccgcttcttgttacttgggggaggaaagaaactcctgatcattggccaaagggacttacccctggagaggccaagtgccttctaggaagttaggaggttgaggcacagcctgtgcagagagggtgggtcacccccccagatccaaggagaaactgcaggtcaagggctgataacggccatgcaggatgcttgatgctgcgtcccccgctgcttgccgccccccaccccgccattttgtataataaagctccctgtgtattctca

SEQ ID NO: 8638 - protein, 66 aa, Homo sapiens [sequence omitted]

SEQ ID NO: 8639 - DNA, 715 bp, Homo sapiens
tccagtgacttagaatgcctgaccatgtgggaatgcagcccagtaggactcagtctcattttacccagcccctgttcaagatggagtcgctctggttcacacgcctcagacacagctactcaggaggctgagatgggaggatcacctgagcctgggaggttgaggctgcagtcagccgtggtggtgtcattgcactccagcctgggcaacacagtgagaccctatctgagaaaaaaagaagaagaagaagaagaagaaatacaacgtgatggcttcatctgagttgagggctctgtgcagctcctttgtggtggaatcctctgctctgctggcagggacgtttcatcataagtgtgtgttctgtatatccaggtgcaagtgatattttaaaatataaaactattgtttaaatttcatgtaagtagcatgatttttccttttgcaactctttcacccccaccccaatgtggttgctgtgtccgggacttcgccattggtggctcacagccgcaggtcagctgtaatcgtgcagaacccatctatgaatacacgacggtgtacctgtccattctcctcttggtgaatgtgtggaggttttctgattctttgcagtgaccaacagcaatctgtgcccagcaatgcaaatgccggactgagggatgcaccctgcacgctggccaagatgtcactgggcgccattgtggtgttttttttt

SEQ ID NO: 8640 - protein, 85 aa, Homo sapiens
MWECSPVGLSLILPSPCSRWSRSGSHASDTATQEAEMGGSPEPGRLRLQSAVVVSLHSSLGNTVRPYLRKKEEEEEEEIQRDGFI

SEQ ID NO: 8641 - DNA, 1053 bp, Homo sapiens
tccgttctgctggaacacaaacgcgcttctcagtttctctggaggaacttggttggcgaagagcttggcgcttcttgtaaaccttgtcccgctggacaaagacttgtgaaggaacacggagtgccaccaggactccgtggccctccccgcctctctctcctttttcccttcatggcggtgaagctgtggacgcttctcttcaggaggtgagctccagatgagacgccacatcccagcggagtcccggaagggtcaccccgcaggtctaaggcccgcctgttctgtgccgtgacctgtgctaccgaagtcatctgttgctgtagggaggccagggactcagccgatgcctcaatggccaactgcagggatctgtgaacaagaggaacctcagcagccaggacaggcaggagcagtggaatagctactatggcttctggaatcctggttaatgtaaaggaggaggtgacctgccccatctgcctggaactcctgacacaacccctgagcctggactgcggccacagcttctgccaagcatgcctcactgcaaaccacaagaagtccatgctagacaaaggagagagtagctgccctgtgtgccggatcagttaccagcctgagaacatacggcctaatcggcatgtagccaacatagtggagaagctcagggaggtcaagttgagcccagaggggcagaaagttgatcattgtgcacgccatggagagaaacttctactcttctgtcaggaggacgggaaggtcatttgctggctttgtgagcggtctcaggagcaccgtggtcaccacacgttcctcacagaggaggttgcccgggagtaccaagtgaagctccaggcagctctggagatgctgaggcagaagcagcaggaagctgaagagttagaagctgacatcagagaagagaaagcttcctggaagactcaaatacagtatgacaaaaccaacgtcttggcagattttgagcaactgagagacatcctggactgggaggagagcaatgagctgcaaaacctggagaaggaggaggaagac

SEQ ID NO: 8642 - protein, 208 aa, Homo sapiens
MASGILVNVKEEVTCPICLELLTQPLSLDCGHSFCQACLTANHKKSMLDKGESSCPVCRISYQPENIRPNRHVANIVEKLREVKLSPEGQKVDHCARHGEKLLLFCQEDGKVICWLCERSQEHRGHHTFLTEEVAREYQVKLQAALEMLRQKQQEAEELEADIREEKASWKTQIQYDKTNVLADFEQLRDILDWEESNELQNLEKEEE

SEQ ID NO: 8643 - DNA, 428 bp, Homo sapiens
ctaaggcccgcctgttctgtgccgtgacctgtgctaccgaagtcatctgttgctgtagggaggccagggactcagccgatgcctcaatggccaactgcagctttcccaatcttggtgagaccaaagcagttgatgaatggataaagtggataaataccttcattcaggctcttccataactgtgccattggcggttcagtccggctgatctagcaggggtattgtgcttacaataaaaatggcttggggatggttccataaagtagtagggatatagggaaccaagttacaactggcaacattaaattcactcagacaatgagggaaacagagaataaaactttacagaccaaatatgttaatgcctatgtaattgtatttgaatattgacatgtgatacccacccaccaccttaaataaacacatac

SEQ ID NO: 8644 - protein, 30 aa, Homo sapiens
MANCSFPNLGETKAVDEWIKWINTFIQALP

SEQ ID NO: 8645 - DNA, 939 bp, Homo sapiens; identical to SEQ ID NO: 1289

SEQ ID NO: 8646 - protein, 312 aa, Homo sapiens; identical to SEQ ID NO: 1290

SEQ ID NO: 8647 - DNA, 996 bp, Homo sapiens
atggccaccaatatgcttcataccaacaatacacagtttcacccttccaccttcctcgtagtgggggtcccagggctggaagatgtgcatgtatggattggcttccccttctttgcagtgtatctaacagcccttctagggaacatcattatcctgtttgtgatacagactgaacagagcctccaccaacccatgttttacttcctagccatgttggccggcactgatctgggcttgtctacagcaaccatccccaagatgctgggaattttctggtttaatcttggagagattgcatttggtgcctgcatcacacagatgtataccattcatatatgcactggcctggagtctgtggtactgacagtcacgggcatagatcgctatattgccatctgcaaccccctgagatatagcatgatccttaccaacaaggtaatagccattctgggcatagtcatcattgtcaggactttggtatttgtgactccattcacatttctcatcctgagattgcctttctgtggtgtccggattatccctcatacctattgtgaacacatgggcttggcaaagttagcttgtgccagtattaatgttatatatggattgattgccttctcagtgggatacattgacatttctgtgattggattttcctatgtccagatcctccgagctgtcttccatctcccagcctgggatgcccggcctaaggcactcagcacatgtggctctcacgtctgtgttatgttggctttctacctgccagccctcttttccttcatgacacaccgctttggccacaacatccctcattacatccacattcttctggccaatctgtatgtggtttttccccctgctcttaactctgttatctatggggtcaaaacaaaacagatacgagagcaggtacttaggatactcaaccctaaaagcttttggcattttgaccccaagaggatcttccacaacaattcagttagacaataa

SEQ ID NO: 8648 - protein, 331 aa, Homo sapiens
MATNMLHTNNTQFHPSTFLVVGVPGLEDVHVWIGFPFFAVYLTALLGNIIILFVIQTEQSLHQPMFYFLAMLAGTDLGLSTATIPKMLGIFWFNLGEIAFGACITQMYTIHICTGLESVVLTVTGIDRYIAICNPLRYSMILTNKVIAILGIVIIVRTLVFVTPFTFLILRLPFCGVRIIPHTYCEHMGLAKLACASINVIYGLIAFSVGYIDISVIGFSYVQILRAVFHLPAWDARPKALSTCGSHVCVMLAFYLPALFSFMTHRFGHNIPHYIHILLANLYVVFPPALNSVIYGVKTKQIREQVLRILNPKSFWHFDPKRIFHNNSVRQ

SEQ ID NO: 8649 - DNA, 948 bp, Homo sapiens
atgacaacacaccgaaatgacaccctctccactgaagcttcagacttcctcttgaattgttttgtcagatcccccagctggcagcactggctgtccctgcccctcagcctccttttcctcttggccgtaggggccaacaccaccctcctgatgaccatctggctggaggcctctctgcaccagcccctgtactacctgctcagcctcctctccctgctggacatcgtgctctgcctcactgtcatccccaaggtcctgaccatcttctggtttgacctcaggcccatcagcttccctgcctgcttcctccagatgtacatcatgaattgtttcctagccatggagtcttgcacattcatggtcatggcctatgatcgttatgtagccatctgccacccactgagatatccatcaatcatcactgatcactttgtagtcaaggctgccatgtttattttgaccagaaatgtgcttatgactctgcccatccccatcctttcagcacaactccgttattgtggaagaaatgtcattgagaactgcatctgtgccaatatgtctgtttccagactctcctgcgatgatgtcaccatcaatcacctttaccaatttgctggaggctggactctgctaggatctgacctcatccttatcttcctctcctacaccttcattctgcgagctgtgctgagactcaaggcagagggtgccgtggcaaaggccctaagcacatgtggctcccacttcatgctcatcctcttcttcagcaccatccttctggtttttgtcctcacacatgtggctaagaagaaagtctcccctgatgtgccagtcttgctcaatgttctccaccatgtcattcctgcagcccttaaccccatcatttacggggtgagaacccaagaaattaagcagggaatgcagaggttgttgaagaaagggtgctaa

SEQ ID NO: 8650 - protein, 315 aa, Homo sapiens
MTTHRNDTLSTEASDFLLNCFVRSPSWQHWLSLPLSLLFLLAVGANTTLLMTIWLEASLHQPLYYLLSLLSLLDIVLCLTVIPKVLTIFWFDLRPISFPACFLQMYIMNCFLAMESCTFMVMAYDRYVAICHPLRYPSIITDHFVVKAAMFILTRNVLMTLPIPILSAQLRYCGRNVIENCICANMSVSRLSCDDVTINHLYQFAGGWTLLGSDLILIFLSYTFILRAVLRLKAEGAVAKALSTCGSHFMLILFFSTILLVFVLTHVAKKKVSPDVPVLLNVLHHVIPAALNPIIYGVRTQEIKQGMQRLLKKGC

SEQ ID NO: 8651 - DNA, 969 bp, Homo sapiens
atggggactacacataagaggcaggaaaaagcacaagttaaggaaagaatctttcagcgacagtggactaaggaaaagaaaatgagcagaggtttccagagctggcagcactggctgtctctgcccctcagcctcctcttcctcctggccatgggggccaatgccacccttctgatcaccatctatctggaagcctctctgcaccagcccctgtactacctgctcagcctcctctccctgctggacatcgtactctgcctcaccgtcatccccaaggtcctggccatcttctggtttgacctcagatcaatcagcttccctgcctgcttccttcaggtgttcatcatgaacagttttctgactatggagtcctgcacattcatgatcatggcctatgaccgctatgtggccatctgcaagcccctacagtactcatccatcatcactgatcaatttgtcgctagggctgccatctttgttgtggccaggaatggccttcttactatgcctatccccatactttcttctcgactcagatactgtgcaggacacatcatcaagaactgcatctgtactaacgtgtctgtgtctaaactctcttgtgatgacatcaccttgaatcagagctaccagtttgttataggttggaccctgctgggctctgacctcatccttattgttctctcttacttttttatcttgaaaactgtgctaaggattaagggtgagggagatatggccaaagctctaggtacttgtggttcccacttcatcctcatcctcttcttcaccacagtcctgctggttctggtcatcactaacctggccaggaagagaattcctccggatgtccccatcctgctcaacatcctgcaccaccttattcccccagctctgaaccccattgtttatggtgtgagaaccaaggagatcaagcagggaatccagaacctgctgaggaggttgtaa

SEQ ID NO: 8652 - protein, 322 aa, Homo sapiens
MGTTHKRQEKAQVKERIFQRQWTKEKKMSRGFQSWQHWLSLPLSLLFLLAMGANATLLITIYLEASLHQPLYYLLSLLSLLDIVLCLTVIPKVLAIFWFDLRSISFPACFLQVFIMNSFLTMESCTFMIMAYDRYVAICKPLQYSSIITDQFVARAAIFVVARNGLLTMPIPILSSRLRYCAGHIIKNCICTNVSVSKLSCDDITLNQSYQFVIGWTLLGSDLILIVLSYFFILKTVLRIKGEGDMAKALGTCGSHFILILFFTTVLLVLVITNLARKRIPPDVPILLNILHHLIPPALNPIVYGVRTKEIKQGIQNLLRRL

SEQ ID NO: 8653 - DNA, 945 bp, Homo sapiens
atgctccttagcaattcaagctggaggctatcccagccttcttttctcctggtagggattccaggtttagaggaaagccagcactggattgcactgcccctgggcatcctttacctccttgctttagtgggcaatgttaccattctcttcatcatctggatggacccatccttgcaccaatctatgtacctcttcctgtccatgctagctgccatcgacctggttctggcctcctccactgcacccaaagcccttgcagtgctcctggttcatgcccacgagattgggtacatcgtctgcctgatccagatgttcttcatccatgcattctcctccatggagtcaggggtacttgtggccatggctctggattgctatgtagccatttgtcaccccttgcaccattccacaatcctgcatccaggggtcatagggtgcatcggaatggtggtgctggtgaggggattactactccttatccccttccccattttgttgggaaaacttatcttctgccaagccaccatcataggccatgcctattgtgaacatatggctgttgtgaaacttgcctgctcagaaaccacagtcaatcgagcttatgggctgactatggccttgcttgtgattgggctggatgttctggccattggtgtttcctatgcccacatcctccaggcagtgctgaaggtaccagggagtgaggcccgacttaaggcgtttagcacatgtggctctcatatttgtgtcatcctggtcttctatgtccctggaattttctccttcctcactcaccgctttggtcatcatgtaccccatcatgtccatgttcttctggccacatggtatctcctcatgccacctgcgctcaatcctcttgtctatggagtgaagactcagcagatccgccagcgagtgctcagagtgtttacacaaaaggattga

SEQ ID NO: 8654 - protein, 314 aa, Homo sapiens
MLLSNSSWRLSQPSFLLVGIPGLEESQHWIALPLGILYLLALVGNVTILFIIWMDPSLHQSMYLFLSMLAAIDLVLASSTAPKALAVLLVHAHEIGYIVCLIQMFFIHAFSSMESGVLVAMALDCYVAICHPLHHSTILHPGVIGCIGMVVLVRGLLLLIPFPILLGKLIFCQATIIGHAYCEHMAVVKLACSETTVNRAYGLTMALLVIGLDVLAIGVSYAHILQAVLKVPGSEARLKAFSTCGSHICVILVFYVPGIFSFLTHRFGHHVPHHVHVLLATWYLLMPPALNPLVYGVKTQQIRQRVLRVFTQKD

SEQ ID NO: 8655 - DNA, 4525 bp, Homo sapiens
gcacacctccccgcgccgccgccgccaccgcccgcactccgccgcctctgcccgcaaccgctgagccatccatgggggtcgcgggccgcaaccgtcccggggcggcctgggcggtgctgctgctgctgctgctgctgccgccactgctgctgctggcgggggccgtcccgccgggtcggggccgtgccgcggggccgcaggaggatgtagatgagtgtgcccaagggctagatgactgccatgccgacgccctgtgtcagaacacacccacctcctacaagtgctcctgcaagcctggctaccaaggggaaggcaggcagtgtgaggacatcgatgaatgtggaaatgagctcaatggaggctgtgtccatgactgtttgaatattccaggcaattatcgttgcacttgttttgatggcttcatgttggctcatgacggtcataattgtcttgatgtggacgagtgcctggagaacaatggcggctgccagcatacctgtgtcaacgtcatggggagctatgagtgctgctgcaaggaggggtttttcctgagtgacaatcagcacacctgcattcaccgctcggaagagggcctgagctgcatgaataaggatcacggctgtagtcacatctgcaaggaggccccaaggggcagcgtcgcctgtgagtgcaggcctggttttgagctggccaagaaccagagagactgcatcttgacctgtaaccatgggaacggtgggtgccagcactcctgtgacgatacagccgatggcccagagtgcagctgccatccacagtacaagatgcacacagatgggaggagctgccttgagcgagaggacactgtcctggaggtgacagagagcaacaccacatcagtggtggatggggataaacgggtgaaacggcggctgctcatggaaacgtgtgctgtcaacaatggaggctgtgaccgcacctgtaaggatacttcgacaggtgtccactgcagttgtcctgttggattcactctccagttggatgggaagacatgtaaagatattgatgagtgccagacccgcaatggaggttgtgatcatttctgcaaaaacatcgtgggcagttttgactgcggctgcaagaaaggatttaaattattaacagatgagaagtcttgccaagatgtggatgagtgctctttggataggacctgtgaccacagctgcatcaaccaccctggcacatttgcttgtgcttgcaaccgagggtacaccctgtatggcttcacccactgtggagacaccaatgagtgcagcatcaacaacggaggctgtcagcaggtctgtgtgaacacagtgggcagctatgaatgccagtgccaccctgggtacaagctccactggaataaaaaagactgtgtggaagtgaaggggctcctgcccacaagtgtgtcaccccgtgtgtccctgcactgcggtaagagtggtggaggagacgggtgcttcctcagatgtcactctggcattcacctctcttcaggactgcaaggggcctactctgtcacctgtggctcttcctctcctctcaggaacaaacaacaaaaatcaaatgactctgcttttggggatgtcaccaccatcaggacaagtgtaacctttaagctaaatgaaggcaagtgtagtttgaaaaatgctgagctgtttcccgagggtctgcgaccagcactaccagagaagcacagctcagtaaaagagagcttccgctacgtaaaccttacatgcagctctggcaagcaagtcccaggagcccctggccgaccaagcacccctaaggaaatgtttatcactgttgagtttgagcttgaaactaaccaaaaggaggtgacagcttcttgtgacctgagctgcatcgtaaagcgaaccgagaagcggctccgtaaagccatccgcacgctcagaaaggccgtccacagggagcagtttcacctccagctctcaggcatgaacctcgacgtggctaaaaagcctcccagaacatctgaacgccaggcagagtcctgtggagtgggccagggtcatgcagaaaaccaatgtggtctgtgtcaacctggtgaatattctgcagatggctttgcaccttgccatctctgtgccctgggcacgttccagcctgaagctggtcgaacttcctgcttcccctgtggaggaggccttgccaccaaacatcagggagctacttcctttcaggactgtgaaaccagagttcaatgttcacctggacatttctacaacaccaccactcaccgatgtattcgttgcccagtgggaacataccagcctgaatttggaaaaaataattgtgtttcttgcccaggaaatactacgactgactttgatggctccacaaacataacccagtgtaaaaacagaagatgtggaggggagctgggagatttcactgggtacattgaatccccaaactacccaggcaattacccagccaacaccgagtgtacgtggaccatcaacccaccccccaagcgccgcatcctgatcgtggtccctgagatcttcctgcccatagaggacgactgtggggactatctggtgatgcggaaaacctcttcatccaattctgtgacaacatatgaaacctgccagacctacgaacgccccatcgccttcacctccaggtcaaagaagctgtggattcagttcaagtccaatgaagggaacagcgctagagggttccaggtcccatacgtgacatatgatgaggactaccaggaactcattgaagacatagttcgagatggcaggctctatgcatctgagaaccatcaggaaatacttaaggataagaaacttatcaaggctctgtttgatgtcctggcccatccccagaactatttcaagtacacagcccaggagtcccgagagatgtttccaagatcgttcatccgattgctacgttccaaagtgtccaggtttttgagaccttacaaatgactcagcccacgtgccactcaatacaaatgttctgctatagggttggtgggacagagctgtcttccttctgcatgtcagcacagtcgggtattgctgcctcccgtatcagtgactcattagagttcaatttttatagataatacagatattttggtaaattgaacttggtttttctttcccagcatcgtggatgtagactgagaatggctttgagtggcatcagcttctcactgctgtgggcggatgtcttggatagatcacgggctggctgagctggactttggtcagcctaggtgagactcacctgtccttctggggtcttactcctcctcaaggagtctgtagtggaaaggaggccacagaataagctgcttattctgaaacttcagcttcctctagcccggccctctctaagggagccctctgcactcgtgtgcaggctctgaccaggcagaacaggcaagaggggagggaaggagacccctgcaggctccctccacccaccttgagacctgggaggactcagtttctccacagccttctccagcctgtgtgatacaagtttgatcccaggaacttgagttctaagcagtgctcgtgaaaaaaaaaagcagaaagaattagaaataaataaaaactaagcacttctggagacataataatgtacatttattgccagccttcctcgttgcaagcttccaccctgcagcaaatgcactatgctgactctcgcaccttcagctgtgccctctgacactctgctggccattgcctgagggactggggagttcaggtgaaatgtaatttcctcagtggatgagaatcatcaattgtcatgaaaaggcgatttcaccaaccctgagtcggtattgccaagggttctactccccaagtgggcttcccatcacaagggatctgaggtccaggtgggtgtggtgaggcccagcctgtcatgtatgccttccttccccagtctcaaatgtgagagacggactctgctccgtggacatgagcagccccttgaagggtggtctcattctctaacagtaacagcactgccagaaacaccccctgaatgccacacgatcatctcactttgggtcaggccagcagggcctcacgatcatttcttgaacttgaattttcagtgttattgaatctttaaacatttaaatccccaagcaaaaatctcattacagtgaataaaaaggaatccaatcaaacaagccaccacttccctaatggatggactacctacaactatagtgttttgttatttcaataacaattctatgcacagccaattctccataccaaagtactaaaaaaatgtttaacaagcatttttgaagaaaacaaagagaacttcattatggttaaacttgcttttcatctcagtgttgctttttttaacctgttaataacattgattcttaaaaagtcctaatcaaacttctttatttggatgggccctaaatattcattttcagatttctcttcaaaagtttgaacatcatcattaaaaaaaaaatagcatt

SEQ ID NO: 8656 - protein, 971 aa, Homo sapiens
MGVAGRNRPGAAWAVLLLLLLLPPLLLLAGAVPPGRGRAAGPQEDVDECAQGLDDCHADALCQNTPTSYKCSCKPGYQGEGRQCEDIDECGNELNGGCVHDCLNIPGNYRCTCFDGFMLAHDGHNCLDVDECLENNGGCQHTCVNVMGSYECCCKEGFFLSDNQHTCIHRSEEGLSCMNKDHGCSHICKEAPRGSVACECRPGFELAKNQRDCILTCNHGNGGCQHSCDDTADGPECSCHPQYKMHTDGRSCLEREDTVLEVTESNTTSVVDGDKRVKRRLLMETCAVNNGGCDRTCKDTSTGVHCSCPVGFTLQLDGKTCKDIDECQTRNGGCDHFCKNIVGSFDCGCKKGFKLLTDEKSCQDVDECSLDRTCDHSCINHPGTFACACNRGYTLYGFTHCGDTNECSINNGGCQQVCVNTVGSYECQCHPGYKLHWNKKDCVEVKGLLPTSVSPRVSLHCGKSGGGDGCFLRCHSGIHLSSGLQGAYSVTCGSSSPLRNKQQKSNDSAFGDVTTIRTSVTFKLNEGKCSLKNAELFPEGLRPALPEKHSSVKESFRYVNLTCSSGKQVPGAPGRPSTPKEMFITVEFELETNQKEVTASCDLSCIVKRTEKRLRKAIRTLRKAVHREQFHLQLSGMNLDVAKKPPRTSERQAESCGVGQGHAENQCGLCQPGEYSADGFAPCHLCALGTFQPEAGRTSCFPCGGGLATKHQGATSFQDCETRVQCSPGHFYNTTTHRCIRCPVGTYQPEFGKNNCVSCPGNTTTDFDGSTNITQCKNRRCGGELGDFTGYIESPNYPGNYPANTECTWTINPPPKRRILIVVPEIFLPIEDDCGDYLVMRKTSSSNSVTTYETCQTYERPIAFTSRSKKLWIQFKSNEGNSARGFQVPYVTYDEDYQELIEDIVRDGRLYASENHQEILKDKKLIKALFDVLAHPQNYFKYTAQESREMFPRSFIRLLRSKVSRFLRPYK

SEQ ID NO: 8657 - DNA, 4618 bp, Homo sapiens
ggcgtccgcgcacacctccccgcgccgccgccgccaccgcccgcactccgccgcctctgcccgcaaccgctgagccatccatgggggtcgcgggccgcaaccgtcccggggcggcctgggcggtgctgctgctgctgctgctgctgccgccactgctgctgctggcgggggccgtcccgccgggtcggggccgtgccgcggggccgcaggaggatgtagatgagtgtgcccaagggctagatgactgccatgccgacgccctgtgtcagaacacacccacctcctacaagtgctcctgcaagcctggctaccaaggggaaggcaggcagtgtgaggacatcgatgaatgtggaaatgagctcaatggaggctgtgtccatgactgtttgaatattccaggcaattatcgttgcacttgttttgatggcttcatgttggctcatgacggtcataattgtcttgatgtggacgagtgcctggagaacaatggcggctgccagcatacctgtgtcaacgtcatggggagctatgagtgctgctgcaaggaggggtttttcctgagtgacaatcagcacacctgcattcaccgctcggaagagggcctgagctgcatgaataaggatcacggctgtagtcacatctgcaaggaggccccaaggggcagcgtcgcctgtgagtgcaggcctggttttgagctggccaagaaccagagagactgcatcttgacctgtaaccatgggaacggtgggtgccagcactcctgtgacgatacagccgatggcccagagtgcagctgccatccacagtacaagatgcacacagatgggaggagctgccttgagcgagaggacactgtcctggaggtgacagagagcaacaccacatcagtggtggatggggataaacgggtgaaacggcggctgctcatggaaacgtgtgctgtcaacaatggaggctgtgaccgcacctgtaaggatacttcgacaggtgtccactgcagttgtcctgttggattcactctccagttggatgggaagacatgtaaagatattgatgagtgccagacccgcaatggaggttgtgatcatttctgcaaaaacatcgtgggcagttttgactgcggctgcaagaaaggatttaaattattaacagatgagaagtcttgccaagatgtggatgagtgctctttggataggacctgtgaccacagctgcatcaaccaccctggcacatttgcttgtgcttgcaaccgagggtacaccctgtatggcttcacccactgtggagacaccaatgagtgcagcatcaacaacggaggctgtcagcaggtctgtgtgaacacagtgggcagctatgaatgccagtgccaccctgggtacaagctccactggaataaaaaagactgtgtggaagtgaaggggctcctgcccacaagtgtgtcaccccgtgtgtccctgcactgcggtaagagtggtggaggagacgggtgcttcctcagatgtcactctggcattcacctctcttcagatgtcaccaccatcaggacaagtgtaacctttaagctaaatgaaggcaagtgtagtttgaaaaatgctgagctgtttcccgagggtctgcgaccagcactaccagagaagcacagctcagtaaaagagagcttccgctacgtaaaccttacatgcagctctggcaagcaagtcccaggagcccctggccgaccaagcacccctaaggaaatgtttatcactgttgagtttgagcttgaaactaaccaaaaggaggtgacagcttcttgtgacctgagctgcatcgtaaagcgaaccgagaagcggctccgtaaagccatccgcacgctcagaaaggccgtccacagggagcagtttcacctccagctctcaggcatgaacctcgacgtggctaaaaagcctcccagaacatctgaacgccaggcagagtcctgtggagtgggccagggtcatgcagaaaaccaatgtgtcagttgcagggctgggacctattatgatggagcacgagaacgctgcattttatgtccaaatggaaccttccaaaatgaggaaggacaaatgacttgtgaaccatgcccaagaccaggaaattctggggccctgaagaccccagaagcttggaatatgtctgaatgtggaggtctgtgtcaacctggtgaatattctgcagatggctttgcaccttgccatctctgtgccctgggcacgttccagcctgaagctggtcgaacttcctgcttcccctgtggaggaggccttgccaccaaacatcagggagctacttcctttcaggactgtgaaaccagagttcaatgttcacctggacatttctacaacaccaccactcaccgatgtattcgttgcccagtgggaacataccagcctgaatttggaaaaaataattgtgtttcttgcccaggaaatactacgactgactttgatggctccacaaacataacccagtgtaaaaacagaagatgtggaggggagctgggagatttcactgggtacattgaatccccaaactacccaggcaattacccagccaacaccgagtgtacgtggaccatcaacccaccccccaagcgccgcatcctgatcgtggtccctgagatcttcctgcccatagaggacgactgtggggactatctggtgatgcggaaaacctcttcatccaattctgtgacaacatatgaaacctgccagacctacgaacgccccatcgccttcacctccaggtcaaagaagctgtggattcagttcaagtccaatgaagggaacagcgctagagggttccaggtcccatacgtgacatatgatgaggactaccaggaactcattgaagacatagttcgagatggcaggctctatgcatctgagaaccatcaggaaatacttaaggataagaaacttatcaaggctctgtttgatgtcctggcccatccccagaactatttcaagtacacagcccaggagtcccgagagatgtttccaagatcgttcatccgattgctacgttccaaagtgtccaggtttttgagaccttacaaatgactcagcccacgtgccactcaatacaaatgttctgctatagggttggtgggacagagctgtcttccttctgcatgtcagcacagtcgggtattgctgcctcccgtatcagtgactcattagagttcaatttttatagataatacagatattttggtaaattgaacttggtttttctttcccagcatcgtggatgtagactgagaatggctttgagtggcatcagcttctcactgctgtgggcggatgtcttggatagatcacgggctggctgagctggactttggtcagcctaggtgagactcacctgtccttctggggtcttactcctcctcaaggagtctgtagtggaaaggaggccacagaataagctgcttattctgaaacttcagcttcctctagcccggccctctctaagggagccctctgcactcgtgtgcaggctctgaccaggcagaacaggcaagaggggagggaaggagacccctgcaggctccctccacccaccttgagacctgggaggactcagtttctccacagccttctccagcctgtgtgatacaagtttgatcccaggaacttgagttctaagcagtgctcgtgaaaaaaaaaagcagaaagaattagaaataaataaaaactaagcacttctggagacataataatgtacatttattgccagccttcctcgttgcaagcttccaccctgcagcaaatgcactatgctgactctcgcaccttcagctgtgccctctgacactctgctggccattgcctgagggactggggagttcaggtgaaatgtaatttcctcagtggatgagaatcatcaattgtcatgaaaaggcgatttcaccaaccctgagtcggtattgccaagggttctactccccaagtgggcttcccatcacaagggatctgaggtccaggtgggtgtggtgaggcccagcctgtcatgtatgccttccttccccagtctcaaatgtgagagacggactctgctccgtggacatgagcagccccttgaagggtggtctcattctctaacagtaacagcactgccagaaacaccccctgaatgccacacgatcatctcactttgggtcaggccagcagggcctcacgatcatttcttgaacttgaattttcagtgttattgaatctttaaacatttaaatccccaagcaaaaatctcattacagtgaataaaaaggaatccaatcaaacaagccaccacttccctaatggatggactacctacaactatagtgttttgttatttcaataacaattctatgcacagccaattctccataccaaagtactaaaaaaatgtttaacaagcatttttgaagaaaacaaagagaacttcattatggttaaacttgcttttcatctcagtgttgctttttttaacctgttaataacattgattcttaaaaagtcctaatcaaacttctttatttggatgggccctaaatattcattttcagatttctcttcaaaagtttgaacatcatcattaaaaaaaaaatagcatt

SEQ ID NO: 8658 - protein, 999 aa, Homo sapiens
MGVAGRNRPGAAWAVLLLLLLLPPLLLLAGAVPPGRGRAAGPQEDVDECAQGLDDCHADALCQNTPTSYKCSCKPGYQGEGRQCEDIDECGNELNGGCVHDCLNIPGNYRCTCFDGFMLAHDGHNCLDVDECLENNGGCQHTCVNVMGSYECCCKEGFFLSDNQHTCIHRSEEGLSCMNKDHGCSHICKEAPRGSVACECRPGFELAKNQRDCILTCNHGNGGCQHSCDDTADGPECSCHPQYKMHTDGRSCLEREDTVLEVTESNTTSVVDGDKRVKRRLLMETCAVNNGGCDRTCKDTSTGVHCSCPVGFTLQLDGKTCKDIDECQTRNGGCDHFCKNIVGSFDCGCKKGFKLLTDEKSCQDVDECSLDRTCDHSCINHPGTFACACNRGYTLYGFTHCGDTNECSINNGGCQQVCVNTVGSYECQCHPGYKLHWNKKDCVEVKGLLPTSVSPRVSLHCGKSGGGDGCFLRCHSGIHLSSDVTTIRTSVTFKLNEGKCSLKNAELFPEGLRPALPEKHSSVKESFRYVNLTCSSGKQVPGAPGRPSTPKEMFITVEFELETNQKEVTASCDLSCIVKRTEKRLRKAIRTLRKAVHREQFHLQLSGMNLDVAKKPPRTSERQAESCGVGQGHAENQCVSCRAGTYYDGARERCILCPNGTFQNEEGQMTCEPCPRPGNSGALKTPEAWNMSECGGLCQPGEYSADGFAPCHLCALGTFQPEAGRTSCFPCGGGLATKHQGATSFQDCETRVQCSPGHFYNTTTHRCIRCPVGTYQPEFGKNNCVSCPGNTTTDFDGSTNITQCKNRRCGGELGDFTGYIESPNYPGNYPANTECTWTINPPPKRRILIVVPEIFLPIEDDCGDYLVMRKTSSSNSVTTYETCQTYERPIAFTSRSKKLWIQFKSNEGNSARGFQVPYVTYDEDYQELIEDIVRDGRLYASENHQEILKDKKLIKALFDVLAHPQNYFKYTAQESREMFPRSFIRLLRSKVSRFLRPYK

SEQ ID NO: 8659 - DNA, 1828 bp, Homo sapiens
ctctgattgaacatgttcaaaacgaagctcatgacctagaagaagcttctctgctttctcgaatctctgcctggttcagcccacccacccctccactactgcctccaccatgtccatcagggtgacccagaagtcctacagggtgtccacctctggcccctaggccttaagcagccgctcctacacaagcgggcctggtgcccatatcagctcctggagcttctctcaagtgggcggcagcagcagcttccggggtggcctgggcacccgcatggctctgggtggaggctatggtggggccagtggtatggggggcatcacagccatcatggtcagccagaacctgctgagcccccttaagctggaggtgaaccccaacatccaggctgtgtgcgcccaggagaaggagcagatcaagaccctctacaacaagtttgcctccttcatcgagaaggtgcggtccctggagcagcagaacaagatgctggagaccaagtggagcctcctgcagcagcagaagacagctcagagcgacatggacagcatattcgagagccacatcaacaaacttcggcggtagctggacactctgggccaggagaagctgaagcttggcaacatgcagaggctggtggaggactccaagaacaagtatgaggatgagatcaataagcgtacagagatggagaatgaatttgtcctcatcaagaaggtaacgtggctgaagctaacatgaacaaggtagagctggagtctcttctggaagggctgactgacgagatcaacttcctcaggcagctatatgaagaggaaatctgggagctgcagtcccagatctcggacacatctgtggtgctgtccatggacagcagccgctccctggacatggacagcatcatccctgaggtcaaggcgcagtacaaggagatcgccaatggcagctgggctgaggctgagggcatgcatcagatcaagtatgaggagctgcagacactgcctgggaagcataggaatgacctgcgttatgcaaagatggagatctctgagattaataggaacatcagccggctccaggctcagactgagggcctcaaaggccagagggtttccctggaggctgccatcgcagatgctgagcagtatggggagctggctgttaaggatgccaacacgaagctgtcgagctggaggccgccctgcagcgggccgagcaagacatggtgcagcagctgtgccatggagcaccaggagctgatgaacgtcaagctggccctggacatcaagatcgccacctacaggaagctgctggagggcgaggagagctagctggggtctgggatacagaacatgagtgtccatctgaagaccaccagtggctactcaggtgggctgagctcgacccacgggcacctcacaagccctctacaacaggccttagctacagcctgggctccagctttggcactggtggaggctccagctccttcagccgcgccagcttctccaggtccatggttgtgaagaaggtggaaacgcgagatggcaagctagtgtccaagtcctctgatgtcctgcccaagtgaatggccatggcagcccctaccagcctgcccctcctgcggctgccccagggcccgtggaggaagccgctgtgcagtggagcacaggaacaggagactcacctgaggctcagccctagccctcagcccacctgctgggggagtttactgcctggggcacccccattggccatgcttccagctacaaaacaattcaattgttgcttttttttttttttttttcaaaataaaatctcagctagctctgc

SEQ ID NO: 8660 - protein, 197 aa, Homo sapiens [sequence omitted]

SEQ ID NO: 8661 - DNA, 1166 bp, Homo sapiens
gaaaaagcacaaacctattatgagacattagagaagaatgaagtagtccctgaggaaaactggcatacaagagcccggaacttctgccgatttgtcactgcaatcaacaatactccccggaacatcggcaaggcagagatcacctcctacaccactggattgccctgctggctgactgccccatcactgcacacatgtatgaggatgtggcactgatcaaagaccatacacttgtcaattccttgattcgtgtgctgcagacattgcaggagttcaacatcacgctggagacgtcccttgtcaagggcatcgacatctgacctcccagcaccagccagcagcaggactgagaaagactcaccctgcagctctgaccttttttcccaaagggacttaagcgattgtgcaggagtaggagacaaaatgtacactcactgtaaaaagaaaactagaggatttttggaataaataatctattttagagtttatttgctgatttgctttttacacactttcatgtgaaagagtgatagggagagggagcgaggctggtgccgcttattttgaagctggtgccctccctcgccgtggccacatgctggaagcctgaggcctccctggactgagcctgtggcactgcgtgcgggacagttatgtttccttgccccgtcgcattaatgaggcccttccacatcatttttaaactaatgtttttctatattaacattattatggatatttggctttcataggccacacacaggtgtgctgcgcgggaagccccatgctccaatcaaagggatttttagtagtgcctctaagcaagcaccgatgagtcagtcccacgtattttcttttttgtcagtattgtttgggaaggagacatgccgggatgtgtcatcgtgccaaataccacatttcctgttggcacagtttcacagaagtaaacataagcatgttttaacaggtttttcttttcttttttcttttttaaaatgttttatttatttaacccgccattgtgtgtttttaagtattttctttttttaaggaaaggaaaagcttgtcacaatctaactggctatgttattattattaaatttatgttttgcaacttagaaaccagctacagtatggcccacttaataaaacacctgaaacaaaaa

SEQ ID NO: 8662 - protein, 72 aa, Homo sapiens
MSQSHVFSFLSVLFGKETCRDVSSCQIPHFLLAQFHRSKHKHVLTGFSFLFSFLKCFIYLTRHCVFLSIFFF

SEQ ID NO: 8663 - DNA, 2611 bp, Homo sapiens
ttacttgtctggacatgcacatctctccatgcatagtgtgttgagaagtccccaggagttctttcagctactcagcccacctgttcccagagacctcagaacccacttccagaatctcttgctccctgaccctgttcttctaggtagagtgttttctttctcagccttgggcacccccatgagatagtgctgtaccgcagttctggcggtatgtagagccatgacctctaagcctgcagatgctgaggggtcaggttgcaggcagccagtcagatctgtgcctccgagaactactgttcttttctctgattttcctgacctacctcatcttctctattctctaatagtgccagaacttggggaagcttactactgtccagattggccatgataactctgggctgtatgccaaatggctggtggagtatgtgatggtcaggaatgagatcacaggacatacctacaagttcccgtgtggccggtggttagggaagggcatggatgatggaagcctggagcggatcctagttggggagctgctcacatcccagcctgaggtggatgagaggccatgccggaccccgccgctgcagcagtcccccagtgtcatccggaggcttgttaccatctcacccaacaacaagcccaagctgaacactgggcagatccaggagtccatcggggaggcagtcaatggcattgtgaagcacttccataagcctgagaaagaggtgagccttcctgccctccaatccagggccttacattgaataagagagaataattttgtttttccgattatcttgttatgctcttccaggcccatgtgctgtggacaccctagagtcttgtagagtgtgtgcctcagctagttggagatggagcagactccttcctctgggggcctttgcctcaggttaccctgttttccctccatactgatgacccaatagagtccctgggcccctagtgaacagtgcctattcctgtcctcttctagatttgcctgggtctccttgaatagtggccacactggctttgtcctccagtggagaatctccttgtgtgtgacccagatccatcatctcttctttcatccatttattcagcagctcttcactgggagctgctctgagccaggcactgtgccaggtgttagggaaacagacaaagtcctagcctgtcttttgcagccctcccaactctgggctgtgggtttagggatgcaatggtgggagggcagctcggctgagacaagcctggcaccctcccctgtttccttacgtagcgaggcagtctgacgctgttgctctgtggagagtgtggccttgtctcggccttggaacaggctttccagcatggatttaaatcgccccggctcttcaaaaatgtcttcatttgggatttcctggaaaaagcacaaacctattatgagacattagagaagaatgaagtagtccctgaggaaaactggcatacaagagcccggaacttctgccgatttgtcactgcaatcaacaatactccccggaacatcggcaaggatggcaagtttcagatgctggtgtgcttgggagccagagatcacctcctacaccactggattgccctgctggctgactgccccatcactgcacacatgtatgaggatgtggcactgatcaaagaccatacacttgtcaattccttgattcgtgtgctgcagacattgcaggagttcaacatcacgctggagacgtcccttgtcaagggcatcgacatctgacctcccagcaccagccagcagcaggactgagaaagactcaccctgcagctctgaccttttttcccaaagggacttaagcgattgtgcaggagtaggagacaaaatgtacactcactgtaaaaagaaaactagaggatttttggaataaataatctattttagagtttatttgctgatttgctttttacacactttcatgtgaaagagtgatagggagagggagcgaggctggtgccgcttattttgaagctggtgccctccctcgccgtggccacatgctggaagcctgaggcctccctggactgagcctgtggcactgcgtgcgggacagttatgtttccttgccccgtcgcattaatgaggcccttccacatcatttttaaactaatgtttttctatattaacattattatggatatttggctttcataggccacacacaggtgtgctgcgcgggaagccccatgctccaatcaaagggatttttagtagtgcctctaagcaagcaccgatgagtcagtcccacgtattttcttttttgtcagtattgtttgggaaggagacatgccgggatgtgtcatcgtgccaaataccacatttcctgttggcacagtttcacagaagtaaacataagcatgttttaacaggtttttcttttcttttttcttttttaaaatgttttatttatttaacccgccattgtgtgtttttaagtattttctttttttaaggaaaggaaaagcttgtcacaatctaactggctatgttattattattaaatttatgttttgcaacttagaaaccagctacagtatggcccacttaataaaacacctgaaacaaaaa

SEQ ID NO: 8664 - protein, 112 aa, Homo sapiens
MVRNEITGHTYKFPCGRWLGKGMDDGSLERILVGELLTSQPEVDERPCRTPPLQQSPSVIRRLVTISPNNKPKLNTGQIQESIGEAVNGIVKHFHKPEKEVSLPALQSRALH

SEQ ID NO: 8665 - DNA, 4272 bp, Homo sapiens
gtgctttttagatctgtggattttttgtttacgtcaaatttgtaaaaattctggccagtatttcttctagtaatttttctgttctccccatccctaccttagggactgcagttacacatacatgtaatatctgggattgcgtagttatcccagaaccgctgatactcttttaatggcaacagttttttctctctctctgtggcttctttgggatcatttctcttgctatggcttcaagctcacttattttttctcctgcattgttgagtgtgcttttaacccagcccgtgtatttttcatctcagatattacagctttcatcttcagaagtttgagttccatgtttctagttttttgttgttgatgttgtttgtttgtttgtttttaagaggttctgctttgttgcccaggctggagtgcggtagtgtaattatagctcaccataaccttaaactcctgggctcaagtgatcttctggccttggcctcctgaatagctaggaataaaggtgtatgccaccatgtctggctcattttttttttttttttgaagagatgaggtctcactatgttgcccaggctggtcttgaagtcctggccttaaatgataccctcactttggcctcccagagtgctgggattacaggcgtaagctatcaggccctggtaatctttgattagatgccagacactgtgaattttactatttgagtcctggacacttccatattcctataaatattctcagtctttgttctgggatgtagttaagttacttagaaataatttgatttctttgtgctttcctctggcaggaccagagcatcctttaggctgtgattaattatctactactgaggcaagaccctctgagtactttactcagtgccccatgagtgattaggttttctagtctggcaggtggggacaggcattattcccagccctgtgtgagcattttgtattgtttctcctaatcctttccggtgattctttctccagccttgagtagtttctttacttgcgtgaactgacccattaccctgctgaatgccctgcagatcccctggattctctctcttctctggtactgttcatatgaactctagccaccttggtctccttaactcagggagtccaccagtctctgcctagaactcccctccctgtgccacagcctggaagctttctctaagcagttagctgggatagttctaggggttacctcatttgttacctgtttctcagggtcctgcccttcattgcctgatgtccagtattctgaagtttatcattttatattattttgcatgggttttttcctattaggcaggaaaatcagtcccttttactctatcttggctggaaatggaagagtagctagattcttaaagaatgtttgacttgatttatttgtgtgtgtatttatgtgtgtgtgtgtgtgtgtgtgtgtgtgtattctcatccagagaaagcaattgagctgcgtctggcaaaaattgaccatactgcaattcacccacatttacttgacatgaagattggacaagggaaatatgagccgggcttcttccctaagctgcagtctgatgtactttccactgggccagccagcaacaagtggacgaaaaggaatgcccctgcccagtggaggcggaaagatcggcagaagcagcacacagaacacctgcgtttagataatgaccagagggagaagtacatccaggaagccaggactatgggcagcactatccgccagcccaaactgtccaacctctctccatcagtgattgcccagaccaattggaagtttgtagagggcctgctgaaggaatgccgcaataagaccaagaggatgctggtggaaaagatgggccgagaagctgtggagctagggcatggggaggtgaacatcacaggggtggaagagaacaccctgattgccagcctttgtgatctcctggaaaggatctggagtcatggactacaagtgaaacaggggaaatcagccttatggtcccacctgttacattatcaggacaaccggcagagaaaactcacatcaggaagcctcagtacctcaggaatacttcttgattcagaacgtaggaagtctgatgccagctcactcatgcctcccctgaggatctccctgattcaggatatgaggcacatccagaacatcggggaaatcaagactgatgtgggaaaggccagagcatgggtgcgactgtccatggaaaaaaagttactttccagacacctgaagcagctcctctcagaccatgagctcaccaaaaagttatataagcgctatgccttcctgcgctgtgatgacgagaaggagcagttcctctatcacctcctgtctttcaatgccgtcgattacttttgcttcaccaatgtcttcacaactatcctgatcccgtaccacattctgatcgtaccaagcaagaagctggggggctccatgttcactgccaacccatggatctgtatatcaggagaattgggtgagacacagatcatgcagattcccaggaatgtgctagagatgaccttcgagtgccagaacttggggaagcttactactgtccagattggccatgataactctgggctgtatgccaaatggctggtggagtatgtgatggtcaggaatgagatcacaggacatacctacaagttcccgtgtggccggtggttagggaagggcatggatgatggaagcctggagcggatcctagttggggagctgctcacatcccagcctgaggtggatgagaggccatgccggaccccgccgctgcagcagtcccccagtgtcatccggaggcttgttaccatctcacccaacaacaagcccaagctgaacactgggcagatccaggagtccatcggggaggcagtcaatggcattgtgaagcacttccataagcctgagaaagagcgaggcagtctgacgctgttgctctgtggagagtgtggccttgtctcggccttggaacaggctttccagcatggatttaaatcgccccggctcttcaaaaatgtcttcatttgggatttcctggaaaaagcacaaacctattatgagacattagagaagaatgaagtagtccctgaggaaaactggcatacaagagcccggaacttctgccgatttgtcactgcaatcaacaatactccccggaacatcggcaaggatggcaagtttcagatgctggtgtgcttgggagccagagatcacctcctacaccactggattgccctgctggctgactgccccatcactgcacacatgtatgaggatgtggcactgatcaaagaccatacacttgtcaattccttgattcgtgtgctgcagacattgcaggagttcaacatcacgctggagacgtcccttgtcaagggcatcgacatctgacctcccagcaccagccagcagcaggactgagaaagactcaccctgcagctctgaccttttttcccaaagggacttaagcgattgtgcaggagtaggagacaaaatgtacactcactgtaaaaagaaaactagaggatttttggaataaataatctattttagagtttatttgctgatttgctttttacacactttcatgtgaaagagtgatagggagagggagcgaggctggtgccgcttattttgaagctggtgccctccctcgccgtggccacatgctggaagcctgaggcctccctggactgagcctgtggcactgcgtgcgggacagttatgtttccttgccccgtcgcattaatgaggcccttccacatcatttttaaactaatgtttttctatattaacattattatggatatttggctttcataggccacacacaggtgtgctgcgcgggaagccccatgctccaatcaaagggatttttagtagtgcctctaagcaagcaccgatgagtcagtcccacgtattttcttttttgtcagtattgtttgggaaggagacatgccgggatgtgtcatcgtgccaaataccacatttcctgttggcacagtttcacagaagtaaacataagcatgttttaacaggtttttcttttcttttttcttttttaaaatgttttatttatttaacccgccattgtgtgtttttaagtattttctttttttaaggaaaggaaaagcttgtcacaatctaactggctatgttattattattaaatttatgttttgcaacttagaaaccagctacagtatggcccacttaataaaacacctgaaacaaaaa

SEQ ID NO: 8666 - protein, 630 aa, Homo sapiens
MKIGQGKYEPGFFPKLQSDVLSTGPASNKWTKRNAPAQWRRKDRQKQHTEHLRLDNDQREKYIQEARTMGSTIRQPKLSNLSPSVIAQTNWKFVEGLLKECRNKTKRMLVEKMGREAVELGHGEVNITGVEENTLIASLCDLLERIWSHGLQVKQGKSALWSHLLHYQDNRQRKLTSGSLSTSGILLDSERRKSDASSLMPPLRISLIQDMRHIQNIGEIKTDVGKARAWVRLSMEKKLLSRHLKQLLSDHELTKKLYKRYAFLRCDDEKEQFLYHLLSFNAVDYFCFTNVFTTILIPYHILIVPSKKLGGSMFTANPWICISGELGETQIMQIPRNVLEMTFECQNLGKLTTVQIGHDNSGLYAKWLVEYVMVRNEITGHTYKFPCGRWLGKGMDDGSLERILVGELLTSQPEVDERPCRTPPLQQSPSVIRRLVTISPNNKPKLNTGQIQESIGEAVNGIVKHFHKPEKERGSLTLLLCGECGLVSALEQAFQHGFKSPRLFKNVFIWDFLEKAQTYYETLEKNEVVPEENWHTRARNFCRFVTAINNTPRNIGKDGKFQMLVCLGARDHLLHHWIALLADCPITAHMYEDVALIKDHTLVNSLIRVLQTLQEFNITLETSLVKGIDI

SEQ ID NO: 8667 - DNA, 4981 bp, Homo sapiens
ctcgctcgggccgcggcgctctcggctagctgcagcggcggcggcgcggaggggaaggcatccaggatgcggtgcggggcggcccggtgcccccccgccccgtcacggcagccgcggcggccgaggggaccgggccagggccgggggcggcggcccgagccgcggtagcggcggcggcgggaggggcggcctgagggcggacgggcgggcgcccgggttgcgggggctcggtgccgctccgcactgcccggccggtctcggccccggcgccatgagtggcggcggcggcggagggggctcggcgcccagtcgcttcgccgactactttgtcatctgcggactggacacggagaccgggctggagccggacgagctgtcggcattatgccagtacatacaggcttctaaagccagggatggtgccagccctttcatttcaagtacgactgaaggagaaaattttgagcagacaccattgagaagaacattcaaatctaaggtccttgcacgatatcctgagaacgtagaatggaatccctttgaccaagatgcagtaggaatgctatgtatgccgaaagggctggcattcaagacccaggctgatcccagggagccccaattccatgcctttattatcacaagggaggatggctctcggacatttgggtttgccctcacattttatgaagaggtgactagcaagcagatctgcagtgcaatgcagaccctctaccacatgcacaatgctgagtatgatgtcctacatgctccccctgctgatgacagagaccagagcagcatggaggatggtgaagacactcctgtgaccaaactgcagcgcttcaactcctatgacattagccgggacactctctacgtctctaagtgcatctgcctcatcacacccatgtctttcatgaaggcatgtcggagcgtgctggagcaactccaccaggcagtcacttcacctcagccccctccactgccccttgagagctacatatacaacgtactctacgaggtgccgctcccacctcctggccggtccttgaagttttctggggtctatgggccaataatctgccagagaccaagtaccaatgagcttcccctatttgactttcctgtcaaagaggtttttgaactgctcggggtggagaatgtgtttcagctttttacttgtgcccttctggagtttcaaatcctgctctactcacagcattaccagagactgatgactgtggcggagacgattacagctctcatgtttcctttccagtggcagcatgtctatgtccctattctcccagcttctctcctgcatttcttagatgctcctgttccatacctgatgggtttgcattccaatggcctggatgaccggtcaaagctggagctgcctcaagaggctaacctctgctttgtggacattgacaaccacttcattgagttgccagaggacttgccacagttccccaacaaattggagtttgtccaggaagtctctgagattctcatggcatttggaattccccctgaagggaatcttcattgcagtgagagtgcctccaagctgaagaggctgcgggcctctgagcttgtctcggacaagaggaatgggaacattgctggctcccctttgcattcctacgagcttcttaaggagaatgaaactattgcccggctgcaagccttggtcaagagaactggggtgagcctggaaaagttggaagtgcgtgaagaccccagcagcaataaggatctcaaagttcagtgtgatgaagaagaactcaggatttaccagctaaacattcagatccgggaagtttttgcaaatcgtttcactcagatgtttgcagattatgaggtgtttgtcatccaacccagccaggataaggaatcctggtttaccaacagggagcaaatgcaaaactttgataaagcatcttttctgtcagatcagcctgagccctacctgcccttcctctcaagattcctggagacccagatgtttgcatctttcattgacaacaaaataatgtgtcatgatgatgatgataaagaccctgtactccgggtatttgattcccgagttgacaagatcaggctgttgaatgttcggacacctactctccgtacatccatgtaccagaagtgtaccactgtggatgaagcagagaaagcaattgagctgcgtctggcaaaaattgaccatactgcaattcacccacatttacttgacatgaagattggacaagggaaatatgagccgggcttcttccctaagctgcagtctgatgtactttccactgggccagccagcaacaagtggacgaaaaggaatgcccctgcccagtggaggcggaaagatcggcagaagcagcacacagaacacctgcgtttagataatgaccagagggagaagtacatccaggaagccaggactatgggcagcactatccgccagcccaaactgtccaacctctctccatcagtgattgcccagaccaattggaagtttgtagagggcctgctgaaggaatgccgcaataagaccaagaggatgctggtggaaaagatgggccgagaagctgtggagctagggcatggggaggtgaacatcacaggggtggaagagaacaccctgattgccagcctttgtgatctcctggaaaggatctggagtcatggactacaagtgaaacaggggaaatcagccttatggtcccacctgttacattatcaggacaaccggcagagaaaactcacatcaggaagcctcagtacctcaggaatacttcttgattcagaacgtaggaagtctgatgccagctcactcatgcctcccctgaggatctccctgattcaggatatgaggcacatccagaacatcggggaaatcaagactgatgtgggaaaggccagagcatgggtgcgactgtccatggaaaaaaagttactttccagacacctgaagcagctcctctcagaccatgagctcaccaaaaagttatataagcgctatgccttcctgcgctgtgatgacgagaaggagcagttcctctatcacctcctgtctttcaatgccgtcgattacttttgcttcaccaatgtcttcacaactatcctgatcccgtaccacattctgatcgtaccaagcaagaagctggggggctccatgttcactgccaacccatggatctgtatatcaggagaattgggtgagacacagatcatgcagattcccaggaatgtgctagagatgaccttcgagtgccagaacttggggaagcttactactgtccagattggccatgataactctgggctgtatgccaaatggctggtggagtatgtgatggtcaggaatgagatcacaggacatacctacaagttcccgtgtggccggtggttagggaagggcatggatgatggaagcctggagcggatcctagttggggagctgctcacatcccagcctgaggtggatgagaggccatgccggaccccgccgctgcagcagtcccccagtgtcatccggaggcttgttaccatctcacccaacaacaagcccaagctgaacactgggcagatccaggagtccatcggggaggcagtcaatggcattgtgaagcacttccataagcctgagaaagagcgaggcagtctgacgctgttgctctgtggagagtgtggccttgtctcggccttggaacaggctttccagcatggatttaaatcgccccggctcttcaaaaatgtcttcatttgggatttcctggaaaaagcacaaacctattatgagacattagagaagaatgaagtagtccctgaggaaaactggcatacaagagcccggaacttctgccgatttgtcactgcaatcaacaatactccccggaacatcggcaaggatggcaagtttcagatgctggtgtgcttgggagccagagatcacctcctacaccactggattgccctgctggctgactgccccatcactgcacacatgtatgaggatgtggcactgatcaaagaccatacacttgtcaattccttgattcgtgtgctgcagacattgcaggagttcaacatcacgctggagacgtcccttgtcaagggcatcgacatctgacctcccagcaccagccagcagcaggactgagaaagactcaccctgcagctctgaccttttttcccaaagggacttaagcgattgtgcaggagtaggagacaaaatgtacactcactgtaaaaagaaaactagaggatttttggaataaataatctattttagagtttatttgctgatttgctttttacacactttcatgtgaaagagtgatagggagagggagcgaggctggtgccgcttattttgaagctggtgccctccctcgccgtggccacatgctggaagcctgaggcctccctggactgagcctgtggcactgcgtgcgggacagttatgtttccttgccccgtcgcattaatgaggcccttccacatcatttttaaactaatgtttttctatattaacattattatggatatttggctttcataggccacacacaggtgtgctgcgcgggaagccccatgctccaatcaaagggatttttagtagtgcctctaagcaagcaccgatgagtcagtcccacgtattttcttttttgtcagtattgtttgggaaggagacatgccgggatgtgtcatcgtgccaaataccacatttcctgttggcacagtttcacagaagtaaacataagcatgttttaacaggtttttcttttcttttttcttttttaaaatgttttatttatttaacccgccattgtgtgtttttaagtattttctttttttaaggaaaggaaaagcttgtcacaatctaactggctatgttattattattaaatttatgttttgcaacttagaaaccagctacagtatggcccacttaataaaacacctgaaacaaaaa

SEQ ID NO: 8668 - protein, 1287 aa, Homo sapiens; identical to SEQ ID NO: 1302

SEQ ID NO: 8669 - DNA, 987 bp, Homo sapiens
cccaatagagtccctgggcccctagtgaacagtgcctattcctgtcctcttctagatttgcctgggtctccttgaatagtggccacactggctttgtcctccagtggagaatctccttgtgtgtgacccagatccatcatctcttctttcatccatttattcagcagctcttcactgggagctgctctgagccaggcactgtgccaggtgttagggaaacagacaaagtcctagcctgtcttttgcagccctcccaactctgggctgtgggtttagggatgcaatggtgggagggcagctcggctgagacaagcctggcaccctcccctgtttccttacgtagcgaggcagtctgacgctgttgctctgtggagagtgtggccttgtctcggccttggaacaggctttccagcatggatttaaatcgccccggctcttcaaaaatgtcttcatttgggatttcctggaaaaagcacaaacctattatgagacattagagaagaatgaagtagtccctgaggaaaactggcatacaagagcccggaacttctgccgatttgtcactgcaatcaacaatactccccggaacatcggcaaggatggcaagtttcagatgctggtgtgcttgggagccagagatcacctcctacaccactggattgccctgctggctgactgccccatcactgcacacatgtatgaggatgtggcactgatcaaagaccatacacttgtcaattccttgattcgtgtgctgcagacattgcaggagttcaacatcacgctggagacgtcccttgtcaagggcatcgacatctgacctcccagcaccagccagcagcaggactgagaaagactcaccctgcagctctgaccttttttcccaaagggacttaagcgattgtgcaggagtaggagacaaaatgtacactcactgtaaaaagaaaactagaggatttttggaataaataatctattttagagttt

SEQ ID NO: 8670 - protein, 68 aa, Homo sapiens [sequence omitted]

SEQ ID NO: 8671 - DNA, 3593 bp, Homo sapiens
gtgctttttagatctgtggattttttgtttacgtcaaatttgtaaaaattctggccagtatttcttctagtaatttttctgttctccccatccctaccttagggactgcagttacacatacatgtaatatctgggattgcgtagttatcccagaaccgctgatactcttttaatggcaacagttttttctctctctctgtggcttctttgggatcatttctcttgctatggcttcaagctcacttattttttctcctgcattgttgagtgtgcttttaacccagcccgtgtatttttcatctcagatattacagctttcatcttcagaagtttgagttccatgtttctagttttttgttgttgatgttgtttgtttgtttgtttttaagaggttctgctttgttgcccaggctggagtgcggtagtgtaattatagctcaccataaccttaaactcctgggctcaagtgatcttctggccttggcctcctgaatagctaggaataaaggtgtatgccaccatgtctggctcattttttttttttttttgaagagatgaggtctcactatgttgcccaggctggtcttgaagtcctggccttaaatgataccctcactttggcctcccagagtgctgggattacaggcgtaagctatcaggccctggtaatctttgattagatgccagacactgtgaattttactatttgagtcctggacacttccatattcctataaatattctcagtctttgttctgggatgtagttaagttacttagaaataatttgatttctttgtgctttcctctggcaggaccagagcatcctttaggctgtgattaattatctactactgaggcaagaccctctgagtactttactcagtgccccatgagtgattaggttttctagtctggcaggtggggacaggcattattcccagccctgtgtgagcattttgtattgtttctcctaatcctttccggtgattctttctccagccttgagtagtttctttacttgcgtgaactgacccattaccctgctgaatgccctgcagatcccctggattctctctcttctctggtactgttcatatgaactctagccaccttggtctccttaactcagggagtccaccagtctctgcctagaactcccctccctgtgccacagcctggaagctttctctaagcagttagctgggatagttctaggggttacctcatttgttacctgtttctcagggtcctgcccttcattgcctgatgtccagtattctgaagtttatcattttatattattttgcatgggttttttcctattaggcaggaaaatcagtcccttttactctatcttggctggaaatggaagagtagctagattcttaaagaatgtttgacttgatttatttgtgtgtgtatttatgtgtgtgtgtgtgtgtgtgtgtgtgtgtattctcatccagagaaagcaattgagctgcgtctggcaaaaattgaccatactgcaattcacccacatttacttgacatgaagattggacaagggaaatatgagccgggcttcttccctaagctgcagtctgatgtactttccactgggccagccagcaacaagtggacgaaaaggaatgcccctgcccagtggaggcggaaagatcggcagaagcagcacacagaacacctgcgtttagataatgaccagagggagaagtacatccaggaagccaggactatgggcagcactatccgccagcccaaactgtccaacctctctccatcagtgattgcccagaccaattggaagtttgtagagggcctgctgaaggaatgccgcaataagaccaagaggatgctggtggaaaagatgggccgagaagctgtggagctagggcatggggaggtgaacatcacaggggtggaagagaacaccctgattgccagcctttgtgatctcctggaaaggatctggagtcatggactacaagtgaaacaggggaaatcagccttatggtcccacctgttacattatcaggacaaccggcagagaaaactcacatcaggaagcctcagtacctcaggaatacttcttgattcagaacgtaggaagtctgatgccagctcactcatgcctcccctgaggatctccctgattcaggatatgaggcacatccagaacatcggggaaatcaagactgatgtgggaaaggccagagcatgggtgcgactgtccatggaaaaaaagttactttccagacacctgaagcagctcctctcagaccatgagctcaccaaaaagttatataagcgctatgccttcctgcgctgtgatgacgagaaggagcagttcctctatcacctcctgtctttcaatgccgtcgattacttttgcttcaccaatgtcttcacaactatcctgatcccgtaccacattctgatcgtaccaagcaagaagctggggggctccatgttcactgccaacccatggatctgtatatcaggagaattgggtgagacacagatcatgcagattcccaggaatgtgctagagatgaccttcgagtgccagaacttggggaagcttactactgtccagattggccatgataactctgggctgtatgccaaatggctggtggagtatgtgatggtcaggaatgagatcacaggacatacctacaagttcccgtgtggccggtggttagggaagggcatggatgatggaagcctggagcggatcctagttggggagctgctcacatcccagcctgaggtggatgagaggccatgccggaccccgccgctgcagcagtcccccagtgtcatccggaggcttgttaccatctcacccaacaacaagcccaagctgaacactgggcagatccaggagtccatcggggaggcagtcaatggcattgtgaagcacttccataagcctgagaaagagcgaggcagtctgacgctgttgctctgtggagagtgtggccttgtctcggccttggaacaggctttccagcatggatttaaatcgccccggctcttcaaaaatgtcttcatttgggatttcctggaaaaagcacaaacctattatgagacattagagaagaatgaagtagtccctgaggaaaactggcatacaagagcccggaacttctgccgatttgtcactgcaatcaacaatactccccggaacatcggcaaggatggcaagtttcagatgctggtgtgcttgggagccagagatcacctcctacaccactggattgccctgctggctgactgccccatcactgcacacatgtatgaggatgtggcactgatcaaagaccatacacttgtcaattccttgattcgtgtgctgcagacattgcaggagttcaacatcacgctggagacgtcccttgtcaagggcatcgacatctgacctcccagcaccagccagcagcaggactgagaaagactcaccctgcagctctgaccttttttcccaaagggacttaagcgattgtgcaggagtaggagacaaaatgtacactcactgtaaaaagaaaactagaggatttttggaataaataatctattttagagttt

SEQ ID NO: 8672 - protein, 630 aa, Homo sapiens; identical to SEQ ID NO: 8666

SEQ ID NO: 8673 - DNA, 4302 bp, Homo sapiens
ctcgctcgggccgcggcgctctcggctagctgcagcggcggcggcgcggaggggaaggcatccaggatgcggtgcggggcggcccggtgcccccccgccccgtcacggcagccgcggcggccgaggggaccgggccagggccgggggcggcggcccgagccgcggtagcggcggcggcgggaggggcggcctgagggcggacgggcgggcgcccgggttgcgggggctcggtgccgctccgcactgcccggccggtctcggccccggcgccatgagtggcggcggcggcggagggggctcggcgcccagtcgcttcgccgactactttgtcatctgcggactggacacggagaccgggctggagccggacgagctgtcggcattatgccagtacatacaggcttctaaagccagggatggtgccagccctttcatttcaagtacgactgaaggagaaaattttgagcagacaccattgagaagaacattcaaatctaaggtccttgcacgatatcctgagaacgtagaatggaatccctttgaccaagatgcagtaggaatgctatgtatgccgaaagggctggcattcaagacccaggctgatcccagggagccccaattccatgcctttattatcacaagggaggatggctctcggacatttgggtttgccctcacattttatgaagaggtgactagcaagcagatctgcagtgcaatgcagaccctctaccacatgcacaatgctgagtatgatgtcctacatgctccccctgctgatgacagagaccagagcagcatggaggatggtgaagacactcctgtgaccaaactgcagcgcttcaactcctatgacattagccgggacactctctacgtctctaagtgcatctgcctcatcacacccatgtctttcatgaaggcatgtcggagcgtgctggagcaactccaccaggcagtcacttcacctcagccccctccactgccccttgagagctacatatacaacgtactctacgaggtgccgctcccacctcctggccggtccttgaagttttctggggtctatgggccaataatctgccagagaccaagtaccaatgagcttcccctatttgactttcctgtcaaagaggtttttgaactgctcggggtggagaatgtgtttcagctttttacttgtgcccttctggagtttcaaatcctgctctactcacagcattaccagagactgatgactgtggcggagacgattacagctctcatgtttcctttccagtggcagcatgtctatgtccctattctcccagcttctctcctgcatttcttagatgctcctgttccatacctgatgggtttgcattccaatggcctggatgaccggtcaaagctggagctgcctcaagaggctaacctctgctttgtggacattgacaaccacttcattgagttgccagaggacttgccacagttccccaacaaattggagtttgtccaggaagtctctgagattctcatggcatttggaattccccctgaagggaatcttcattgcagtgagagtgcctccaagctgaagaggctgcgggcctctgagcttgtctcggacaagaggaatgggaacattgctggctcccctttgcattcctacgagcttcttaaggagaatgaaactattgcccggctgcaagccttggtcaagagaactggggtgagcctggaaaagttggaagtgcgtgaagaccccagcagcaataaggatctcaaagttcagtgtgatgaagaagaactcaggatttaccagctaaacattcagatccgggaagtttttgcaaatcgtttcactcagatgtttgcagattatgaggtgtttgtcatccaacccagccaggataaggaatcctggtttaccaacagggagcaaatgcaaaactttgataaagcatcttttctgtcagatcagcctgagccctacctgcccttcctctcaagattcctggagacccagatgtttgcatctttcattgacaacaaaataatgtgtcatgatgatgatgataaagaccctgtactccgggtatttgattcccgagttgacaagatcaggctgttgaatgttcggacacctactctccgtacatccatgtaccagaagtgtaccactgtggatgaagcagagaaagcaattgagctgcgtctggcaaaaattgaccatactgcaattcacccacatttacttgacatgaagattggacaagggaaatatgagccgggcttcttccctaagctgcagtctgatgtactttccactgggccagccagcaacaagtggacgaaaaggaatgcccctgcccagtggaggcggaaagatcggcagaagcagcacacagaacacctgcgtttagataatgaccagagggagaagtacatccaggaagccaggactatgggcagcactatccgccagcccaaactgtccaacctctctccatcagtgattgcccagaccaattggaagtttgtagagggcctgctgaaggaatgccgcaataagaccaagaggatgctggtggaaaagatgggccgagaagctgtggagctagggcatggggaggtgaacatcacaggggtggaagagaacaccctgattgccagcctttgtgatctcctggaaaggatctggagtcatggactacaagtgaaacaggggaaatcagccttatggtcccacctgttacattatcaggacaaccggcagagaaaactcacatcaggaagcctcagtacctcaggaatacttcttgattcagaacgtaggaagtctgatgccagctcactcatgcctcccctgaggatctccctgattcaggatatgaggcacatccagaacatcggggaaatcaagactgatgtgggaaaggccagagcatgggtgcgactgtccatggaaaaaaagttactttccagacacctgaagcagctcctctcagaccatgagctcaccaaaaagttatataagcgctatgccttcctgcgctgtgatgacgagaaggagcagttcctctatcacctcctgtctttcaatgccgtcgattacttttgcttcaccaatgtcttcacaactatcctgatcccgtaccacattctgatcgtaccaagcaagaagctggggggctccatgttcactgccaacccatggatctgtatatcaggagaattgggtgagacacagatcatgcagattcccaggaatgtgctagagatgaccttcgagtgccagaacttggggaagcttactactgtccagattggccatgataactctgggctgtatgccaaatggctggtggagtatgtgatggtcaggaatgagatcacaggacatacctacaagttcccgtgtggccggtggttagggaagggcatggatgatggaagcctggagcggatcctagttggggagctgctcacatcccagcctgaggtggatgagaggccatgccggaccccgccgctgcagcagtcccccagtgtcatccggaggcttgttaccatctcacccaacaacaagcccaagctgaacactgggcagatccaggagtccatcggggaggcagtcaatggcattgtgaagcacttccataagcctgagaaagagcgaggcagtctgacgctgttgctctgtggagagtgtggccttgtctcggccttggaacaggctttccagcatggatttaaatcgccccggctcttcaaaaatgtcttcatttgggatttcctggaaaaagcacaaacctattatgagacattagagaagaatgaagtagtccctgaggaaaactggcatacaagagcccggaacttctgccgatttgtcactgcaatcaacaatactccccggaacatcggcaaggatggcaagtttcagatgctggtgtgcttgggagccagagatcacctcctacaccactggattgccctgctggctgactgccccatcactgcacacatgtatgaggatgtggcactgatcaaagaccatacacttgtcaattccttgattcgtgtgctgcagacattgcaggagttcaacatcacgctggagacgtcccttgtcaagggcatcgacatctgacctcccagcaccagccagcagcaggactgagaaagactcaccctgcagctctgaccttttttcccaaagggacttaagcgattgtgcaggagtaggagacaaaatgtacactcactgtaaaaagaaaactagaggatttttggaataaataatctattttagagttt

SEQ ID NO: 8674 - protein, 1287 aa, Homo sapiens; identical to SEQ ID NO: 1302

SEQ ID NO: 8675 - DNA, 2845 bp, Homo sapiens
gcgattggtgggcggggggccgggcctgggccggcggggagcggattggtcggaaagtaggttagtggtgcgacatttagggaaggcagaaagtaggtcagggacggaggtgcctgtttacccgcgccggactcaccgccgccgccgccgcgggatccgagtgcgggcgcgggcgcgggcgctcccggcgagccacggtggtgctggctagagtgtatacgtttggacccaagcttaacttttccaatgtggaatcctgggccttcattggttccgatgtcataggaatctacgctagagggcttcctgtgtgccgggcactgtggtttttggaagaagctgaccgcctgaaaagaaattataaaacatgaaaatcgctttgaggtgaccaagtccagaggcccctaactcctcccaagctggatctggggtgtaagaactgtgacttcagatcatccaatggcagaccagagaatggacatttcttcaaccatcagtgatttcatgtccccgggccccaccgacctgctttccagctctcttggtaccagtggtgtggattgcaaccgcaaacggaaaggcagctccactgactaccaagaaagcatggacacagacaaagatgaccctcatggaaggttagaatatacagaacaccaaggaaggataaaaaatgcaagggaagctcacagtcagattgaaaagcggcgtcgggataaaatgaacagttttatagatgaattggcttctttggtaccaacatgcaacgcaatgtccaggaaattagataaacttactgtgctaaggatggctgttcagcacatgaaaacattaagaggtgccaccaatccatacacagaagcaaactacaaaccaacttttctatcagacgatgaattgaaacacctcattctcagggcagcagatggatttttgtttgtcgtaggatgtgaccgagggaagatactctttgtctcagagtctgtcttcaagatcctcaactacagccagaatgatctgattggtcagagtttgtttgactacctgcatcctaaagatattgccaaagtcaaggagcagctctcctcctctgacaccgcaccccgggagcggctcatagatgcaaaaactggacttccagttaaaacagatataacccctgggccatctcgattatgttctggagcacgacgttctttcttctgtaggatgaagtgtaacaggccttcagtaaaggttgaagacaaggacttcccctctacctgctcaaagaaaaaagcagatcgaaaaagcttctgcacaatccacagcacaggctatttgaaaagctggccacccacaaagatggggctggatgaagacaacgaaccagacaatgaggggtgtaacctcagctgcctcgtcgcaattggacgactgcattctcatgtagttccacaaccagtgaacggggaaatcagggtgaaatctatggaatatgtttctcggcacgcgatagatggaaagtttgtttttgtagaccagagggcaacagctattttggcatatttaccacaagaacttctaggcacatcgtgttatgaatattttcaccaagatgacataggacatcttgcagaatgtcataggcaagttttacagacgagagaaaaaattacaactaattgctataaatttaaaatcaaagatggttcttttatcacactacggagtcgatggttcagtttcatgaacccttggaccaaggaagtagaatatattgtctcaactaacactgttgttttagccaacgtcctggaaggcggggacccaaccttcccacagctcacagcatccccccacagcatggacagcatgctgccctctggagaaggtggcccaaagaggacccaccccactgttccagggattccagggggaacccgggctggggcaggaaaaataggccgaatgattgctgaggaaatcatggaaatccacaggcaaagggtcatcgccttctagctgtggctccagcccattgaacatcacgagtacgcctccccctgatgcctcttctccaggaggcaagaagattttaaatggagggactccagacattccttccagtggcctactatcaggccaggctcaggagaacccaggttatccatattctgatagttcttctattcttggtgagaacccccacataggtatagacatgattgacaacgaccaaggatcaagtagtcccagtaatgatgaggcagcaatggctgtcatcatgagcctcttggaagcagatgctggactgggtggccctgttgactttagtgacttgccatggccgctgtaaacactacatgttgctttggcaacagctatagtatcaaagtgcattactggtggagttttacagtctgtgaagcttactggataaggagagaatagcttttatgtactgacttcataaaagccatctcagagccattgatacaagtcaatcttactatatgtaacttcagacaaagtggaactaagcctgctccagtgtttcctcatcattgattattgggctagctgtggatagcttgcattaattgtatattttggattctgtttgtgttgaattttttaatcattgtgcacagaagcatcattggtagcttttatatgcaaatggtcatttcagatgtatggtgtttttacactacaaagaagtcccccatgtggatatttcttatactaattgtatcataaagccgtttattcttccttgtaagaatcctttactataaatatgggttaaagtataatgtactagacagttaaatatttttaataaatgtttcccttgttctat

SEQ ID NO: 8676 - protein, 514 aa, Homo sapiens
MADQRMDISSTISDFMSPGPTDLLSSSLGTSGVDCNRKRKGSSTDYQESMDTDKDDPHGRLEYTEHQGRIKNAREAHSQIEKRRRDKMNSFIDELASLVPTCNAMSRKLDKLTVLRMAVQHMKTLRGATNPYTEANYKPTFLSDDELKHLILRAADGFLFVVGCDRGKILFVSESVFKILNYSQNDLIGQSLFDYLHPKDIAKVKEQLSSSDTAPRERLIDAKTGLPVKTDITPGPSRLCSGARRSFFCRMKCNRPSVKVEDKDFPSTCSKKKADRKSFCTIHSTGYLKSWPPTKMGLDEDNEPDNEGCNLSCLVAIGRLHSHVVPQPVNGEIRVKSMEYVSRHAIDGKFVFVDQRATAILAYLPQELLGTSCYEYFHQDDIGHLAECHRQVLQTREKITTNCYKFKIKDGSFITLRSRWFSFMNPWTKEVEYIVSTNTVVLANVLEGGDPTFPQLTASPHSMDSMLPSGEGGPKRTHPTVPGIPGGTRAGAGKIGRMIAEEIMEIHRQRVIAF

SEQ ID NO: 8677 - DNA, 2719 bp, Homo sapiens
gacatttagggaaggcagaaagtaggtcagggacggaggtgcctgtttacccgcgccggactcaccgccgccgccgccgcgggatccgagtgcgggcgcgggcgcgggcgctcccggcgagccacggtggtgctggctagagtgtatacgtttggacccaagcttaacttttccaatgtggaatcctgggccttcattggtttttggaagaagctgaccgcctgaaaagaaattataaaacatgaaaatcgctttgaggtgaccaagtccagaggcccctaactcctcccaagctggatctggggtgtaagaactgtgacttcagatcatccaatggcagaccagagaatggacatttcttcaaccatcagtgatttcatgtccccgggccccaccgacctgctttccagctctcttggtaccagtggtgtggattgcaaccgcaaacggaaaggcagctccactgactaccaagaaagcatggacacagacaaagatgaccctcatggaaggttagaatatacagaacaccaaggaaggataaaaaatgcaagggaagctcacagtcagattgaaaagcggcgtcgggataaaatgaacagttttatagatgaattggcttctttggtaccaacatgcaacgcaatgtccaggaaattagataaacttactgtgctaaggatggctgttcagcacatgaaaacattaagaggtgccaccaatccatacacagaagcaaactacaaaccaacttttctatcagacgatgaattgaaacacctcattctcagggcagcagatggatttttgtttgtcgtaggatgtgaccgagggaagatactctttgtctcagagtctgtcttcaagatcctcaactacagccagaatgatctgattggtcagagtttgtttgactacctgcatcctaaagatattgccaaagtcaaggagcagctctcctcctctgacaccgcaccccgggagcggctcatagatgcaaaaactggacttccagttaaaacagatataacccctgggccatctcgattatgttctggagcacgacgttctttcttctgtaggatgaagtgtaacaggccttcagtaaaggttgaagacaaggacttcccctctacctgctcaaagaaaaaagcagatcgaaaaagcttctgcacaatccacagcacaggctatttgaaaagctggccacccacaaagatggggctggatgaagacaacgaaccagacaatgaggggtgtaacctcagctgcctcgtcgcaattggacgactgcattctcatgtagttccacaaccagtgaacggggaaatcagggtgaaatctatggaatatgtttctcggcacgcgatagatggaaagtttgtttttgtagaccagagggcaacagctattttggcatatttaccacaagaacttctaggcacatcgtgttatgaatattttcaccaagatgacataggacatcttgcagaatgtcataggcaagttttacagacgagagaaaaaattacaactaattgctataaatttaaaatcaaagatggttcttttatcacactacggagtcgatggttcagtttcatgaacccttggaccaaggaagtagaatatattgtctcaactaacactgttgttttagccaacgtcctggaaggcggggacccaaccttcccacagctcacagcatccccccacagcatggacagcatgctgccctctggagaaggtggcccaaagaggacccaccccactgttccagggattccagggggaacccgggctggggcaggaaaaataggccgaatgattgctgaggaaatcatggaaatccacaggcaaagggtcatcgccttctagctgtggctccagcccattgaacatcacgagtacgcctccccctgatgcctcttctccaggaggcaagaagattttaaatggagggactccagacattccttccagtggcctactatcaggccaggctcaggagaacccaggttatccatattctgatagttcttctattcttggtgagaacccccacataggtatagacatgattgacaacgaccaaggatcaagtagtcccagtaatgatgaggcagcaatggctgtcatcatgagcctcttggaagcagatgctggactgggtggccctgttgactttagtgacttgccatggccgctgtaaacactacatgttgctttggcaacagctatagtatcaaagtgcattactggtggagttttacagtctgtgaagcttactggataaggagagaatagcttttatgtactgacttcataaaagccatctcagagccattgatacaagtcaatcttactatatgtaacttcagacaaagtggaactaagcctgctccagtgtttcctcatcattgattattgggctagctgtggatagcttgcattaattgtatattttggattctgtttgtgttgaattttttaatcattgtgcacagaagcatcattggtagcttttatatgcaaatggtcatttcagatgtatggtgtttttacactacaaagaagtcccccatgtggatatttcttatactaattgtatcataaagccgtttattcttccttgtaagaatcctttactataaatatgggttaaagtataatgtactagacagttaaatatttttaataaatgtttcccttgttctat

SEQ ID NO: 8678 - protein, 514 aa, Homo sapiens; identical to SEQ ID NO: 8676

SEQ ID NO: 8679 - DNA, 2746 bp, Homo sapiens
gtttacccgcgccggactcaccgccgccgccgccgcgggatccgagtgcgggcgcgggcgcgggcgctcccggcgagccacggtggtgctggctagagtgtatacgtttggacccaagcttaacttttccaatgtggaatcctgggccttcattggtttttggaagaagctgaccgcctgaaaagaaattataaaacatgaaaatcgctttgaggtgaccaagtccagaggcccctaactcctcccaagctggatctggggtgtaagaactgtgacttcagatcatccaatggcagaccagagaatggacatttcttcaaccatcagtgatttcatgtccccgggccccaccgacctgctttccagctctcttggtaccagtggtgtggattgcaaccgcaaacggaaaggcagctccactgactaccattcacaggtcgaatttggggagcacaatggctggaggtcagatgcccactaggagatgctatgattaatatagaaagcatggacacagacaaagatgaccctcatggaaggttagaatatacagaacaccaaggaaggataaaaaatgcaagggaagctcacagtcagattgaaaagcggcgtcgggataaaatgaacagttttatagatgaattggcttctttggtaccaacatgcaacgcaatgtccaggaaattagataaacttactgtgctaaggatggctgttcagcacatgaaaacattaagaggtgccaccaatccatacacagaagcaaactacaaaccaacttttctatcagacgatgaattgaaacacctcattctcagggcagcagatggatttttgtttgtcgtaggatgtgaccgagggaagatactctttgtctcagagtctgtcttcaagatcctcaactacagccagaatgatctgattggtcagagtttgtttgactacctgcatcctaaagatattgccaaagtcaaggagcagctctcctcctctgacaccgcaccccgggagcggctcatagatgcaaaaactggacttccagttaaaacagatataacccctgggccatctcgattatgttctggagcacgacgttctttcttctgtaggatgaagtgtaacaggccttcagtaaaggttgaagacaaggacttcccctctacctgctcaaagaaaaaagcagatcgaaaaagcttctgcacaatccacagcacaggctatttgaaaagctggccacccacaaagatggggctggatgaagacaacgaaccagacaatgaggggtgtaacctcagctgcctcgtcgcaattggacgactgcattctcatgtagttccacaaccagtgaacggggaaatcagggtgaaatctatggaatatgtttctcggcacgcgatagatggaaagtttgtttttgtagaccagagggcaacagctattttggcatatttaccacaagaacttctaggcacatcgtgttatgaatattttcaccaagatgacataggacatcttgcagaatgtcataggcaagttttacagacgagagaaaaaattacaactaattgctataaatttaaaatcaaagatggttcttttatcacactacggagtcgatggttcagtttcatgaacccttggaccaaggaagtagaatatattgtctcaactaacactgttgttttagccaacgtcctggaaggcggggacccaaccttcccacagctcacagcatccccccacagcatggacagcatgctgccctctggagaaggtggcccaaagaggacccaccccactgttccagggattccagggggaacccgggctggggcaggaaaaataggccgaatgattgctgaggaaatcatggaaatccacaggcaaagggtcatcgccttctagctgtggctccagcccattgaacatcacgagtacgcctccccctgatgcctcttctccaggaggcaagaagattttaaatggagggactccagacattccttccagtggcctactatcaggccaggctcaggagaacccaggttatccatattctgatagttcttctattcttggtgagaacccccacataggtatagacatgattgacaacgaccaaggatcaagtagtcccagtaatgatgaggcagcaatggctgtcatcatgagcctcttggaagcagatgctggactgggtggccctgttgactttagtgacttgccatggccgctgtaaacactacatgttgctttggcaacagctatagtatcaaagtgcattactggtggagttttacagtctgtgaagcttactggataaggagagaatagcttttatgtactgacttcataaaagccatctcagagccattgatacaagtcaatcttactatatgtaacttcagacaaagtggaactaagcctgctccagtgtttcctcatcattgattattgggctagctgtggatagcttgcattaattgtatattttggattctgtttgtgttgaattttttaatcattgtgcacagaagcatcattggtagcttttatatgcaaatggtcatttcagatgtatggtgtttttacactacaaagaagtcccccatgtggatatttcttatactaattgtatcataaagccgtttattcttccttgtaagaatcctttactataaatatgggttaaagtataatgtactagacagttaaatatttttaataaatgtttcccttgttctat

SEQ ID NO: 8680 - protein, 471 aa, Homo sapiens
MINIESMDTDKDDPHGRLEYTEHQGRIKNAREAHSQIEKRRRDKMNSFIDELASLVPTCNAMSRKLDKLTVLRMAVQHMKTLRGATNPYTEANYKPTFLSDDELKHLILRAADGFLFVVGCDRGKILFVSESVFKILNYSQNDLIGQSLFDYLHPKDIAKVKEQLSSSDTAPRERLIDAKTGLPVKTDITPGPSRLCSGARRSFFCRMKCNRPSVKVEDKDFPSTCSKKKADRKSFCTIHSTGYLKSWPPTKMGLDEDNEPDNEGCNLSCLVAIGRLHSHVVPQPVNGEIRVKSMEYVSRHAIDGKFVFVDQRATAILAYLPQELLGTSCYEYFHQDDIGHLAECHRQVLQTREKITTNCYKFKIKDGSFITLRSRWFSFMNPWTKEVEYIVSTNTVVLANVLEGGDPTFPQLTASPHSMDSMLPSGEGGPKRTHPTVPGIPGGTRAGAGKIGRMIAEEIMEIHRQRVIAF

SEQ ID NO: 8681 - DNA, 3364 bp, Homo sapiens
gtttacccgcgccggactcaccgccgccgccgccgcgggatccgagtgcgggcgcgggcgcgggcgctcccggcgagccacggtggtgctggctagagtgtatacgtttggacccaagcttaacttttccaatgtggaatcctgggccttcattggtttttggaagaagctgaccgcctgaaaagaaattataaaacatgaaaatcgctttgaggtgaccaagtccagaggcccctaactcctcccaagctggatctggggtgtaagaactgtgacttcagatcatccaatggcagaccagagaatggacatttcttcaaccatcagtgatttcatgtccccgggccccaccgacctgctttccagctctcttggtaccagtggtgtggattgcaaccgcaaacggaaaggcagctccactgactaccattcacaggtcgaatttggggagcacaatggctggaggtcagatgcccactaggagatgctatgattaatatagaaagcatggacacagacaaagatgaccctcatggaaggttagaatatacagaacaccaaggaaggataaaaaatgcaagggaagctcacagtcagattgaaaagcggcgtcgggataaaatgaacagttttatagatgaattggcttctttggtaccaacatgcaacgcaatgtccaggaaattagataaacttactgtgctaaggatggctgttcagcacatgaaaacattaagaggtgccaccaatccatacacagaagcaaactacaaaccaacttttctatcagacgatgaattgaaacacctcattctcagggcagcagatggatttttgtttgtcgtaggatgtgaccgagggaagatactctttgtctcagagtctgtcttcaagatcctcaactacagccagaatgatctgattggtcagagtttgtttgactacctgcatcctaaagatattgccaaagtcaaggagcagctctcctcctctgacaccgcaccccgggagcggctcatagatgcaaaaactggacttccagttaaaacagatataacccctgggccatctcgattatgttctggagcacgacgttctttcttctgtaggatgaagtgtaacaggccttcagtaaaggttgaagacaaggacttcccctctacctgctcaaagaaaaaagcagatcgaaaaagcttctgcacaatccacagcacaggctatttgaaaagctggccacccacaaagatggggctggatgaagacaacgaaccagacaatgaggggtgtaacctcagctgcctcgtcgcaattggacgactgcattctcatgtagttccacaaccagtgaacggggaaatcagggtgaaatctatggaatatgtttctcggcacgcgatagatggaaagtttgtttttgtagaccagagggcaacagctattttggcatatttaccacaagaacttctaggcacatcgtgttatgaatattttcaccaagatgacataggacatcttgcagaatgtcataggcaagttttacagacgagagaaaaaattacaactaattgctataaatttaaaatcaaagatggttcttttatcacactacggagtcgatggttcagtttcatgaacccttggaccaaggaagtagaatatattgtctcaactaacactgttgttttagccaacgtcctggaaggcggggacccaaccttcccacagctcacagcatccccccacagcatggacagcatgctgccctctggagaaggtggcccaaagaggacccaccccactgttccagggattccagggggaacccgggctggggcaggaaaaataggccgaatgattgctgaggaaatcatggaaatccacaggcaaagggtcatcgccttctagctgtggctccagcccattgaacatcacgagtacgcctccccctgatgcctcttctccaggaggcaagaagattttaaatggagggactccagacattccttccagtggcctactatcaggccaggctcaggagaacccaggttatccatattctgatagttcttctattcttggtgagaacccccacataggtatagacatgattgacaacgaccaaggatcaagtagtcccagtaatgatgaggcagcaatggctgtcatcatgagcctcttggaagcagatgctggactgggtggccctgttgactttagtgacttgccatggccgctgtaaacactacatgttgctttggcaacagctatagtatcaaagtgcattactggtggagttttacagtctgtgaagcttactggataaggagagaatagcttttatgtactgacttcataaaagccatctcagagccattgatacaagtcaatcttactatatgtaacttcagacaaagtggaactaagcctgctccagtgtttcctcatcattgattattgggctagctgtggatagcttgcattaattgtatattttggattctgtttgtgttgaattttttaatcattgtgcacagaagcatcattggtagcttttatatgcaaatggtcatttcagatgtatggtgtttttacactacaaagaagtcccccatgtggatatttcttatactaattgtatcataaagccgtttattcttccttgtaagaatcctttactataaatatgggttaaagtataatgtactagacagttaaatatttttaataaatgtttcccttgttctataaatactgttcacatttcaaataattagaaaaaaaatcctacgtgttgcagggctggattataagtttctacagtgggtgttcaaggatgatctacgccagtagcatttgtggtgcttttctggccttcataacgattctgggcttgcataatttccccatgctactagcttagctgtgttgttaaaatagttcatttataaattgttgcaattttaatttatgtgagaacaaagatgttactgcttatccacaaacatcgaatcctctgaaattataaattcaagattatatttaacaaattggcttctctaatgctgcacctctctaatactacttcagttatatagtaagtgaccccagtcctaaagcacctaaatatttgatcccttcttgaattggaccacagaatatttagaatagcatttgcataaataatttgctaagcaaagtagcatggtataatggaaaaagcactgaactagtatgagaaactggctctgaaacttagggtgactatatgacctagtaaagtcattttgcccttcatatcaagttggactagaaaatactcttttcagctctaataaatattgttttgatttatagtacattttat

SEQ ID NO: 8682 - protein, 471 aa, Homo sapiens; identical to SEQ ID NO: 8680

SEQ ID NO: 8683 - DNA, 818 bp, Homo sapiens
attcctttcaattttaggtaaaagaaacctttttaccagatagtgacgagtggctaccatgattaataagtgactagacctcatggtcctcctcatactaaaaggtgaacagtgcaagctgtcggtggatctaccattctggggtcttggggacagtggccctcttctcacagctcccggtgaatgctgcaatgatcattggtaggactgttaggctttgtttctcaagaggataatctgattgggaaaagaataagagtgcagctgcagcccatccttgtgaagaaggtaccagtgcgctctcaaagccaagtcttgaaaataatagcgaatgctgtattggataacagccatgccagatacagagaagccacagatggcattgtcaccagaaaatggaagcacaaagcgctttgggtaacagcaattcaagaatgactgcagagaaaatctattaagaaattcaaatgcagatttcaatatttactccttttcattctcttcctctctctctcgctcacttgctctttttctctctcccaccttgtttttctcgctctccttttttttgcatacagtttctcagtaaaatacatttgattaaattttataacaaacaagcttatgaaatgcagatatacaaaaaggaaaacataagaagcatgcataattctaccactgaaaaatactactaaaatttggtatttaaacttttgaatgtttgtcactgcacttgcatgtgtgtgtaaatataatctccaactctgcagagaaatacaagaattgttatgaaccttaataaactcccaaaagatttc

SEQ ID NO: 8684 - protein, 40 aa, Homo sapiens
MVLLILKGEQCKLSVDLPFWGLGDSGPLLTAPGECCNDHW

SEQ ID NO: 8685 - DNA, 3473 bp, Homo sapiens
agcggcagccaatgaaacgaagcgctgaggaaagtggcttgggtttgaatattgtggttgagtctgaagcgctgggaggcggacattaaagtgaagtggttgcggtaacctggcctgggcctgaagtgagtgagaggcacatgaagagaagtattcaagtatttatacagataggaatcaagataatcaacaatgtctgtcactgaggaagacctgtgccaccatatgaaagtagtagttcgtgtacgtccggaaaacactaaagaaaaagcagctggatttcataaagtggttcatgttgtggataaacatatcctagtttttgatcccaaacaagaagaagtcagttttttccatggaaagaaaactacaaatcaaaatgttataaagaaacaaaataaggatcttaaatttgtatttgatgctgtttttgatgaaacgtcaactcagtcagaagtttttgaacacactactaagccaattcttcgtagttttttgaatggatataattgcacagtacttgcctatggtgccactggtgctgggaagacccacactatgctaggatcagctgatgaacctggagtgatgtatctaacaatgttacacctttacaaatgcatggatgagattaaagaagagaaaatatgtagtactgcagtttcatatctggaggtatataatgaacagattcgtgatctcttagtaaattcagggccacttgctgtccgggaagatacccaaaaaggggtggtcgttcatggacttactttacaccagcccaaatcctcagaagaaattttacatttattggataatggaaacaaaaacaggacacaacatcccactgatatgaatgccacatcttctcgttctcatgctgttttccaaatttacttgcgacaacaagacaaaacagcaagtatcaatcaaaatgtccgtattgccaagatgtcactcattgacctggcaggatctgagcgagcaagtacttccggtgctaaggggacccgatttgtagaaggcacaaatattaatagatcacttttagctcttgggaatgtcatcaatgccttagcagattcaaagagaaagaatcagcatatcccttacagaaatagtaagcttactcgcttgttaaaggattctcttggaggaaactgtcaaactataatgatagctgctgttagtccttcctctgtattctacgatgacacatataacactcttaagtatgctaaccgggcaaaggacattaaatcttctttgaagagcaatgttcttaatgtcaataatcatataactcaatatgtaaagatctgtaatgagcagaaggcagagattttattgttaaaagaaaaactaaaagcctatgaagaacagaaagccttcactaatgaaaatgaccaagcaaagttaatgatttcaaaccctcaggaaaaagaaatcgaaaggtttcaagaaatcctgaactgcttgttccagaatcgagaagaaattagacaagaatatctgaagttggaaatgttacttaaagaaaatgaacttaaatcattctaccaacaacagtgccataaacaaatagaaatgatgtgttctgaagacaaagtagaaaaggccactggaaaacgagatcatagacttgcaatgttgaaaactcgtcgctcctacctggagaaaaggagggaggaggaattgaagcaatttgatgagaatactaattggctccatcgtgtcgaaaaagaaatgggactcttaagtcaaaacggtcatattccaaaggaactcaagaaagatcttcattgtcaccatttgcacctccagaacaaagatttgaaagcacaaattagacatatgatggatctagcttgtcttcaggaacagcaacacaggcagactgaagcagtattgaatgctttacttccaaccctaagaaaacaatattgcacattaaaagaagccggcctgtcaaatgctgcttttgaatctgacttcaaagagatcgaacatttggtagagaggaaaaaagtggtagtttgggctgaccaaactgccgaacaaccaaagcaaaacgatctaccagggatttctgttcttatgacctttccacaacttggaccagttcagcctattccttgttgctcatcttcaggtggaactaatctggttaagattcctacagaaaaaagaactcggagaaaactaatgccatctcccttgaaaggacagcatactctaaagtctccaccatctcaaagtgtgcagctcaatgattctcttagcaaagaacttcagcctattgtatatacaccagaagactgtagaaaagcttttcaaaatccgtctacagtaaccttaatgaaaccatcatcatttactacaagttttcaggctatcagctcaaacataaacagtgataattgtctgaaaatgttgtgtgaagtagctatccctcataatagaagaaaagaatgtggacaggaggacttggactctacatttactatatgtgaagacatcaagagctcgaagtgtaaattacccgaacaagaatcactaccaaatgataacaaagacattttacaacggcttgatccttcttcattctcaactaagcattctatgcctgtaccaagcatggtgccatcctacatggcaatgactactgctgccaaaaggaaacggaaattaacaagttctacatcaaacagttcgttaactgcagacgtaaattctggatttgccaaacgtgttcgacaagataattcaagtgagaagcacttacaagaaaacaaaccaacaatggaacataaaagaaacatctgtaaaataaatccaagcatggttagaaaatttggaagaaatatttcaaaaggaaatctaagataaatcacttcaaaaccaagcaaaatgaagttgatcaaatctgcttttcaaagtttatcaataccctttcaaaaatatatttaaaatctttgaaagaagacccatcttaaagctaagtttacccaagtactttcagcaagcagaaaaatgaaactctttgttttcttcttttgtgttctaaaaaaataaaatttcaaaagaaaaggttgtcttttaagttttttaaatatttgttgccttttaaaatccctgagtgtaagttaccatggtggcagcttagttttactatgccacaacaagttgactaggacattttagtaaatggtagtgagttaaattatctttattattttttaaaaataagaatttagaagtggtaaaattatggcccaagatgtatttggttctctattatgttttgatacattattttaatcatatatatgactttccttttcaaaaatactttaatgtacaagtgtaaatatatgtgcccataaaatcattgtaaatattatttagtcatcacaaataaaatattgtcccttgctacttgatatattaaagatgtagattttaaagtgttt

SEQ ID NO: 8686 - protein, 898 aa, Homo sapiens
MSVTEEDLCHHMKVVVRVRPENTKEKAAGFHKVVHVVDKHILVFDPKQEEVSFFHGKKTTNQNVIKKQNKDLKFVFDAVFDETSTQSEVFEHTTKPILRSFLNGYNCTVLAYGATGAGKTHTMLGSADEPGVMYLTMLHLYKCMDEIKEEKICSTAVSYLEVYNEQIRDLLVNSGPLAVREDTQKGVVVHGLTLHQPKSSEEILHLLDNGNKNRTQHPTDMNATSSRSHAVFQIYLRQQDKTASINQNVRIAKMSLIDLAGSERASTSGAKGTRFVEGTNINRSLLALGNVINALADSKRKNQHIPYRNSKLTRLLKDSLGGNCQTIMIAAVSPSSVFYDDTYNTLKYANRAKDIKSSLKSNVLNVNNHITQYVKICNEQKAEILLLKEKLKAYEEQKAFTNENDQAKLMISNPQEKEIERFQEILNCLFQNREEIRQEYLKLEMLLKENELKSFYQQQCHKQIEMMCSEDKVEKATGKRDHRLAMLKTRRSYLEKRREEELKQFDENTNWLHRVEKEMGLLSQNGHIPKELKKDLHCHHLHLQNKDLKAQIRHMMDLACLQEQQHRQTEAVLNALLPTLRKQYCTLKEAGLSNAAFESDFKEIEHLVERKKVVVWADQTAEQPKQNDLPGISVLMTFPQLGPVQPIPCCSSSGGTNLVKIPTEKRTRRKLMPSPLKGQHTLKSPPSQSVQLNDSLSKELQPIVYTPEDCRKAFQNPSTVTLMKPSSFTTSFQAISSNINSDNCLKMLCEVAIPHNRRKECGQEDLDSTFTICEDIKSSKCKLPEQESLPNDNKDILQRLDPSSFSTKHSMPVPSMVPSYMAMTTAAKRKRKLTSSTSNSSLTADVNSGFAKRVRQDNSSEKHLQENKPTMEHKRNICKINPSMVRKFGRNISKGNLR

SEQ ID NO: 8687 - DNA, 3086 bp, Homo sapiens
agcggcagccaatgaaacgaagcgctgaggaaagtggcttgggtttgaatattgtggttgagtctgaagcgctgggaggcggacattaaagtgaagtggttgcggtaacctggcctgggcctgaagtgagtgagaggcacatgaagagaagtattcaagtatttatacagataggaatcaagataatcaacaatgtctgtcactgaggaagacctgtgccaccatatgaaagtagtagttcgtgtacgtccggaaaacactaaagaaaaagcagctggatttcataaagtggttcatgttgtggataaacatatcctagtttttgatcccaaacaagaagaagtcagttttttccatggaaagaaaactacaaatcaaaatgttataaagaaacaaaataaggatcttaaatttgtatttgatgctgtttttgatgaaacgtcaactcagtcagaagtttttgaacacactactaagccaattcttcgtagttttttgaatggatataattgcacagtacttgcctatggtgccactggtgctgggaagacccacactatgctaggatcagctgatgaacctggagtgatgtatctaacaatgttacacctttacaaatgcatggatgagattaaagaagagaaaatatgtagtactgcagtttcatatctggaggtatataatgaacagattcgtgatctcttagtaaattcagggccacttgctgtccgggaagatacccaaaaaggggtggtcgttcatggacttactttacaccagcccaaatcctcagaagaaattttacatttattggataatggaaacaaaaacaggacacaacatcccactgatatgaatgccacatcttctcgttctcatgctgttttccaaatttacttgcgacaacaagacaaaacagcaagtatcaatcaaaatgtccgtattgccaagatgtcactcattgacctggcaggatctgagcgagcaagtacttccggtgctaaggggacccgatttgtagaaggcacaaatattaatagatcacttttagctcttgggaatgtcatcaatgccttagcagattcaaagagaaagaatcagcatatcccttacagaaatagtaagcttactcgcttgttaaaggattctcttggaggaaactgtcaaactataatgatagctgctgttagtccttcctctgtattctacgatgacacatataacactcttaagtatgctaaccgggcaaaggacattaaatcttctttgaagagcaatgttcttaatgtcaataatcatataactcaatatgtaaagatctgtaatgagcagaaggcagagattttattgttaaaagaaaaactaaaagcctatgaagaacagaaagccttcactaatgaaaatgaccaagcaaagttaatgatttcaaaccctcaggaaaaagaaatcgaaaggtttcaagaaatcctgaactgcttgttccagaatcgagaagaaattagacaagaatatctgaagttggaaatgttacttaaagaaaatgaacttaaatcattctaccaacaacagtgccataaacaaatagaaatgatgtgttctgaagacaaagtagaaaaggccactggaaaacgagatcatagacttgcaatgttgaaaactcgtcgctcctacctggagaaaaggagggaggaggaattgaagcaatttgatgagaatactaattggctccatcgtgtcgaaaaagaaatgggactcttaagtcaaaacggtcatattccaaaggaactcaagaaagatcttcattgtcaccatttgcacctccagaacaaagatttgaaagcacaaattagacatatgatggatctagcttgtcttcaggaacagcaacacaggcagactgaagcagtattgaatgctttacttccaaccctaagaaaacaatattgcacattaaaagaagccggcctgtcaaatgctgcttttgaatctgacttcaaagagatcgaacatttggtagagaggaaaaaagtggtagtttgggctgaccaaactgccgaacaaccaaagcaaaacgatctaccagggatttctgttcttatgacctttccacaacttggaccagttcagcctattccttgttgctcatcttcaggtggaactaatctggttaagattcctacagaaaaaagaactcggagaaaactaatgccatctcccttgaaaggacagcatactctaaagtctccaccatctcaaagtgtgcagctcaatgattctcttagcaaagaacttcagcctattgtatatacaccagaagactgtagaaaagcttttcaaaatccgtctacagtaaccttaatgaaaccatcatcatttactacaagttttcaggctatcagctcaaacataaacagtgataattgtctgaaaatgttgtgtgaagtagctatccctcataatagaagaaaagaatgtggacaggaggacttggactctacatttactatatgtgaagacatcaagagctcgaagtgtaaattacccgaacaagaatcactaccaaatgataacaaagacattttacaacggcttgatccttcttcattctcaactaagcattctatgcctgtaccaagcatggtgccatcctacatggcaatgactactgctgccaaaaggaaacggaaattaacaagttctacatcaaacagttcgttaactgcagacgtaaattctggatttgccaaacgtgttcgacaagataattcaagtgagaagcacttacaagaaaacaaaccaacaatggaacataaaagaaacatctgtaaaataaatccaagcatggttagaaaatttggaagaaatatttcaaaaggaaatctaagataaatcacttcaaaaccaagcaaaatgaagttgatcaaatctgcttttcaaagtttatcaataccctttcaaaaatatatttaaaatctttgaaagaagacccatcttaaagctaagtttacccaagtactttcagcaagcagaaaaatgaaactctttgttttcttcttttgtgttctaaaaaaataaaatttcaaaag

SEQ ID NO: 8688 - protein, 898 aa, Homo sapiens; identical to SEQ ID NO: 8686

SEQ ID NO: 8689 - DNA, 2182 bp, Homo sapiens
agcggcagccaatgaaacgaagcgctgaggaaagtggcttgggtttgaatattgtggttgagtctgaagcgctgggaggcggacattaaagtgaagtggttgcggtaacctggcctgggcctgaagtgagtgagaggcacatgaagagaagtattcaagtatttatacagataggaatcaagataatcaacaatgtctgtcactgaggaagacctgtgccaccatatgaaagtagtagttcgtgtacgtccggaaaacactaaagaaaaagcagctggatttcataaagtggttcatgttgtggataaacatatcctagtttttgatcccaaacaagaagaagtcagttttttccatggaaagaaaactacaaatcaaaatgttataaagaaacaaaataaggatcttaaatttgtatttgatgctgtttttgatgaaacgtcaactcagtcagaagtttttgaacacactactaagccaattcttcgtagttttttgaatggatataattgcacagtacttgcctatggtgccactggtgctgggaagacccacactatgctaggatcagctgatgaacctggagtgatgtatctaacaatgttacacctttacaaatgcatggatgagattaaagaagagaaaatatgtagtactgcagtttcatatctggaggtatataatgaacagattcgtgatctcttagtaaattcagggccacttgctgtccgggaagatacccaaaaaggggtggtcgttcatggacttactttacaccagcccaaatcctcagaagaaattttacatttattggataatggaaacaaaaacaggacacaacatcccactgatatgaatgccacatcttctcgttctcatgctgttttccaaatttacttgcgacaacaagacaaaacagcaagtatcaatcaaaatgtccgtattgccaagatgtcactcattgacctggcaggatctgagcgagcaagtacttccggtgctaaggggacccgatttgtagaaggcacaaatattaatagatcacttttagctcttgggaatgtcatcaatgccttagcagattcaaagagaaagaatcagcatatcccttacagaaatagtaagcttactcgcttgttaaaggattctcttggaggaaactgtcaaactataatgatagctgctgttagtccttcctctgtattctacgatgacacatataacactcttaagtatgctaaccgggcaaaggacattaaatcttctttgaagagcaatgttcttaatgtcaataatcatataactcaatatgtaaagatctgtaatgagcagaaggcagagattttattgttaaaagaaaaactaaaagcctatgaagaacagaaagccttcactaatgaaaatgaccaagcaaagttaatgatttcaaaccctcaggaaaaagaaatcgaaaggtttcaagaaatcctgaactgcttgttccagaatcgagaagaaattagacaagaatatctgaagttggaaatgttacttaaagaaaatgaacttaaatcattctaccaacaacagtgccataaacaaatagaaatgatgtgttctgaagacaaagtagaaaaggccactggaaaacgagatcatagacttgcaatgttgaaaactcgtcgctcctacctggagaaaaggagggaggaggaattgaagcaatttgatgagaatactaattggctccatcgtgtcgaaaaagaaatgggactcttaagtcaaaacggtcatattccaaaggaactcaagaaagatcttcattgtcaccatttgcacctccagaacaaagatttgaaagcacaaattagacatatgatggatctagcttgtcttcaggaacagcaacacaggcagactgaagcagtattgaatgctttacttccaaccctaagaaaacaatattgcacattaaaagaagccggcctgtcaaatgctgcttttgaatctgacttcaaagagatcgaacatttggtagagaggaaaaaagtggtagtttgggctgaccaaactgccgaacaaccaaagcaaaacgatctaccagggatttctgttcttatgacctttccacaacttggaccagttcagcctattccttgttgctcatcttcaggtggaactaatctggttaagattcctacag

SEQ ID NO: 8690 - protein, 662 aa, Homo sapiens
MSVTEEDLCHHMKVVVRVRPENTKEKAAGFHKVVHVVDKHILVFDPKQEEVSFFHGKKTTNQNVIKKQNKDLKFVFDAVFDETSTQSEVFEHTTKPILRSFLNGYNCTVLAYGATGAGKTHTMLGSADEPGVMYLTMLHLYKCMDEIKEEKICSTAVSYLEVYNEQIRDLLVNSGPLAVREDTQKGVVVHGLTLHQPKSSEEILHLLDNGNKNRTQHPTDMNATSSRSHAVFQIYLRQQDKTASINQNVRIAKMSLIDLAGSERASTSGAKGTRFVEGTNINRSLLALGNVINALADSKRKNQHIPYRNSKLTRLLKDSLGGNCQTIMIAAVSPSSVFYDDTYNTLKYANRAKDIKSSLKSNVLNVNNHITQYVKICNEQKAEILLLKEKLKAYEEQKAFTNENDQAKLMISNPQEKEIERFQEILNCLFQNREEIRQEYLKLEMLLKENELKSFYQQQCHKQIEMMCSEDKVEKATGKRDHRLAMLKTRRSYLEKRREEELKQFDENTNWLHRVEKEMGLLSQNGHIPKELKKDLHCHHLHLQNKDLKAQIRHMMDLACLQEQQHRQTEAVLNALLPTLRKQYCTLKEAGLSNAAFESDFKEIEHLVERKKVVVWADQTAEQPKQNDLPGISVLMTFPQLGPVQPIPCCSSSGGTNLVKIP

SEQ ID NO: 8691 - DNA, 500 bp, Homo sapiens
gaatattgtggttgagtctgaagcgctgggaggcggacattaaagtgaagtggttgcggtaacctggcctgggcctgaagtgagtgagaggcacatgaagagaagtattcaagtatttatacagataggaatcaagataatcaacaatgtctgtcactgaggaagacctgtgccaccatatgaaagtagtagttcgtgtacgtccggaaaacactaaagaaaaagcagctggatttcataaagtggttcatgttgtggataaacatatcctagtttttgatcccaaacaagaagaagtcagttttttccatggaaagaaaactacaaatcaaaatgttataaagaaacaaaataaggatcttaaatttgtatttgatgctgtttttgatgaaacgtcaactcagtcagaagtttttgaacacactactaagccaattcttcgtagttttttgaatggatataattgcacaggtatataatgaacagattcgtgatctctt

SEQ ID NO: 8692 - protein, 110 aa, Homo sapiens
MSVTEEDLCHHMKVVVRVRPENTKEKAAGFHKVVHVVDKHILVFDPKQEEVSFFHGKKTTNQNVIKKQNKDLKFVFDAVFDETSTQSEVFEHTTKPILRSFLNGYNCTGI

SEQ ID NO: 8693 - DNA, 742 bp, Homo sapiens
tgaagcgctgggaggcggacattaaagtgaagtggttgcggtaacctggcctgggcctgaagtgagtgagaggcacatgaagagaagtattcaagtatttatacagataggaatcaagataatcaacaatgtctgtcactgaggaagacctgtgccaccatatgaaagtagtagttcgtgtacgtccggaaaacactaaagaaaaagcagctggatttcataaagtggttcatgttgtggataaacatatcctagtttttgatcccaaacaagaagaagtcagttttttccatggaaagaaaactacaaatcaaaatgttataaagaaacaaaataaggatcttaaatttgtatttgatgctgtttttgatgaaacgtcaactcagtcagaagtttttgaacacactactaagccaattcttcgtagttttttgaatggatataattgcacaggtatttgtttcaatttgggatttaatttctctatccgatttcacttttgcattaggacggacatctacttgacccttctaaatataatcaaatttaaggagcttgtatgctaaaaattcttaagaaattcaatagacttgaactgtaaatatagactttgaaattttagttatcatatataacttatacatcatttgtaaacctttctcttccagggccttactgtggcccctatagacatctgtcctttcagttgcctatgttattaaaccacatgcttattgcaatt

SEQ ID NO: 8694 - protein, 145 aa, Homo sapiens [sequence omitted]

SEQ ID NO: 8695 - DNA, 361 bp, Homo sapiens
tgaaactatggctaaattacatattccagtaatggtggatgaagttgttcattgtttgtcaccacaaaaaggacagagtcttggtgtgaggagtgtgggaatatgaatcctacagcaaaagaagtaaactgtggatatttaatatattcataaagatggagaatttcccacttgagtgtattctattctgaattttggaaccaagctagctgattttacacgtttgattttatgattacatatggaaaaaaatcaaaaccgcaatgttacaggtctctcacacctttcactgtacttctgtaataaagggaattagaataatttattggttaaataaggtaactataaaccaatttttaac

SEQ ID NO: 8696 - protein, 32 aa, Homo sapiens
MAKLHIPVMVDEVVHCLSPQKGQSLGVRSVGI

SEQ ID NO: 8697 - DNA, 490 bp, Homo sapiens
ggagaagaaggagaatggtatggtttggctttgtgtctccacccatatctcgcctgcaattgttgtcttcataaatccccacgtgtcaagggtgggaccaggtggagtgaggaagatgcctgcttctcctctgccttctgccaagatggcaagtttcctgaggcctccccagcaagatggatctgcacttcatcaccaaagcaacaagatgtggagcatgagcagttcaacctttgaagataactcagactaatttggccagcctctccgtctgagggtctgagatcataagaaggttttatattgggctgtgcacttcaacctacaggccagtagatgaagcttgtgagtaagagctagctgtgacactagcagatgggtttggataaatggtaccaaagcaatcctttgggcaagcaaaatgaacttctcaattgttacatattattcattagactgtttctatttaaataaaatatcgcttgaaagc

SEQ ID NO: 8698 - protein, 77 aa, Homo sapiens
MVWLCVSTHISPAIVVFINPHVSRVGPGGVRKMPASPLPSAKMASFLRPPQQDGSALHHQSNKMWSMSSSTFEDNSD

SEQ ID NO: 8699 - DNA, 5265 bp, Homo sapiens
ggcggcgggagagctgctggctcgcccggatcccgggagctgcctggaggcgggcccggcccggggaaggtgagcggctgcgggacccagcccctcgccgggagcgggcaccatggtgctgtcggtgcctgtgatcgcgctgggcgccacgctgggcacagccaccagcatcctcgcgttgtgcggggtcacctgcctgtgtcggcacatgcaccccaagaaggggctgctgccgcgggaccaggaccccgacctggagaaggcgaagcccagcttgctcgggtctgcacaacagttcaatgttaaaaagtccacggaacctgttcagccccgtgccctcctcaagttcccagacatctatggacccaggccagctgtgacggctccagaggtcatcaactatgcagactattcactgaggtctacggaggagcccactgcacctgccagcccccaacccccgaatgacagtcgcctcaagaggcaggtcacagaggagctgttcatcctccctcagaatggtgtggtggaggatgtctgtgtcatggagacctggaacccagagaaggctgccagttggaaccaggcccccaaactccactactgcctggactatgactgtcagaaggcagaattgtttgtgactcgcctggaagctgtgaccagcaaccacgacggaggctgtgactgctacgtccaagggagtgtggccaataggaccggctctgtggaggctcagacagccctaaagaagcggcagctgcacaccacctgggaggagggcctggtgctccccctggcggaggaggagctccccacagccaccctgacgctgaccttgaggacctgcgaccgcttctcccgtcacagcgtggccggggagctccgcctgggcctggacgggacatctgtgcctctaggggctgcccagtggggcgagctgaagacttcagcgaaggagccatctgcaggagctggagaggtcctactatccatcagctacctcccggctgccaaccgcctcctggtggtgctgattaaagccaagaacctccactctaaccagtccaaggagctcctggggaaggatgtctctgtcaaggtgaccttgaagcaccaggctcggaagctgaagaagaagcagactaaacgagctaagcacaagatcaaccccgtgtggaacgagatgatcatgtttgagctgcctgacgacctgctgcaggcctccagtgtggagctggaagtgctgggccaggacgattcagggcagagctgtgcgcttggccactgcagcctgggcctgcacacctcgggctctgagcgcagccactgggaggagatgctcaaaaaccctcgccggcagattgccatgtggcaccagctgcacctgtaaccagctgcccagctgcctcccttcttggacagccctgacccgtcctctgcaacctcctttctgtgcccctttcctcattctgacacccagaagacagtgacagatgtgtttgcaaggctgggatggctctctcatcatactcttgtttcttagaaataagcaagacagagcaggaaatggaatatgcgggtcacactgaggaatgcattttgctcatctgtgttattgaaggaggtgcttattaaatacagttcctatgcctgttttataggtggggttaggccagatgcagagaaagctaaatgtgggaatcatggatgcaaagaagaatttggctttttgaaaaacaagcatttcaaaaatgatgaaggaagtgaaagtatcctggatcaactcctagagttagagattgcccaggtggaaagaaaccttagccagcgttcaatcaagctcaccatgcagggcagtcacccggcagttctcaaactttagcatgtgaagagtcaccagcagattcctgggctcgcctggagacattcctagtcggtattcctggtcgaagcccaggagccttcctttttaacaagctgatgtagagggtggagcactgtatgtggagaaattccttctacaatattccacacaggtttttggccacagtccttgatggagtcccaaaaccatggtgcagccagttccaatgctggacacctcaaccatcagggtgaaatctggggcctcagctttttaatttaattattttaattcttaatactttaatttgtgcatttcataagccccctgctcttggactgaattttgtgctttttattgaagaattttattgtttttatcttaaaatcagtttctattatccttggggagaccatccctaacaaagtacaggtgggatctcctgtgagtcattggctgggttctgattgctagatgtcacacccaccagcatcaccaaagtgactctgagatagaccggtcccttctcagcgttccagtcacttcaggaggaatttagttattgacttagtctatgacatctggctacatgtaggtagagaagaaagataattttaaaaaggaaatcaggtcttttgcaactgtgcctccctctgtctgttttcacttgaatgggtaaataaccagcagctaggttttgaattcctaccttgttattctaaacagatgtccacattgttaattaaatctaaattatgagccttgctgagtggatacggtacttacacctgaaccaggattcctgggttctgttgttgacattgcccttcagcacctgtttggccagctgtgtaagataggactaatgactaggaagcctaccccaatgaatgatatactagatgaaatagtgttcaaaacctgtaggcactctctggctaaaaacaaactctgaggccaccagcagatcatctttaagctaagttactatttttcacctttttttttagacggagttttgctctttgttgcccaggctggagtgcagtggcacgatctcggctcactgcaacctccgcctcccaagttcaagcgattctcctctctcagcctcctgggtagctgggattacaggtgcccaccaacatgcctggctaatttttgtacttttagtagagatggggtttcaccatgttggccaggctggtcttcaactccagatctcaggtgatctaccctcctcggcctcccaaagtactgggattacaggcctgagccaccgcgcccggcctatttttcactttaatttggcagctgagaatgcccagaaagtgccagaagcatcgtggcatttccagaaccatggattctgcctttggacccctctctattaatattaaaactctgggccttcagatgtcaccctaatccacttccctaagacagaatttctggacaagatgggtaagggcttcattccttcaacaagtcaagtcatacttggcctctccctgagaatctgagcaggagccttataacctgtggtcattattttttctttctgtacagaaatagaaaagcattagaaataacttctaaccatcctctgaaaaaacagaaaaaatatcgaatccctctttcatgagaagtcttttggataattggaaaccttcatcactgaggttggccagcccctgccaagtgttgtgtaggcaaagcacttgttagtggcttcctatgaaatgttttagagatctcttcaccatactggtttcttctctttggttggtgtgggtaaaagaaaacaaaacatttcctataagctgaaagctgaccagcattctcttcttggtaacatctactactccaatctagaaaatttggattctagaccaaaaatcaggaaacatggctccttataaatctgtgcagctgccttatagtaccatcaaaggaatttcaggtgggctgggcggggccccgatcccagaattatcaactccacccatcatcatttggtcatgaagcatcctttcattcttcttcttcttttttttgggggggcggggcgggggagggatctcaaagttttagtcttccagaatccaaattaaaggttgcccctgatgggggccaggttccgccacagaacatcttagatgtcagccttgacctcacttagcagggattacagaaatgagatacattttgaaggagagttgtctgttatgttcactgtattctaagtgcctgggataaagctgtctcatgggtgctccatatatattcatatatatttgttgagtgaattaatgaattaagagtggctggcagagtaggcagaaaaagacactgcaaatggcataaaaattaaagtcctagctgagttctcaatggtaaaggcatcagatgtcttagcagtcaagctagaaattcatgacaatgagtattactatttgcctaatggcaactcattgctctccatgtaaatgtaatcaacagatgaagagaatataattgctctgcttttccactaaaactccatcttagtgaattttaaattatccagagatgtcaaactgccaaataaaaatatttcagtagtctttgcatcagcttaccttgtaccagaaacatttccaatttactatcaaattatagtaactgagcctgtgtgaagtatctcatcattttcgaaaggaacaccttgtgtgatgccagtgagcatttctaaaaagggtgtgaggtagaggtaaaaataaggtgagagaccatttcagaatgcactgttgctcaaaaaggtgatctggttctttcttcagagatttctacggggatagaaaatcgggagtctgccctcattaatctgtgattccacctcttgcaccaaatcaatatctatttgttgagcacttattgattaagaccttgcatatgtctgtccattttgatttgagatacaactttttgtgtgggttgaatgacaaatcactccaaacaaagctgggcacagagaatcagctaggagaccagttattcagggtccatttctcttggatgtaaaggagtcctgggtaaaatgtggctgtaacctaaaccaactagtccttgtgatttgtttctgccctctgtgtttcctgttgtcaaatgctaagtgtgtgttttgcagtcatgaactaaagcacaaaaagatgcatgagacattgtagtcatatgtctggtgtgacactttggagcaaaaaccttgcagtggtaaataaaaaatttccaacagggtcagctgcctggtgttttctttttttccgttttacctaatattttggcatataaaatgcagaagaaatcatctgataagcacttatgagccactgccatgtttaataaaacttgacaactac

SEQ ID NO: 8700 - protein, 426 aa, Homo sapiens; identical to SEQ ID NO: 1316

SEQ ID NO: 8701 - DNA, 5080 bp, Homo sapiens
gggaaggtgagcggctgcgggacccagcccctcgccgggagcgggcaccatggtgctgtcggtgcctgtgatcgcgctgggcgccacgctgggcacagccaccagcatcctcgcgttgtgcggggtcacctgcctgtgtcggcacatgcaccccaagaaggggctgctgccgcgggaccaggaccccgacctggagaaggcgaagcccagcttgctcgggtctgcacaacagttcaatgttaaaaagtccacggaacctgttcagccccgtgccctcctcaagttcccagacatctatggacccaggccagctgtgacggctccagaggtcatcaactatgcagactattcactgaggtctacggaggagcccactgcacctgccagcccccaacccccgaatgacagtcgcctcaagaggcaggtcacagaggagctgttcatcctccctcagaatggtgtggtggaggatgtctgtgtcatggagacctggaacccagagaaggctgccagttggaaccaggcccccaaactccactactgcctggactatgactgtcagaaggcagaattgtttgtgactcgcctggaagctgtgaccagcaaccacgacggaggctgtgactgctacgtccaagggagtgtggccaataggaccggctctgtggaggctcagacagccctaaagaagcggcagctgcacaccacctgggaggagggcctggtgctccccctggcggaggaggagctccccacagccaccctgacgctgaccttgaggacctgcgaccgcttctcccgtcacagcgtggccggggagctccgcctgggcctggacgggacatctgtgcctctaggggctgcccagtggggcgagctgaagacttcagcgaaggagccatctgcaggagctggagaggtcctactatccatcagctacctcccggctgccaaccgcctcctggtggtgctgattaaagccaagaacctccactctaaccagtccaaggagctcctggggaaggatgtctctgtcaaggtgaccttgaagcaccaggctcggaagctgaagaagaagcagactaaacgagctaagcacaagatcaaccccgtgtggaacgagatgatcatgtttgagctgcctgacgacctgctgcaggcctccagtgtggagctggaagtgctgggccaggacgattcagggcagagctgtgcgcttggccactgcagcctgggcctgcacacctcgggctctgagcgcagccactgggaggagatgctcaaaaaccctcgccggcagattgccatgtggcaccagctgcacctgtaaccagctgcccagctgcctcccttcttggacagccctgacccgtcctctgcaacctcctttctgtgcccctttcctcattctgacacccagaagacagtgacagatgtgtttgcaaggctgggatggctctctcatcatactcttgtttcttagaaataagcaagacagagcaggaaatggaatatgcgggtcacactgaggaatgcattttgctcatctgtgttattgaaggaggtgcttattaaatacagttcctatgcctgttttataggtggggttaggccagatgcagagaaagctaaatgtgggaatcatggatgcaaagaagaatttggctttttgaaaaacaagcatttcaaaaatgatgaaggaagtgaaagtatcctggatcaactcctagagttagagattgcccaggtggaaagaaaccttagccagcgttcaatcaagctcaccatgcagggcagtcacccggcagttctcaaactttagcatgtgaagagtcaccagcagattcctgggctcgcctggagacattcctagtcggtattcctggtcgaagcccaggagccttcctttttaacaagctgatgtagagggtggagcactgtatgtggagaaattccttctacaatattccacacaggtttttggccacagtccttgatggagtcccaaaaccatggtgcagccagttccaatgctggacacctcaaccatcagggtgaaatctggggcctcagctttttaatttaattattttaattcttaatactttaatttgtgcatttcataagccccctgctcttggactgaattttgtgctttttattgaagaattttattgtttttatcttaaaatcagtttctattatccttggggagaccatccctaacaaagtacaggtgggatctcctgtgagtcattggctgggttctgattgctagatgtcacacccaccagcatcaccaaagtgactctgagatagaccggtcccttctcagcgttccagtcacttcaggaggaatttagttattgacttagtctatgacatctggctacatgtaggtagagaagaaagataattttaaaaaggaaatcaggtcttttgcaactgtgcctccctctgtctgttttcacttgaatgggtaaataaccagcagctaggttttgaattcctaccttgttattctaaacagatgtccacattgttaattaaatctaaattatgagccttgctgagtggatacggtacttacacctgaaccaggattcctgggttctgttgttgacattgcccttcagcacctgtttggccagctgtgtaagataggactaatgactaggaagcctaccccaatgaatgatatactagatgaaatagtgttcaaaacctgtaggcactctctggctaaaaacaaactctgaggccaccagcagatcatctttaagctaagttactatttttcacctttttttttagacggagttttgctctttgttgcccaggctggagtgcagtggcacgatctcggctcactgcaacctccgcctcccaagttcaagcgattctcctctctcagcctcctgggtagctgggattacaggtgcccaccaacatgcctggctaatttttgtacttttagtagagatggggtttcaccatgttggccaggctggtcttcaactccagatctcaggtgatctaccctcctcggcctcccaaagtactgggattacaggcctgagccaccgcgcccggcctatttttcactttaatttggcagctgagaatgcccagaaagtgccagaagcatcgtggcatttccagaaccatggattctgcctttggacccctctctattaatattaaaactctgggccttcagatgtcaccctaatccacttccctaagacagaatttctggacaagatgggtaagggcttcattccttcaacaagtcaagtcatacttggcctctccctgagaatctgagcaggagccttataacctgtggtcattattttttctttctgtacagaaatagaaaagcattagaaataacttctaaccatcctctgaaaaaacagaaaaaatatcgaatccctctttcatgagaagtcttttggataattggaaaccttcatcactgaggttggccagcccctgccaagtgttgtgtaggcaaagcacttgttagtggcttcctatgaaatgttttagagatctcttcaccatactggtttcttctctttggttggtgtgggtaaaagaaaacaaaacatttcctataagctgaaagctgaccagcattctcttcttggtaacatctactactccaatctagaaaatttggattctagaccaaaaatcaggaaacatggctccttataaatctgtgcagctgccttatagtaccatcaaaggaatttcaggtgggctgggcggggccccgatcccagaattatcaactccacccatcatcatttggtcatgaagcatcctttcattcttcttcttcttttttttgggggggcggggcgggggagggatctcaaagttttagtcttccagaatccaaattaaaggttgcccctgatgggggccaggttccgccacagaacatcttagatgtcagccttgacctcacttagcagggattacagaaatgagatacattttgaaggagagttgtctgttatgttcactgtattctaagtgcctgggataaagctgtctcatgggtgctccatatatattcatatatatttgttgagtgaattaatgaattaagagtggctggcagagtaggcagaaaaagacactgcaaatggcataaaaattaaagtcctagctgagttctcaatggtaaaggcatcagatgtcttagcagtcaagctagaaattcatgacaatgagtattactatttgcctaatggcaactcattgctctccatgtaaatgtaatcaacagatgaagagaatataattgctctgcttttccactaaaactccatcttagtgaattttaaattatccagagatgtcaaactgccaaataaaaatatttcagtagtctttgcatcagcttaccttgtaccagaaacatttccaatttactatcaaattatagtaactgagcctgtgtgaagtatctcatcattttcgaaaggaacaccttgtgtgatgccagtgagcatttctaaaaagggtgtgaggtagaggtaaaaataaggtgagagaccatttcagaatgcactgttgctcaaaaaggtgatctggttctttcttcagagatttctacggggatagaaaatcgggagtctgccctcattaatctgtgattccacctcttgcaccaaatcaatatctatttgttgagcacttattgattaagaccttgcatatgtctgtccattttgatttgagatacaactttttgtgtgggttgaatgacaaatcactccaaacaaagctgggcacagagaatcagctaggagaccagttattcagggtccatttctcttggatgtaaaggagtcctgggtaaaatgtggctgtaacctaaaccaactagtccttgtgatttgtttctgccctctgtgtttcctgttgtcaaatgctaagtgtgtgttttgcagtcatgaactaaagcacaaaaagatgcatgagacattgtagtcatatgtctggtgtgacactttggagcaaaaaccttgcagtggtaaataaaaaatttccaacaggg

SEQ ID NO: 8702 - protein, 426 aa, Homo sapiens; identical to SEQ ID NO: 1316

SEQ ID NO: 8703 - DNA, 449 bp, Homo sapiens
atacaaatgacaaggagaggggggttatggagccacagctggaaggagtctggtccttgaatcaccatttggagaaaaaacctgcagatgatcccatcctgcctgcacagcttctccaggggagatagacacacagaagcccacgagagtcaaataagagccataccttccaggtctccatgacacagacatcctccaccacacctgttaagaaagtcgaaatcgtcactgccacccacactggggttctgctttcctgattacacctttctcatctctatcacctatgccaggaacccaaacccaagtcttcccagctgtgtgcagaatcacagtggccacaccaagacaacaggtggggtcaatgtcacagcccattaggctgcatctgtgtccactggctccctcatcaaccacacaaaacaaaacagagactacacaacaatcta

SEQ ID NO: 8704 - protein, 33 aa, Homo sapiens
MEPQLEGVWSLNHHLEKKPADDPILPAQLLQGR

SEQ ID NO: 8705 - DNA, 946 bp, Homo sapiens
tgcaatgtcaagggagggggctcacccagggctcctgtagctcagggggcaggcctgagccctgcacccgccccacgaccgtccagcccctgacggggcaccccatcctgaggggctctgcattggcccccaccgaggcaggggatctgaccgactcggagcccggctggatgttacaggcgtgcaaaatggaagggtttcccctcgtcccccctgcagcaagaagaagatccgcctgtaccagttcctgttggacctgctccgcagcggcgacatgaaggacagcatctggtgggtggacaaggacaagggcaccttccagttctcgtccaagcacaaggaggcgctggcgcaccgctggggcatccagaagggcaaccgcaagaagatgacctaccagaagatggcgcgcgcgctgcgcaactacggcaagacgggcgaggtcaagaaggtgaagaagaagctcacctaccagttcagcggcgaagtgctgggccgcgggggcctggccgagcggcgccacccgccccactgagcccgcagcccccgccgggccccgccaggcctccccgctggccatagcattaagccctcgcccggcccggacacagggaggacgctcccggggcccagaggcaggactgtggcgggccgggcctcgcctcacccgccccctccccccactccaggccccctccacatcccgcttcgcctccctccaggactccaccccggctcccggacgccagctgggcgtcagaccccaccggggcaaccttgcagaggacgacccggggtactgccttgggagtctcaagtccgtatgtaaatcagatctcccctctcacccctcccacccattaacctcctcccaaaaaacaagtaaagttattctcaatccatcctcttgcagcacagagtctcttttaaaatttgttgtgtatct

SEQ ID NO: 8706 - protein, 35 aa, Homo sapiens
MLQACKMEGFPLVPPAARRRSACTSSCWTCSAAAT

SEQ ID NO: 8707 - DNA, 1418 bp, Homo sapiens
aaaatcaggaacttgtgctggccctgcaatgtcaagggagggggctcacccagggctcctgtagctcagggggcaggcctgagccctgcacccgccccacgaccgtccagcccctgacggggcaccccatcctgaggggctctgcattggcccccaccgaggcaggggatctgaccgactcggagcccggctggatgttacaggcgtgcaaaatggaagggtttcccctcgtcccccctccatcagaagacctggtgccctatgacacggatctataccaacgccaaacgcacgagtattacccctatctcagcagtgatggggagagccatagcgaccattactgggacttccacccccaccacgtgcacagcgagttcgagagcttcgccgagaacaacttcacggagctccagagcgtgcagcccccgcagctgcagcagctctaccgccacatggagctggagcagatgcacgtcctcgatacccccatggtgccaccccatcccagtcttggccaccaggtctcctacctgccccggatgtgcctccagtacccatccctgtccccagcccagcccagctcagatgaggaggagggcgagcggcagagccccccactggaggtgtctgacggcgaggcggatggcctggagcccgggcctgggctcctgcctggggagacaggcagcaagaagaagatccgcctgtaccagttcctgttggacctgctccgcagcggcgacatgaaggacagcatctggtgggtggacaaggacaagggcaccttccagttctcgtccaagcacaaggaggcgctggcgcaccgctggggcatccagaagggcaaccgcaagaagatgacctaccagaagatggcgcgcgcgctgcgcaactacggcaagacgggcgaggtcaagaaggtgaagaagaagctcacctaccagttcagcggcgaagtgctgggccgcgggggcctggccgagcggcgccacccgccccactgagcccgcagcccccgccgggccccgccaggcctccccgctggccatagcattaagccctcgcccggcccggacacagggaggacgctcccggggcccagaggcaggactgtggcgggccgggcctcgcctcacccgccccctccccccactccaggccccctccacatcccgcttcgcctccctccaggactccaccccggctcccggacgccagctgggcgtcagaccccaccggggcaaccttgcagaggacgacccggggtactgccttgggagtctcaagtccgtatgtaaatcagatctcccctctcacccctcccacccattaacctcctcccaaaaaacaagtaaagttattctcaatccatcctcttgcagcacagagtctcttttaaaatttgttgtgtatct

SEQ ID NO: 8708 - protein, 270 aa, Homo sapiens
MLQACKMEGFPLVPPPSEDLVPYDTDLYQRQTHEYYPYLSSDGESHSDHYWDFHPHHVHSEFESFAENNFTELQSVQPPQLQQLYRHMELEQMHVLDTPMVPPHPSLGHQVSYLPRMCLQYPSLSPAQPSSDEEEGERQSPPLEVSDGEADGLEPGPGLLPGETGSKKKIRLYQFLLDLLRSGDMKDSIWWVDKDKGTFQFSSKHKEALAHRWGIQKGNRKKMTYQKMARALRNYGKTGEVKKVKKKLTYQFSGEVLGRGGLAERRHPPH

SEQ ID NO: 8709 - DNA, 1376 bp, Homo sapiens
aaaatcaggaacttgtgctggccctgcaatgtcaagggagggggctcacccagggctcctgtagctcagggggcaggcctgagccctgcacccgccccacgaccgtccagcccctgacggggcaccccatcctgaggggctctgcattggcccccaccgaggcaggggatctgaccgactcggagcccggctggatgttacaggcgtgcaaaatggaagggtttcccctcgtcccccctccatcagaagacctggtgccctatgacacggatctataccaacgccaaacgcacgagtattacccctatctcagcagtgatggggagagccatagcgaccattactgggacttccacccccaccacgtgcacagcgagttcgagagcttcgccgagaacaacttcacggagctccagagcgtgcagcccccgcagctgcagcagctctaccgccacatggagctggagcagatgcacgtcctcgatacccccatggtgccaccccatcccagtcttggccaccaggtctcctacctgccccggatgtgcctccagtacccatccctgtccccagcccagcccagctcagatgaggaggagggcgagcggcagagccccccactggaggtgtctgacggcgaggcggatggcctggagcccgggcctgggctcctgcctggggagacaggcagcaagaagaagatccgcctgtaccagttcctgttggacctgctccgcagcggcgacatgaaggacagcatctggtgggtggacaaggacaagggcaccttccagttctcgtccaagcacaaggaggcgctggcgcaccgctggggcatccagaagggcaaccgcaagaagatgacctaccagaagatggcgcgcgcgctgcgcaactacggcaagacgggcgaggtcaagaaggtgaagaagaagctcacctaccagttcagcggcgaagtgctgggccgcgggggcctggccgagcggcgccacccgccccactgagcccgcagcccccgccgggccccgccaggcctccccgctggccatagcattaagccctcgcccggcccggacacagggaggacgctcccggggcccagaggcaggactgtggcgggccgggcctcgcctcacccgccccctccccccactccaggccccctccacatcccgcttcgcctccctccaggactccaccccggctcccggacgccagctgggcgtcagaccccaccggggcaaccttgcagaggacgacccggggtactgccttgggagtctcaagtccgtatgtaaatcagatctcccctctcacccctcccacccattaacctcctcccaaaaaacaagtaaagttattctcaatccatc

SEQ ID NO: 8710 - protein, 270 aa, Homo sapiens; identical to SEQ ID NO: 8708

SEQ ID NO: 8711 - DNA, 902 bp, Homo sapiens
tgcaatgtcaagggagggggctcacccagggctcctgtagctcagggggcaggcctgagccctgcacccgccccacgaccgtccagcccctgacggggcaccccatcctgaggggctctgcattggcccccaccgaggcaggggatctgaccgactcggagcccggctggatgttacaggcgtgcaaaatggaagggtttcccctcgtcccccctgcagcaagaagaagatccgcctgtaccagttcctgttggacctgctccgcagcggcgacatgaaggacagcatctggtgggtggacaaggacaagggcaccttccagttctcgtccaagcacaaggaggcgctggcgcaccgctggggcatccagaagggcaaccgcaagaagatgacctaccagaagatggcgcgcgcgctgcgcaactacggcaagacgggcgaggtcaagaaggtgaagaagaagctcacctaccagttcagcggcgaagtgctgggccgcgggggcctggccgagcggcgccacccgccccactgagcccgcagcccccgccgggccccgccaggcctccccgctggccatagcattaagccctcgcccggcccggacacagggaggacgctcccggggcccagaggcaggactgtggcgggccgggcctcgcctcacccgccccctccccccactccaggccccctccacatcccgcttcgcctccctccaggactccaccccggctcccggacgccagctgggcgtcagaccccaccggggcaaccttgcagaggacgacccggggtactgccttgggagtctcaagtccgtatgtaaatcagatctcccctctcacccctcccacccattaacctcctcccaaaaaacaagtaaagttattctcaatcca

SEQ ID NO: 8712 - protein, 35 aa, Homo sapiens; identical to SEQ ID NO: 8706

SEQ ID NO: 8713 - DNA, 3912 bp, Homo sapiens
gcccttgtccttgtccacccaccagatgctgtccttcatgtcgccgctgcggagcaggtccaacaggaactgcgttcttcacaatagccaaacggcagaaacaccctaagtgtcggacggctggatacgcaaaacgtggcacatgcgcaaaacgtggcgcgcgcatacaatggaatatgattcaaccttaaagatgaaggaaatgctgacacgtgctacaccatgggtaaatggccgctttgtccctcctgccttgaggaatgcagtgaagctagcacgggcctcgtcctctgcacgttaccttacctcagagattatatgccttacctcgctgaatcatcacagccctaggagtacgtggcatgcctggatgtccctgccctggctgtggcatggcgggcccaaggctcctcttcctcactgcccttgccctggagctcttggaaagggctgggggttcccagccggccctccggagccgggggactgcgacggcctgtcgcctggacaacaaggaaagcgagtcctggggggctctgctgagcggagagcggctggacacctggatctgctccctcctgggttccctcatggtggggctcagtggggtcttcccgttgcttgtcattcccctagagatggggaccatgctgcgctcagaagctggggcctggcgcctgaagcagctgctcagcttcgccctggggggactcttgggcaatgtgtttctgcatctgctgcccgaagcctgggcctacacgtgcagcgccagccctggtggtgaggggcagagcctgcagcagcagcaacagctggggctgtgggtcattgctggcatcctgaccttcctggcgttggagaagatgttcctggacagcaaggaggaggggaccagccaggcccccaacaaagaccccactgctgctgccgccgcgctcaatggaggccactgtctggcccagccggctgcagagcccggcctcggtgccgtggtccggagcatcaaagtcagcggctacctcaacctgctggccaacaccatcgataacttcacccacgggctggctgtggctgccagcttccttgtgagcaagaaggtgaggggcttggggccagtggggctctggcgattccagtggcagccatgtggattccacctgtgtctggagtctctgcttcttgcccctccattgccagcgccctcatctaaggctctcatcccccatcctccctgctgctgtcctggccgccactgttctctgatcctgagcccctggtctgttcctgttcccagtactccttgttgggtgcctctgtcaagctgctaggcgtggcccctgcctgctcctagatgcttcttcctctacctcctccctctggcctctggcctctggcccagaggcagcctactctgcagctggccgagatctttcccacctcacactgttccccctgcctggaatgttctcccgcccacgcttcgagcggctgacgactcatccttggggcctcgacttacatggactcctccaccaggcctttgctgacctcctcatctaaatttggttcctgggcctgctcccctgggcactctatccatcctttccttcccagcgcctgtgagtgtgtgagtgagtcctgtctctcccctctataccgctagcttcgtgaaggcaggttccttgtcccctttagtcactgctgtatttccagtggccaacacagtgcccacccagagccagctcagagcagagtaaacctctgtggaatgagtgggcgagtggggtgctcagccctcaacacagaccccgcagccacggctcccctccctgcagatcgggctcctgacaaccatggccatcctcctgcatgagatcccccatgaggtgagcgcttgtagggcagcccccaggggcccaggcccccacagtgcccatgatcagcatgggtgtggagctcaggagggtgtggggctgggcctgtccagcatggcactctggggctgggctgtgagggctggagctcctcaccccagcagcctgcagctgccatctctgccatactcaggatgggggtcccaggggaagggtggggaagggcagggggctcagtgtgtatatcgtacctgagcactcagggcatcaggccccgctggggcgcagggtgaacctctggacctcccttcaggtgggcgactttgccatcctgctccgggccggctttgaccgatggagcgcagccaagctgcaactctcaacagcgctggggggcctactgggcgctggcttcgccatctgtacccagtcccccaagggagtaggtacgggcgtggcgggtggttgtggcgggtggcatcagcagaggggcaccagccaaagggtgtggctaccgcactgctggtccccaggcccgggaggtggggagcacacacagtgccttgggtacccagttgggtgttctcccgctgcagaggagacggcagcctgggtcctgcccttcacctctggcggctttctctacatcgccttggtgaacgtgctccctgacctcttggaagaagaggacccgtggtgagtgacctgttggaggaagaggactgccactcacagggcccttaggggctcaggagggaagggctcctggccgctgcctgctccccctgcccatgcctccaccgtgagccgttccctccccacaggcgctccctgcagcagctgcttctgctctgtgcgggcatcgtggtaatggtgctgttctcgctcttcgtggattaactttccctgatgccgacgcccctgccccctgcagcaataagatgctcggattcactctgtgaccgcatatgtgagaggcagagagggcgagtggctgcgagagagaatgagcctcccgccagacaggagggaggtgcgtgtggatgtatgtggtgtgcacatgtggccagaggtgtgtgcgcgagaccgacactgtgatccctgtgctgggtccggggcccagtgtagcgcctgtccccagccatgctgtggttacctctccttgccgccctgtcaccttcacctcccggagtaagcagcgaggaagagcagcactggtcccaagcagaggccttgccctgctgggaccccgggagtgagagcagcccaaggatccagggtgcagggaactccagagctgcccacctcccactgccccctcagcacacacacagtccccaggcggcctaggggccaaggctggggcggctttggtcccttttcctggcccttccttccccacttctaagccaaagaaaggagaggcaggtgctcctgtaccccagccccactcagcactgacagtccccagctcctagtagtgagctgggaggcgcttcctaagaccctttcctcagggctgccctgggagctcattcctggccaacacgccctggcagcaccagcagctcttgccacctccagctgccaaacagcagcctgccgggcagggagcagccccaggccagagaggcctcccggtccagctcagggatgctcctgccagcacaggggccagggactcctggagcaggcacatagtgagcccgggcagccctgcccagctcaggcccctttccttccccattgaggttggggtaggtgggggcggtgagggctccacgttgtcagcgctcaggaatgtgctccggcagagtgctgaagccataatccccaaccatttcccttggctgacgcccaggtactcagctggcccactccacagccaggcctggccctgcccttcaccgtggatgttttcagaagtggccatcgagaggtctggatggttttatagcaactttgctgtgattccgtttgtatctgtaaatatttgttctatagataagatacaaataaatattatccacatactggc

SEQ ID NO: 8714 - protein, 321 aa, Homo sapiens
MPGCPCPGCGMAGPRLLFLTALALELLERAGGSQPALRSRGTATACRLDNKESESWGALLSGERLDTWICSLLGSLMVGLSGVFPLLVIPLEMGTMLRSEAGAWRLKQLLSFALGGLLGNVFLHLLPEAWAYTCSASPGGEGQSLQQQQQLGLWVIAGILTFLALEKMFLDSKEEGTSQAPNKDPTAAAAALNGGHCLAQPAAEPGLGAVVRSIKVSGYLNLLANTIDNFTHGLAVAASFLVSKKVRGLGPVGLWRFQWQPCGFHLCLESLLLAPPLPAPSSKALIPHPPCCCPGRHCSLILSPWSVPVPSTPCWVPLSSC

SEQ ID NO: 8715 - DNA, 945 bp, Homo sapiens
agcagctgcctctgggtggtggcagagatgcccatgtctaggacctccaggccttaactaatcaggggcactgatgaagccagcggggctccactggggaccacaggcaagactgggccaggacgaggcggtcacgcagagaaagaagataaaagggaacagaagagaaaattcaaaaggagcacgggcctccccgggagtgggcttcagcctccctagactcctgtctccttccaagggctaggcctgggggaccagaagcaagagtccctagagcgtccaagatttttggtttcaaaccaatttcctgctgaccagaatgaaatggagccacattccagcacgatgcacctgctgacctcctgcaagtcagggaccttctctgcccctcttttgctctgctgcaggagggagaagctgggaatgtgttcctctggggtcccatcacctccagccagccactgtccctgtctccccaaaacctcctcgttgtccctcctctgtcctcctcctcctccatctgccttcgccctgctctcctctttttcgcctgaggttcgtgctgcctcctcacctcttgtcctgtttctcccttctctctgctccctcctttgatcttgctattttgcttctctttcccttcctctcttctcctccctccccttcctccctgctccctgcctcagcttctcagtctctctccgttcttcctctagcttccttccctccccagaagacccagcccttcctagagccccagaagccagggttcatgccccagctctctacccacacatgctgtgcaaccctgggccagtcactggtctcttgggcctcagttcaacagatggctgtcttggtgatgtgagatcatagggtggaagcacccagaatggtgccaggcactcaaaaatttttttcttttcctttttaaggaactactaa

SEQ ID NO: 8716 - protein, 56 aa, Homo sapiens
MKPAGLHWGPQARLGQDEAVTQRKKIKGNRRENSKGARASPGVGFSLPRLLSPSKG

SEQ ID NO: 8717 - DNA, 1666 bp, Homo sapiens
gtatgggcccggtggggtgagatggacagaaagcttcagaagacaagctgggccaccagggagaagttggcggtctaaggaaggccaacagtgcaacatgaagtgggacaggcaccagaggcagccctgagagctgagtgtgctctcaagagccccagcagaggggaaagtgacagagtaaatggttggagctgccatgggaggctgatgagggtcagagacttaagagacctgtactcagtcgctatctctgcccaatacgtggcatgcctggatgtccctgccctggctgtggcatggcgggcccaaggctcctcttcctcactgcccttgccctggagctcttggaaagggctgggggttcccagccggccctccggagccgggggactgcgacggcctgtcgcctggacaacaaggaaagcgagtcctggggggctctgctgagcggagagcggctggacacctggatctgctccctcctgggttccctcatggtggggctcagtggggtcttcccgttgcttgtcattcccctagagatggggaccatgctgcgctcagaagctggggcctggcgcctgaagcagctgctcagcttcgccctggggggactcttgggcaatgtgtttctgcatctgctgcccgaagcctgggcctacacgtgcagcgccagccctggtggtgaggggcagagcctgcagcagcagcaacagctggggctgtgggtcattgctggcatcctgaccttcctggcgttggagaagatgttcctggacagcaaggaggaggggaccagccaggcccccaacaaagaccccactgctgctgccgccgcgctcaatggaggccactgtctggcccagccggctgcagagcccggcctcggtgccgtggtccggagcatcaaagtcagcggctacctcaacctgctggccaacaccatcgataacttcacccacgggctggctgtggctgccagcttccttgtgagcaagaagatcgggctcctgacaaccatggccatcctcctgcatgagatcccccatgaggtgggcgactttgccatcctgctccgggccggctttgaccgatggagcgcagccaagctgcaactctcaacagcgctggggggcctactgggcgctggcttcgccatctgtacccagtcccccaagggagtagaggagacggcagcctgggtcctgcccttcacctctggcggctttctctacatcgccttggtgaacgtgctccctgacctcttggaagaagaggacccgtggcgctccctgcagcagctgcttctgctctgtgcgggcatcgtggtaatggtgctgttctcgctcttcgtggattaactttccctgatgccgacgcccctgccccctgcagcaataagatgctcggattcactctgtgaccgcatatgtgagaggcagagagggcgagtggctgcgagagagaatgagcctcccgccagacaggagggaggtactcagctggcccactccacagccaggcctggccctgcccttcaccgtggatgttttcagaagtggccatcgagaggtctggatggttttatagcaactttgctgtgattccgtttgtatctgtaaatatttgttctatagataagatacaaataaatattatccacata

SEQ ID NO: 8718 - protein, 364 aa, Homo sapiens
MPGCPCPGCGMAGPRLLFLTALALELLERAGGSQPALRSRGTATACRLDNKESESWGALLSGERLDTWICSLLGSLMVGLSGVFPLLVIPLEMGTMLRSEAGAWRLKQLLSFALGGLLGNVFLHLLPEAWAYTCSASPGGEGQSLQQQQQLGLWVIAGILTFLALEKMFLDSKEEGTSQAPNKDPTAAAAALNGGHCLAQPAAEPGLGAVVRSIKVSGYLNLLANTIDNFTHGLAVAASFLVSKKIGLLTTMAILLHEIPHEVGDFAILLRAGFDRWSAAKLQLSTALGGLLGAGFAICTQSPKGVEETAAWVLPFTSGGFLYIALVNVLPDLLEEEDPWRSLQQLLLLCAGIVVMVLFSLFVD

SEQ ID NO: 8719 - DNA, 2404 bp, Homo sapiens
ctcgggttccggacaggccccttgtgacgtggccgcgcgccgggggcggccccgggccgggggccgggcggccgggcggccgggcggggcagagcctgggcggggcgcggcaccgcagctggatggctggggccgcccggatcgccgccgccgccgccgcacgtacgtggcatgcctggatgtccctgccctggctgtggcatggcgggcccaaggctcctcttcctcactgcccttgccctggagctcttggaaagggctgggggttcccagccggccctccggagccgggggactgcgacggcctgtcgcctggacaacaaggaaagcgagtcctggggggctctgctgagcggagagcggctggacacctggatctgctccctcctgggttccctcatggtggggctcagtggggtcttcccgttgcttgtcattcccctagagatggggaccatgctgcgctcagaagctggggcctggcgcctgaagcagctgctcagcttcgccctggggggactcttgggcaatgtgtttctgcatctgctgcccgaagcctgggcctacacgtgcagcgccagccctggtggtgaggggcagagcctgcagcagcagcaacagctggggctgtgggtcattgctggcatcctgaccttcctggcgttggagaagatgttcctggacagcaaggaggaggggaccagccaggcccccaacaaagaccccactgctgctgccgccgcgctcaatggaggccactgtctggcccagccggctgcagagcccggcctcggtgccgtggtccggagcatcaaagtcagcggctacctcaacctgctggccaacaccatcgataacttcacccacgggctggctgtggctgccagcttccttgtgagcaagaagatcgggctcctgacaaccatggccatcctcctgcatgagatcccccatgaggtgggcgactttgccatcctgctccgggccggctttgaccgatggagcgcagccaagctgcaactctcaacagcgctggggggcctactgggcgctggcttcgccatctgtacccagtcccccaagggagtagaggagacggcagcctgggtcctgcccttcacctctggcggctttctctacatcgccttggtgaacgtgctccctgacctcttggaagaagaggacccgtggcgctccctgcagcagctgcttctgctctgtgcgggcatcgtggtaatggtgctgttctcgctcttcgtggattaactttccctgatgccgacgcccctgccccctgcagcaataagatgctcggattcactctgtgaccgcatatgtgagaggcagagagggcgagtggctgcgagagagaatgagcctcccgccagacaggagggaggtgcgtgtggatgtatgtggtgtgcacatgtggccagaggtgtgtgcgcgagaccgacactgtgatccctgtgctgggtccggggcccagtgtagcgcctgtccccagccatgctgtggttacctctccttgccgccctgtcaccttcacctcccggagtaagcagcgaggaagagcagcactggtcccaagcagaggccttgccctgctgggaccccgggagtgagagcagcccaaggatccagggtgcagggaactccagagctgcccacctcccactgccccctcagcacacacacagtccccaggcggcctaggggccaaggctggggcggctttggtcccttttcctggcccttccttccccacttctaagccaaagaaaggagaggcaggtgctcctgtaccccagccccactcagcactgacagtccccagctcctagtagtgagctgggaggcgcttcctaagaccctttcctcagggctgccctgggagctcattcctggccaacacgccctggcagcaccagcagctcttgccacctccagctgccaaacagcagcctgccgggcagggagcagccccaggccagagaggcctcccggtccagctcagggatgctcctgccagcacaggggccagggactcctggagcaggcacatagtgagcccgggcagccctgcccagctcaggcccctttccttccccattgaggttggggtaggtgggggcggtgagggctccacgttgtcagcgctcaggaatgtgctccggcagagtgctgaagccataatccccaaccatttcccttggctgacgcccaggtactcagctggcccactccacagccaggcctggccctgcccttcaccgtggatgttttcagaagtggccatcgagaggtctggatggttttatagcaactttgctgtgattccgtttgtatctgtaaatatttgttctatagataagatacaaataaatattatccacatactggc

SEQ ID NO: 8720 - protein, 364 aa, Homo sapiens; identical to SEQ ID NO: 8718

SEQ ID NO: 8721 - DNA, 785 bp, Homo sapiens
gggcgcggcaccgcagctggatggctggggccgcccggatcgccgccgccgccgccgcacgtacgtggcatgcctggatgtccctgccctggctgtggcatggcgggcccaaggctcctcttcctcactgcccttgccctggagctcttggaaagggctgggggttcccagccggccctccggagccgggggactgcgacggcctgtcgcctggacaacaaggaaagcgagtcctggggggctctgctgagcggagagcggctggacacctggatctgctccctcctgggttccctcatggtggggctcagtggggtcttcccgttgcttgtcattcccctagagatggggaccatgctgcgctcagaagctggggcctggcgcctgaagcagctgctcagcttcgccctggggggactcttgggcaatgtgtttctgcatctgctgcccgaagcctgggcctacacgtgcagcgccagccctggtaagtgaggccacacgccaggggcaagacagtgccaggagtgggggcctggtgcccacgcccagggatggccaggatgaccaggagagggattctgggtttctggcaggagcttgcctgggagggagggagggtcattgtcctggtctctgggccctggtcccagtgggagttctgggccccagctgcccaacccacccttgtcactgccctggtgccctggatgagatcccattccaaatggccccctcctatggccctggcttggcttggcctggcctggcctggcattgccgccccc

SEQ ID NO: 8722 - protein, 155 aa, Homo sapiens
MAGAARIAAAAAARTWHAWMSLPWLWHGGPKAPLPHCPCPGALGKGWGFPAGPPEPGDCDGLSPGQQGKRVLGGSAERRAAGHLDLLPPGFPHGGAQWGLPVACHSPRDGDHAALRSWGLAPEAAAQLRPGGTLGQCVSASAARSLGLHVQRQPW

SEQ ID NO: 8723 - DNA, 898 bp, Homo sapiens
gcttggcttggcctggcctggcctggcattgccgccccctgcaggtggtgaggggcagagcctgcagcagcagcaacagctggggctgtgggtcattgctggcatcctgaccttcctggcgttggagaagatgttcctggacagcaaggaggaggggaccagccaggcccccaacaaagaccccactgctgctgccgccgcgctcaatggaggccactgtctggcccagccggctgcagagcccggcctcggtgccgtggtccggagcatcaaagtcagcggctacctcaacctgctggccaacaccatcgataacttcacccacgggctggctgtggctgccagcttccttgtgagcaagaaggtgaggggcttggggccagtggggctctggcgattccagtggcagccatgtggattccacctgtgtctggagtctctgcttcttgcccctccattgccagcgccctcatctaaggctctcatcccccatcctccctgctgctgtcctggccgccactgttctctgatcctgagcccctggtctgttcctgttcccagtactccttgttgggtgcctctgtcaagctgctaggcgtggcccctgcctgctcctagatgcttcttcctctacctcctccctctggcctctggcctctggcccagaggcagcctactctgcagctggccgagatctttcccacctcacactgttccccctgcctggaatgttctcccgcccacgcttcgagcggctgacgactcatccttggggcctcgacttacatggactcctccaccaggcctttgctgacctcctcatctaaatttggttcctgggcctgctcccctgggcactctatccatcctttccttcccagcgcctgtgagtgtgtga

SEQ ID NO: 8724 - protein, 154 aa, Homo sapiens
MFLDSKEEGTSQAPNKDPTAAAAALNGGHCLAQPAAEPGLGAVVRSIKVSGYLNLLANTIDNFTHGLAVAASFLVSKKVRGLGPVGLWRFQWQPCGFHLCLESLLLAPPLPAPSSKALIPHPPCCCPGRHCSLILSPWSVPVPSTPCWVPLSSC

SEQ ID NO: 8725 - DNA, 1167 bp, Homo sapiens
ctggccgctgcctgctccccctgcccatgcctccaccgtgagccgttccctccccacaggcgctccctgcagcagctgcttctgctctgtgcgggcatcgtggtaatggtgctgttctcgctcttcgtggattaactttccctgatgccgacgcccctgccccctgcagcaataagatgctcggattcactctgtgaccgcatatgtgagaggcagagagggcgagtggctgcgagagagaatgagcctcccgccagacaggagggaggtgcgtgtggatgtatgtggtgtgcacatgtggccagaggtgtgtgcgcgagaccgacactgtgatccctgtgctgggtccggggcccagtgtagcgcctgtccccagccatgctgtggttacctctccttgccgccctgtcaccttcacctcccggagtaagcagcgaggaagagcagcactggtcccaagcagaggccttgccctgctgggaccccgggagtgagagcagcccaaggatccagggtgcagggaactccagagctgcccacctcccactgccccctcagcacacacacagtccccaggcggcctaggggccaaggctggggcggctttggtcccttttcctggcccttccttccccacttctaagccaaagaaaggagaggcaggtgctcctgtaccccagccccactcagcactgacagtccccagctcctagtagtgagctgggaggcgcttcctaagaccctttcctcagggctgccctgggagctcattcctggccaacacgccctggcagcaccagcagctcttgccacctccagctgccaaacagcagcctgccgggcagggagcagccccaggccagagaggcctcccggtccagctcagggatgctcctgccagcacaggggccagggactcctggagcaggcacatagtgagcccgggcagccctgcccagctcaggcccctttccttccccattgaggttggggtaggtgggggcggtgagggtccacagccaggcctggccctgcccttcaccgtggatgttttcagaagtggccatcgagaggtctggatggttttatagcaactttgctgtgattccgtttgtatctgtaaatatttgttctatagataagatacaaataaatattatccacata

SEQ ID NO: 8726 - protein, 71 aa, Homo sapiens [sequence omitted]

SEQ ID NO: 8727 - DNA, 449 bp, Homo sapiens
ctcccgccagacaggagggaggtgcgtgtggatgtatgtggtgtgcacatgtggccagaggtgtgtgcgcgagaccgacaaggggccagggactcctggagcaggcacatagtgagcccgggcagccctgcccagctcaggcccctttccttccccattgaggttggggtaggtgggggcggtgagggctccacgttgtcagcgctcaggaatgtgctccggcagagtgctgaagccataatccccaaccatttcccttggctgacgcccaggtactcagctggcccactccacagccaggcctggccctgcccttcaccgtggatgttttcagaagtggccatcgagaggtctggatggttttatagcaactttgctgtgattccgtttgtatctgtaaatatttgttctatagataagatacaaataaatattatccacatactggc

SEQ ID NO: 8728 - protein, 132 aa, Homo sapiens
MWPEVCARDRQGARDSWSRHIVSPGSPAQLRPLSFPIEVGVGGGGEGSTLSALRNVLRQSAEAIIPNHFPWLTPRYSAGPLHSQAWPCPSPWMFSEVAIERSGWFYSNFAVIPFVSVNICSIDKIQINIIHI

SEQ ID NO: 8729 - DNA, 616 bp, Homo sapiens
ctcccgccagacaggagggaggtgcgtgtggatgtatgtggtgtgcacatgtggccagaggtgtgtgcgcgagaccgacaaggggccagggactcctggagcaggcacatagtgagcccgggcagccctgcccagctcaggcccctttccttccccattgaggttggggtaggtgggggcggtgagggctccacgttgtcagcgctcaggaatgtgctccggcagagtgctgaagccataatccccaaccatttcccttggctgacgcccaggtactcagctggcccactccacagccaggcctggccctgcccttcaccgtggatgttttcagaagtggccatcgagaggtctggatggttttatagcaactttgctgtgattccgtttgtatctgtaaatatttgttctatagataagatacaaataaatattatccacatactggctgccttggttctgcacggccttccatggccaggcagggccttccttactgccactgccaggcccttgtctctgaactgtcaccccagtgcatctctgaacgttccatgtcttcctggcttaactttttattccaatgactgagcacctatatgagcctggccgtatg

SEQ ID NO: 8730 - protein, 180 aa, Homo sapiens
MWPEVCARDRQGARDSWSRHIVSPGSPAQLRPLSFPIEVGVGGGGEGSTLSALRNVLRQSAEAIIPNHFPWLTPRYSAGPLHSQAWPCPSPWMFSEVAIERSGWFYSNFAVIPFVSVNICSIDKIQINIIHILAALVLHGLPWPGRAFLTATARPLSLNCHPSASLNVPCLPGLTFYSND

SEQ ID NO: 8731 - DNA, 464 bp, Homo sapiens
agatggtgccaagctagtccgggatgcctttgccctggccaaggagaaagcgccctctatcatcttcattgatgagttggatgccatcggcaccaagcgccctcctccgctcgggccgccttgaccgcaagatagagttcccgatgcccaatgaggaggcccgggccagaatcatgcagatccactcccgaaagatgaatgtcagtcctgacgtgaactacgaggagctggcccgctgcacagatgacttcaatggggcccagtgcaaggctgtgtgtgtggaggcgggcatgatcgcactgcgcaggggtgccacggagctcacccacgaggactacatggaaggcatcctggaggtgcaggccaagaagaaagccaacctacaatactacgcctagggcacacaggccagccccagtctcacggctgaagtgcgcaataaaagatggtttagggtccctgcc

SEQ ID NO: 8732 - protein, 124 aa, Homo sapiens
MPLPWPRRKRPLSSSLMSWMPSAPSALLRSGRLDRKIEFPMPNEEARARIMQIHSRKMNVSPDVNYEELARCTDDFNGAQCKAVCVEAGMIALRRGATELTHEDYMEGILEVQAKKKANLQYYA

SEQ ID NO: 8733 - DNA, 928 bp, Homo sapiens
gaacaaagactcctatctgatcctggagacgctgcccacagagtatgactcgcgggtgaaggccatggaggtagacgagaggcccacggagcaatacagtgacattgggggtttggacaagcagatccaggagctggtggaggccattgtcttgccaatgaaccacaaggagaagtttgagaacttggggatccaacctccaaaaggggtgctgatgtatgggcccccagggacggggaagaccctcctggcccgggcctgtgccgcacagactaaggccaccttcctaaagctggctggcccccagctggtgcagatgttcattggagatggtgccaagctagtccgggatgcctttgccctggccaaggagaaagcgccctctatcatcttcattgatgagttggatgccatcggcaccaagcgctttgacagtgagaaggctggggaccgggaggtgcagaggacaatgctggagcttctgaaccagctggatggcttccagcccaacacccaagttaaggtaattgcagccacaaacagggtggacatcctggaccccgccctcctccgctcgggccgccttgaccgcaagatagagttcccgatgcccaatgaggaggcccgggccagaatcatgcagatccactcccgaaagatgaatgtcagtcctgacgtgaactacgaggagctggcccgctgcacagatgacttcaatggggcccagtgcaaggctgtgtgtgtggaggcgggcatgatcgcactgcgcaggggtgccacggagctcacccacgaggactacatggaaggcatcctggaggtgcaggccaagaagaaagccaacctacaatactacgcctagggcacacaggccagccccagtctcacggctgaagtgcgcaataaaagatggtttagggtccctgcc

SEQ ID NO: 8734 - protein, 265 aa, Homo sapiens
MEVDERPTEQYSDIGGLDKQIQELVEAIVLPMNHKEKFENLGIQPPKGVLMYGPPGTGKTLLARACAAQTKATFLKLAGPQLVQMFIGDGAKLVRDAFALAKEKAPSIIFIDELDAIGTKRFDSEKAGDREVQRTMLELLNQLDGFQPNTQVKVIAATNRVDILDPALLRSGRLDRKIEFPMPNEEARARIMQIHSRKMNVSPDVNYEELARCTDDFNGAQCKAVCVEAGMIALRRGATELTHEDYMEGILEVQAKKKANLQYYA

SEQ ID NO: 8735 - DNA, 711 bp, Homo sapiens
tgaagtgttgagagtcacccatgagctccaagccatgaaggacaagataaaagagaacagtgagaaaatcaaagtgaacaagaccctgccctggtgcagatgttcattggagatggtgccaagctagtccgggatgcctttgccctggccaaggagaaagcgccctctatcatcttcattgatgagttggatgccatcggcaccaagcgctttgacagtgagaaggctggggaccgggaggtgcagaggacaatgctggagcttctgaaccagctggatggcttccagcccaacacccaagttaaggtaattgcagccacaaacagggtggacatcctggaccccgccctcctccgctcgggccgccttgaccgcaagatagagttcccgatgcccaatgaggaggcccgggccagaatcatgcagatccactcccgaaagatgaatgtcagtcctgacgtgaactacgaggagctggcccgctgcacagatgacttcaatggggcccagtgcaaggctgtgtgtgtggaggcgggcatgatcgcactgcgcaggggtgccacggagctcacccacgaggactacatggaaggcatcctggaggtgcaggccaagaagaaagccaacctacaatactacgcctagggcacacaggccagccccagtctcacggctgaagtgcgcaataaaagatggtttagggtccctgcc

SEQ ID NO: 8736 - protein, 181 aa, Homo sapiens
MFIGDGAKLVRDAFALAKEKAPSIIFIDELDAIGTKRFDSEKAGDREVQRTMLELLNQLDGFQPNTQVKVIAATNRVDILDPALLRSGRLDRKIEFPMPNEEARARIMQIHSRKMNVSPDVNYEELARCTDDFNGAQCKAVCVEAGMIALRRGATELTHEDYMEGILEVQAKKKANLQYYA

SEQ ID NO: 8737 - DNA, 1570 bp, Homo sapiens
gttggtctttggaatcggagaggcagattcgctgctccgcagcacggccggagctggtcgggtcaagagtcgggatttgtggggagaggttttccactggtcaagagaaggctttaagaaagacggtattaatctcccgttgcggctcccgcctggtcccatcttctgcccgctcctccaggaaatgaatctgctgccgaatattgagagtccagtgactcggcaggagaagatggcgaccgtgtgggatgaggccgagcaagatggaattggggaggaggtgctcaagatgtccacggaggagatcatccagcgcacacggctgctggacagtgagatcaagatcatgaagagtgaagtgttgagagtcacccatgagctccaagccatgaaggacaagataaaagagaacagtgagaaaatcaaagtgaacaagaccctgccgtaccttgtctccaacgtcatcgagctcctggatgttgatcctaatgaccaagaggaggatggtgccaatattgacctggactcccagaggaagggcaagtgtgctgtgatcaaaacctctacacgacagacgtacttccttcctgtgattgggttggtggatgctgaaaagctaaagccaggagacctggtgggtgtgaacaaagactcctatctgatcctggagacgctgcccacagagtatgactcgcgggtgaaggccatggaggtagacgagaggcccacggagcaatacagtgacattgggggtttggacaagcagatccaggagctggtggaggccattgtcttgccaatgaaccacaaggagaagtttgagaacttggggatccaacctccaaaaggggtgctgatgtatgggcccccagggacggggaagaccctcctggcccgggcctgtgccgcacagactaaggccaccttcctaaagctggctggcccccagctggtgcagatgttcattggagatggtgccaagctagtccgggatgcctttgccctggccaaggagaaagcgccctctatcatcttcattgatgagttggatgccatcggcaccaagcgctttgacagtgagaaggctggggaccgggaggtgcagaggacaatgctggagcttctgaaccagctggatggcttccagcccaacacccaagttaaggtaattgcagccacaaacagggtggacatcctggaccccgccctcctccgctcgggccgccttgaccgcaagatagagttcccgatgcccaatgaggaggcccgggccagaatcatgcagatccactcccgaaagatgaatgtcagtcctgacgtgaactacgaggagctggcccgctgcacagatgacttcaatggggcccagtgcaaggctgtgtgtgtggaggcgggcatgatcgcactgcgcaggggtgccacggagctcacccacgaggactacatggaaggcatcctggaggtgcaggccaagaagaaagccaacctacaatactacgcctagggcacacaggccagccccagtctcacggctgaagtgcgcaataaaagatggtttagggtccctgcc

SEQ ID NO: 8738 - protein, 439 aa, Homo sapiens; identical to SEQ ID NO: 1324

SEQ ID NO: 8739 - DNA, 626 bp, Homo sapiens
agtgactcggcaggagaagatggcgaccgtgtgggatgaggccgaggtgggcaccgggcgagctggcggtccgggaaccggggcccgcagggagacgccattgacaagagggaaggaggtggctgggggtcaagcaagatggaattggggaggaggtgctcaagatgtccacggaggagatcatccagcgcacacggctgctggacagtgagatcaagatcatgaagagtgaagtgttgagagtcacccatgagctccaagccatgaaggacaagataaaagagaacagtgagaaaatcaaagtgaacaagaccctgccgtaccttgtctccaacgtcatcgagctcctggatgttgatcctaatgaccaagaggaggatggtgccaatattgacctggactcccagaggaagggcaagtgtgctgtgatcaaaacctctacacgacagacgtacttccttcctgtgattgggttggtggatgctgaaaagctaaagccaggagacctggtgggtgtgaacaaagactcctatctgatcctggagacgctgcccacagagtatgactcgcgggtgaaggccatggaggtagacgagaggcccacggagcaatacagtgacattggg

SEQ ID NO: 8740 - protein, 153 aa, Homo sapiens
MSTEEIIQRTRLLDSEIKIMKSEVLRVTHELQAMKDKIKENSEKIKVNKTLPYLVSNVIELLDVDPNDQEEDGANIDLDSQRKGKCAVIKTSTRQTYFLPVIGLVDAEKLKPGDLVGVNKDSYLILETLPTEYDSRVKAMEVDERPTEQYSDI

SEQ ID NO: 8741 - DNA, 1671 bp, Homo sapiens
cccaactggcagcgacagctgcagacgggctgaaccagctttgttcccagggtggcgcctgctctccatccaggccccattccggctcccacccgacgctgcttttgttcccacgtttcggggggcagctggcactgtgattcctgccccatgagtgcctagaggcacggagccaccagggatcaccccacgtgggacacagggcttggggaggatggggcaggaccagaccaagcagcagatcgagaaggggctccagctgtaccagtccaaccagacagagaaggcattgcaggtgtggacaaaggtgctggagaagagctcggacctcatggggcgcttccgcgtgctgggctgcctggtcacagcccactcggagatgggccgctacaaggagatgctgaagttcgctgtggtccagatcgacacggcccgggagctggaggatgccgacttcctcctggagagctacctgaacctggcacgcagcaacgagaagctgtgcgagtttcacaagaccatctcctactgcaagacctgccttgggctgcctggtaccagggcaggtgcccagctcggaggccaggtcagcctgagcatgggcaatgccttcctgggcctcagcgtcttccagaaggccctggagagcttcgagaaggccctgcgctatgcccacaacaatgatgacgccatgctcgagtgccgcgtgtgctgcagcctgggcagcttctatgcccaggtcaaggactacgagaaagccctgttcttcccctgcaaggcggcagagcttgtcaacaactatggcaaaggctggagcctgaagtaccgggccatgagccagtaccacatggccgtggcctatcgcctgctgggccgcctgggcagtgccatggagtgttgtgaggagtctatgaagatcgcgctgcagcacggggaccggccactgcaggcgctctgcctgctctgcttcgctgacatccaccggagccgtggggacctggagacagccttccccaggtacgactccgccatgagcatcatgaccgagatcggaaaccgcctggggcaggtgcaggcgctgctgggtgtggccaagtgctgggtggccaggaaggcgctggacaaggctctggatgccatcgagagagcccaggatctggccgaggaggtggggaacaagctgagccagctcaagctgcactgtctgagcgagagcatttaccgcagcaaagggctgcagcgggaactgcgggcgcacgttgtgaggttccacgagtgcgtggaggagacggagctctactgcggcctgtgcggcgagtccataggcgagaagaacagccggctgcaggccctaccttgctcccacatcttccacctcaggtgcctgcagaacaacgggacccggagctgtcccaactgccgccgctcatccatgaagcctggctttgtatgactcctggcagcaggcgtgggcttcctcctcgccactcctgctctttctccactgcacgccagaggcccatttactcctggggcagctgccaggtcgtcctcaccatagccaaggccttggggcctgcccagggctgctcccctgggcccagctcccctccctgcctctttgtactttgctctttatagaaaaataaactgtttgtacctggtcccagg

SEQ ID NO: 8742 - protein, 412 aa, Homo sapiens; identical to SEQ ID NO: 1326

SEQ ID NO: 8743 - DNA, 405 bp, Homo sapiens
agccttccccaggtacgactccgccatgagcatcatgaccgagatcggaaaccgcctggggcaggtgcaggcgctgctgggtgtggccaagtgctgggtggccaggaaggcgctggacaaggtgcctgcagaacaacgggacccggagctgtcccaactgccgccgctcatccatgaagcctggctttgtatgactcctggcagcaggcgtgggcttcctcctcgccactcctgctctttctccactgcacgccagaggcccatttactcctggggcagctgccaggtcgtcctcaccatagccaaggccttggggcctgcccagggctgctcccctgggcccagctcccctccctgcctctttgtactttgctctttatagaaaaataaactgtttgtacctgg

SEQ ID NO: 8744 - protein, 118 aa, Homo sapiens
MSIMTEIGNRLGQVQALLGVAKCWVARKALDKVPAEQRDPELSQLPPLIHEAWLCMTPGSRRGLPPRHSCSFSTARQRPIYSWGSCQVVLTIAKALGPAQGCSPGPSSPPCLFVLCSL

SEQ ID NO: 8745 - DNA, 1487 bp, Homo sapiens
cccaactggcagcgacagctgcagacgggctgaaccagctttgttcccagggtggcgcctgctctccatccaggccccattccggctcccacccgacgctgcttttgttcccacgtttcggggggcagctggcactgtgattcctgccccatgagtgcctagaggcacggagccaccagggatcaccccacgtgggacacagggcttggggaggatggggcaggaccagaccaagcagcagatcgagaaggggctccagctgtaccagtccaaccagacagagaaggcattgcaggtgtggacaaaggtgctggagaagagctcggacctcatggggcgcttccgcgtgctgggctgcctggtcacagcccactcggagatgggccgctacaaggagatgctgaagttcgctgtggtccagatcgacacggcccgggagctggaggatgccgacttcctcctggagagctacctgaacctggcacgcagcaacgagaagctgtgcgagtttcacaagaccatctcctactgcaagacctgccttgggctgcctggtaccagggcaggtgcccagctcggaggccaggtcagcctgagcatgggcaatgccttcctgggcctcagcgtcttccagaaggccctggagagcttcgagaaggccctgcgctatgcccacaacaatgatgacgccatgctcgagtgccgcgtgtgctgcagcctgggcagcttctatgcccaggtcaaggactacgagaaagccctgttcttcccctgcaaggcggcagagcttgtcaacaactatggcaaaggctggagcctgaagtaccgggccatgagccagtaccacatggccgtggcctatcgcctgctgggccgcctgggcagtgccatggagtgttgtgaggagtctatgaagatcgcgctgcagcacggggaccggccactgcaggcgctctgcctgctctgcttcgctgacatccaccggagccgtggggacctggagctgagccagctcaagctgcactgtctgagcgagagcatttaccgcagcaaagggctgcagcgggaactgcgggcgcacgttgtgaggttccacgagtgcgtggaggagacggagctctactgcggcctgtgcggcgagtccataggcgagaagaacagccggctgcaggccctaccttgctcccacatcttccacctcaggtgcctgcagaacaacgggacccggagctgtcccaactgccgccgctcatccatgaagcctggctttgtatgactcctggcagcaggcgtgggcttcctcctcgccactcctgctctttctccactgcacgccagaggcccatttactcctggggcagctgccaggtcgtcctcaccatagccaaggccttggggcctgcccagggctgctcccctgggcccagctcccctccctgcctctttgtactttgctctttatagaaaaataaactgtttgtacctgg

SEQ ID NO: 8746 - protein, 353 aa, Homo sapiens; identical to SEQ ID NO: 1328

SEQ ID NO: 8747 - DNA, 1712 bp, Homo sapiens
ttctagattcctgccgtttgttcatcgttgtgcctaaagcatgtcgatgtggcgtcaagtacatcgtccaaatccctgtctcttcagcttctctgatgcttgaactctcacctttgaccttgtgttgacctttgatgctgatgtgtatttttattatgtttgtttctttcttcgtttttttttctttttttctttcctttttttttccttttgtgctgccaaattggttttgctagaacgactgctgaaggggaaatatttaaacttgcatttgaatataaaaaaaatctatttttctagaacttcataagataaccacttgattttgtgattccaattctttgtaattgtcttcagagcagccctactagcacataccgcgtggtgtttgtatttctgtgaacacacagccagtccgtttctaggctttgtttctctgtgtgcttagttttaaagacaactttgaagtaaacaatgaaataaaagatgtcactaaaacctctgaggctcctgagcacattttgctgatacagtctgtggggcttgaggagaccgcatgtattgttctttcttttgtttttcttctgagttctcaactgcggagagcacctgaaccccctttcctttttgaccgcaggttgcctggtattatgcccaaggccgctctgcctgggggaaagggcagccaggcagaggcccagtgtctggtaggctgctgaatttcctggaaggggtgattggatggaaagaggccagaaaccccagcctgagagactgctgtgcaccccacagtctgactgcacagagccgcctctgttggcaggaggcactgaggctccccttcctgtgtattgagaagcagtgtttgccaatatattttgctttcaattccaagaggagctctgggaaaacctgtggataaaaccaaatgccaaatgttggacgttgtttccttttccttttctctctctgattgttttaattgttctgtggtggttttaatggatttgagaccctggagcggcagctgcctttctgatttccagctgctttttgtgaataatttaaaaagaaaaaaaaaaagaaactttacattttggagacaaacctgtgtgagttttttattggtacaaacgttgtatttaacactaggggttttgtacagttttttgccttttctactagaaaacaatgtaaagtgatttcacaatgtgaagagaaaaaaaaattgccactatgaccaaacgcacagtctgttctgcagcaacaacgggattcaatcaactcagtcgtgattcagccgtagaaatgcttttcctttatcttgtttgagcttttcctttctttcctgttttgatttgcaaaagaaaatgtcttttttgtgtgaacttgtgttgtactctgtagaaaattatggattttactttaatggtttaaaaaaaggcaaggagagccctcgtcgcttttcttacctaatcacagagtttgtgtagtgaatttaaaaagaaaaaaaaattgttataagtttggagcaagggagtatgtgtttcaaaggaatctccttcctttttttgtgtgtttttccttttgtcccaatggggaacctaaatctgttttaattgcacagacacatggacaaaaagtcattttgtatctgccaagtgtggtaccttcctttgtttatttgctattaaactgtttgagaagaactg

SEQ ID NO: 8748 - protein, 88 aa, Homo sapiens [sequence omitted]

SEQ ID NO: 8749 - DNA, 8029 bp, Homo sapiens
ggcagcggcagcggcggcgggacgcggaggctcccccgggattcggcctcagcagcgaggcggcggcggcggctgcggaggcgcaggcagcaactgaggcagcggcaggctcaggtgcagccgctggctgaacataacttctttttttcaaagttccctgtgttgtgaactgagcttgggtgaagtgaaatctttgaggaagctaaagctgtgtgtatttgtggatcagacaagtgcagcaagttaatatcattggcttctgaaggggagagtgaggtgatggctgcgtttaagttggatttccttccagaaatgatggtggatcattgctctttgaattccagtcccgtctcaaagaaaatgaacggcaccctggaccacccagaccaaccagatcttgatgctatcaagatgtttgtgggccaggttccaaggacctggtctgaaaaggacttgcgggaactcttcgaacagtatggtgctgtgtatgaaatcaacgtcctaagggataggagccaaaacccgcctcagagcaaagggtgctgttttgttacattttacacccgtaaagctgcattagaagctcagaatgctcttcacaacatgaaagtcctcccagggatgcatcaccctatacagatgaaacctgctgacagtgagaagaacaatgcagtggaagacaggaagctgtttattggtatgatttccaagaagtgcactgaaaatgacatccgagtcatgttctcttcgtttggacagattgaagaatgccggatattgcggggacctgatggcctgagccgaggttgtgcatttgtgacttttacaacaagagccatggcacagacggctatcaaggcaatgcaccaagcacagaccatggagggttgctcatcacccatggtggtaaaatttgctgatacacagaaggacaaagaacagaagagaatggcccagcagctccagcagcagatgcagcaaatcagcgcagcatctgtgtggggaaaccttgctggtctaaatactcttggaccccagtatttagcactttatttgcagctccttcagcagactgcctcctctgggaacctcaacaccctgagcagcctccacccaatgggagggttgaatgcaatgcagttacagaatttggctgcactagctgctgcagctagtgcagctcagaacacaccaagtggtaccaatgctctcactacatccagcagtcccctcagcgtgctcactagttcagggtcctcacctagctctagcagcagtaattctgtcaaccccatagcctcacttggagccctgcagacattagctggagcaacggctggcctcaatgttggctctttggcaggaatggctgctttaaatggtggcctgggcagcagtggcctttccaatggcaccgggagcaccatggaggccctcactcaggcctactcgggtatccagcaatatgctgctgctgcgctccccactctgtacaaccagaatcttctgacacagcagagtattggtgctgctggaagccagaaggaaggtccagagggagccaacctgttcatctaccacctgccccaggagtttggtgatcaggacctgctgcagatgtttatgccctttgggaatgtcgtgtctgccaaggttttcatagacaagcagacaaacctgagcaagtgttttggttttgtaagttacgacaatcctgtttcggcccaagctgccatccagtccatgaacggctttcagattggcatgaagcggcttaaagtgcagctcaaacgttcgaagaatgacagcaagccctactgagcgtgctcccctctgagactggagtgagagggtcttctggcacagcttgccctgaagactcggctactgccttctgtgggagtttcgcttcgtacagaggacaagtttgtgctttggtttccagtgttttactttggagtttaggtgccatatcctgaggttttttttgtttttgtttttgtttctcctttatttaaagtttgctgtgtttgtaaccagtgtgtgttgagaaggaccaacaccaaaccaccctggggaagggggacagggaaacatttaacacagacgatgatcaggatttgccccaaaccaccccaagagagaggactgagtggaacaaaaaagtgacccccagaacctctcttagtgtgagggtgggtagaatgagaactgacacctgggagctgtggggagcagagcggctttggggaagagtggagtgactagacacctaatgccctggcagctggagactcaaactcctgtacagctaccttctgggaaatagtttttgacacctatttttcagattcttgtccggaatttctgctgctcttttcaaaaaagggcattaacaattctctggaaataaagcacctgttagcctgacatatgcaaaaagcagggcggcatcacccattacgagctcccccagccagcagtcagtattggattggccttgcctggctggtggcagtttgggagaaacagccaaagaggttagtttatttcaacaccaaattagaccatggcccatttccaacgggtctctttaaaggcctctatggaatacattgcctggtttccttctttgcagttcaccacagcaaggaatgtcacctccatcccaagccaccattttctcatgaaggcaaatccaagaagggcttgcagttcttgctgaagggggtaccatttgtgggcagagtgatcaataccatctagttgggggaggaggagcttatttcttggtgtacttgaatcagaaggtccctgcaagccagtatgcttcatttgccagtggccagaaattctcccttgcctccttgattgaggtgtcccagatgtagtattcccacaggggtctggcaggcccctcctgtaaccactccagtcacattttctgctcttgaggcagaggtgacatcaggacgtttacagcctccacatgaattgagtgttcatttacctcagtattaccgtgttcatttttgtcctcgtgctacagttagctccctgccgcctcttgcaggtcttacttcagctcttgcctgtgacccacacagcttctgggctctgcctctgctctaagaagtgctgtgggggtagagaaccaggaaggacatgctgttgggaatgtacacctgggcagaggtggccctgttaagatgtgactgtagccacagccagggatgggatccctgggtctctggaatctgaaacctcaacaaataccagtcttgacccctagcagcagagataagaataaaggggttggtttgctattaagtcagatgggggctctctccttgtcatgctgtccctgtgggtaacagacagggattgaccatcttactgttgtacaggtagctggtggtgttggattatcccattgaagctgggacagctgttcctttctcatagtgataacttgggtctgttgtcctctaaggaacgtgaaacatacacttcttaagctgaaccacgtaaacttgaaattctgcgcactgggagaaatgtgtcctgtgtttcaaaggataaaactgttctaaaggcttccagggtcatgatgggattttttaaataaatgcaaaaaataaaaataaaaaagaaaaaagaaaacaaaaaaaaaaaagaaaaaaatgctaggttggggaggcgctgttctgaatcccaaccggctggaaccaagaatgtcgtttctatttttatagaagttttatacagctccggggtggagaatatttattacctaaattatatctctggaaaaggccaggattttgtagaatccagaatgtgattgttatacacacagggtgctgtgtatgattgaaactactgactttctgtggcccgtttgcagcccagctaacctgcccaaggggaaggtgttaatgctgtgaattggcagaggagagagctgtgctccatagggtgctgccggtgctgtgctccctagccttctgttctgtcttcctccttagccagaacgccactcccttcccacatccccttcttctctccgccttcccccatctcaccattatttgtccatggatttgtcctgggctctgggaccttatgaaacccctttcctaatgacataagaggccaaggtgcaatccacccacctttgataccagaccctgagggcttcatacctgctgatgggttttcttttctaaaaggaatgctcgccccagcagggtcctgggctgcttgagcagccagctggtgagaccatgcacttctctgttctctcctccccctgcccagtgagttagcacagcagtagcactgcccttgagcacagttctttccccaggccaaagatggttttgtgaagaagctgctcccctacaagtctcacgtgtgaaagggctcagctcagagtggagactcgctgtcaagtcttaagcaatccttttctgttgtgtgaaggtttcacttacaatgtgttttctgctgtagttttgtttcttacttgggttacatcatgaaattgatttgccttgaatgcagccagaccactgtctcctgggttccccttgagtggccagggcctggatggaagctaagagcttggatttctgggaacaaagggccatccccataagattgagcagaaattctggtcctcttccctgaaaaattttccccaccccagccagcatcttctgcttccccttgggttgtgaccagggagtggggagagaggctgaggctctgctcccctggagaccttctcttaggagttgggtgcttcatggaaaatccaagccttaggttcccttctgtctctggcaattagatgtgttcttggtgtcctccatgtcctttttgacttttccctgtgtccattgttagcatgtgcaaaagttccctgtcattacccaacccctgcccgcccacctcatttcagggctgtacacacagtgagtgttcctgttctctctctctttgtttggatgtattgctctgtgtaactcagtgggtctccctctttctggtttgtttttttttctagattcctgccgtttgttcatcgttgtgcctaaagcatgtcgatgtggcgtcaagtacatcgtccaaatccctgtctcttcagcttctctgatgcttgaactctcacctttgaccttgtgttgacctttgatgctgatgtgtatttttattatgtttgtttctttcttcgtttttttttctttttttctttcctttttttttccttttgtgctgccaaattggttttgctagaacgactgctgaaggggaaatatttaaacttgcatttgaatataaaaaaaatctatttttctagaacttcataagataaccacttgattttgtgattccaattctttgtaattgtcttcagagcagccctactagcacataccgcgtggtgtttgtatttctgtgaacacacagccagtccgtttctaggctttgtttctctgtgtgcttagttttaaagacaactttgaagtaaacaatgaaataaaagatgtcactaaaacctctgaggctcctgagcacattttgctgatacagtctgtggggcttgaggagaccgcatgtattgttctttcttttgtttttcttctgagttctcaactgcggagagcacctgaaccccctttcctttttgaccgcaggctgcactttgggccccagccagccctttttctttttctttttcttttgtggttcttccctggagcgactctggggagtcctggatatcccgcctgccccttcccctcagccccatgcttgttccaacagtctccacagcaaaatgtgatgctttgatttttttgttgttgtttttgtttttgtattgtttttgtgtttttgttttgaattttttcctttcctactaagattatgcccagaaaaaagttttgcatgtttcctgctgtttcttcacaccttcgtatatatcaccttcacctctctgttttctatagtttgtgcaaaaactgatcgatttaaaagggtttcaaagaagctgttttaaattgttgtagggttgattatttttttcaagattgtattgtttaattttgaagtggcaactttctcctctattgcccttagagcgtttgcctgtgcacttagactgtcacttcgtgtggcctccaggtcttaccggggcttccgggaggctggctgctttgctcagagagggtgggaagggggcctggagagacacgagaagcagaggtagagcctagaaggtggcagcaggtgggtaagaggcttatttagcacattaggggcagtgagcacctggaggaaggagggcgctcccaatcacccgtaggaggccatctgcacaccaagcggcaattcacctgctggcgcttttcctaggtgacaagcacaatactacagtcttcacactgtttacagccctgggcaccagccacccggcactggctcttcatcacagctctgctcttgcttagctagtggggtgggggaaagggcagggatttgtttttttaattgggtggagagccaaacagctactgtccctgggtgccaagcaagccagttttttggttccctgagggaaactgaccctcctctcttgtggcaccatccagcctcagggtcttggagacttgagtaagaatgtgagtggagggggagaggtgaggagaggagcacagggtggatctgtggagggaagaggttacagggggaggagctgatgatagatcccacccagacttaagctgctggtgggtgggtgagctgggaagtaggactgtccagggaagggtggagagatgtagctaggggctggggagggggaggtggaagcgctattgagcatcctccacaccaaggttgatgaaggaagggatcccagcagggtttctgctctggggctggcaggttgcctggtattatgcccaaggccgctctgcctgggggaaagggcagccaggcagaggcccagtgtctggtaggctgctgaatttcctggaaggggtgattggatggaaagaggccagaaaccccagcctgagagactgctgtgcaccccacagtctgactgcacagagccgcctctgttggcaggaggcactgaggctccccttcctgtgtattgagaagcagtgtttgccaatatattttgctttcaattccaagaggagctctgggaaaacctgtggataaaaccaaatgccaaatgttggacgttgtttccttttccttttctctctctgattgttttaattgttctgtggtggttttaatggatttgagaccctggagcggcagctgcctttctgatttccagctgctttttgtgaataatttaaaaagaaaaaaaaaaagaaactttacattttggagacaaacctgtgtgagttttttattggtacaaacgttgtatttaacactaggggttttgtacagttttttgccttttctactagaaaacaatgtaaagtgatttcacaatgtgaagagaaaaaaaaattgccactatgaccaaacgcacagtctgttctgcagcaacaacgggattcaatcaactcagtcgtgattcagccgtagaaatgcttttcctttatcttgtttgagcttttcctttctttcctgttttgatttgcaaaagaaaatgtcttttttgtgtgaacttgtgttgtactctgtagaaaattatggattttactttaatggtttaaaaaaaggcaaggagagccctcgtcgcttttcttacctaatcacagagtttgtgtagtgaatttaaaaagaaaaaaaaattgttataagtttggagcaagggagtatgtgtttcaaaggaatctccttcctttttttgtgtgtttttccttttgtcccaatggggaacctaaatctgttttaattgcacagacacatggacaaaaagtcattttgtatctgccaagtgtggtaccttcctttgtttatttgctattaaactgtttgagaagaactg

SEQ ID NO: 8750 - protein, 513 aa, Homo sapiens
MAAFKLDFLPEMMVDHCSLNSSPVSKKMNGTLDHPDQPDLDAIKMFVGQVPRTWSEKDLRELFEQYGAVYEINVLRDRSQNPPQSKGCCFVTFYTRKAALEAQNALHNMKVLPGMHHPIQMKPADSEKNNAVEDRKLFIGMISKKCTENDIRVMFSSFGQIEECRILRGPDGLSRGCAFVTFTTRAMAQTAIKAMHQAQTMEGCSSPMVVKFADTQKDKEQKRMAQQLQQQMQQISAASVWGNLAGLNTLGPQYLALYLQLLQQTASSGNLNTLSSLHPMGGLNAMQLQNLAALAAAASAAQNTPSGTNALTTSSSPLSVLTSSGSSPSSSSSNSVNPIASLGALQTLAGATAGLNVGSLAGMAALNGGLGSSGLSNGTGSTMEALTQAYSGIQQYAAAALPTLYNQNLLTQQSIGAAGSQKEGPEGANLFIYHLPQEFGDQDLLQMFMPFGNVVSAKVFIDKQTNLSKCFGFVSYDNPVSAQAAIQSMNGFQIGMKRLKVQLKRSKNDSKPY

SEQ ID NO: 8751 - DNA, 4613 bp, Homo sapiens
tggggtgttctgctctggcggcagcggcagcggcggcgggacgcggaggctcccccgggattcggcctcagcagcgaggcggcggcggcggctgcggaggcgcaggcagcaactgaggcagcggcaggctcaggtgcagccgctgctcaaagaaaatgaacggcaccctggaccacccagaccaaccagatcttgatgctatcaagatgtttgtgggccaggttccaaggacctggtctgaaaaggacttgcgggaactcttcgaacagtatggtgctgtgtatgaaatcaacgtcctaagggataggagccaaaacccgcctcagagcaaagggtgctgttttgttacattttacacccgtaaagctgcattagaagctcagaatgctcttcacaacatgaaagtcctcccagggatgcatcaccctatacagatgaaacctgctgacagtgagaagaacaatgcagtggaagacaggaagctgtttattggtatgatttccaagaagtgcactgaaaatgacatccgagtcatgttctcttcgtttggacagattgaagaatgccggatattgcggggacctgatggcctgagccgaggttgtgcatttgtgacttttacaacaagagccatggcacagacggctatcaaggcaatgcaccaagcacagaccatggagggttgctcatcacccatggtggtaaaatttgctgatacacagaaggacaaagaacagaagagaatggcccagcagctccagcagcagatgcagcaaatcagcgcagcatctgtgtggggaaaccttgctggtctaaatactcttggaccccagtatttagcactttatttgcagctccttcagcagactgcctcctctgggaacctcaacaccctgagcagcctccacccaatgggagggttgaatgcaatgcagttacagaatttggctgcactagctgctgcagctagtgcagctcagaacacaccaagtggtaccaatgctctcactacatccagcagtcccctcagcgtgctcactagttcagggtcctcacctagctctagcagcagtaattctgtcaaccccatagcctcacttggagccctgcagacattagctggagcaacggctggcctcaatgttggctctttggcaggaatggctgctttaaatggtggcctgggcagcagtggcctttccaatggcaccgggagcaccatggaggccctcactcaggcctactcgggtatccagcaatatgctgctgctgcgctccccactctgtacaaccagaatcttctgacacagcagagtattggtgctgctggaagccagaaggaaggtccagagggagccaacctgttcatctaccacctgccccaggagtttggtgatcaggacctgctgcagatgtttatgccctttgggaatgtcgtgtctgccaaggttttcatagacaagcagacaaacctgagcaagtgttttggttttgtaagttacgacaatcctgtttcggcccaagctgccatccagtccatgaacggctttcagattggcatgaagcggcttaaagtgcagctcaaacgttcgaagaatgacagcaagccctactgagcgtgctcccctctgagactggagtgagagggtcttctgattcctgccgtttgttcatcgttgtgcctaaagcatgtcgatgtggcgtcaagtacatcgtccaaatccctgtctcttcagcttctctgatgcttgaactctcacctttgaccttgtgttgacctttgatgctgatgtgtatttttattatgtttgtttctttcttcgtttttttttctttttttctttcctttttttttccttttgtgctgccaaattggttttgctagaacgactgctgaaggggaaatatttaaacttgcatttgaatataaaaaaaatctatttttctagaacttcataagataaccacttgattttgtgattccaattctttgtaattgtcttcagagcagccctactagcacataccgcgtggtgtttgtatttctgtgaacacacagccagtccgtttctaggctttgtttctctgtgtgcttagttttaaagacaactttgaagtaaacaatgaaataaaagatgtcactaaaacctctgaggctcctgagcacattttgctgatacagtctgtggggcttgaggagaccgcatgtattgttctttcttttgtttttcttctgagttctcaactgcggagagcacctgaaccccctttcctttttgaccgcaggctgcactttgggccccagccagccctttttctttttctttttcttttgtggttcttccctggagcgactctggggagtcctggatatcccgcctgccccttcccctcagccccatgcttgttccaacagtctccacagcaaaatgtgatgctttgatttttttgttgttgtttttgtttttgtattgtttttgtgtttttgttttgaattttttcctttcctactaagattatgcccagaaaaaagttttgcatgtttcctgctgtttcttcacaccttcgtatatatcaccttcacctctctgttttctatagtttgtgcaaaaactgatcgatttaaaagggtttcaaagaagctgttttaaattgttgtagggttgattatttttttcaagattgtattgtttaattttgaagtggcaactttctcctctattgcccttagagcgtttgcctgtgcacttagactgtcacttcgtgtggcctccaggtcttaccggggcttccgggaggctggctgctttgctcagagagggtgggaagggggcctggagagacacgagaagcagaggtagagcctagaaggtggcagcaggtgggtaagaggcttatttagcacattaggggcagtgagcacctggaggaaggagggcgctcccaatcacccgtaggaggccatctgcacaccaagcggcaattcacctgctggcgcttttcctaggtgacaagcacaatactacagtcttcacactgtttacagccctgggcaccagccacccggcactggctcttcatcacagctctgctcttgcttagctagtggggtgggggaaagggcagggatttgtttttttaattgggtggagagccaaacagctactgtccctgggtgccaagcaagccagttttttggttccctgagggaaactgaccctcctctcttgtggcaccatccagcctcagggtcttggagacttgagtaagaatgtgagtggagggggagaggtgaggagaggagcacagggtggatctgtggagggaagaggttacagggggaggagctgatgatagatcccacccagacttaagctgctggtgggtgggtgagctgggaagtaggactgtccagggaagggtggagagatgtagctaggggctggggagggggaggtggaagcgctattgagcatcctccacaccaaggttgatgaaggaagggatcccagcagggtttctgctctggggctggcaggttgcctggtattatgcccaaggccgctctgcctgggggaaagggcagccaggcagaggcccagtgtctggtaggctgctgaatttcctggaaggggtgattggatggaaagaggccagaaaccccagcctgagagactgctgtgcaccccacagtctgactgcacagagccgcctctgttggcaggaggcactgaggctccccttcctgtgtattgagaagcagtgtttgccaatatattttgctttcaattccaagaggagctctgggaaaacctgtggataaaaccaaatgccaaatgttggacgttgtttccttttccttttctctctctgattgttttaattgttctgtggtggttttaatggatttgagaccctggagcggcagctgcctttctgatttccagctgctttttgtgaataatttaaaaagaaaaaaaaaaagaaactttacattttggagacaaacctgtgtgagttttttattggtacaaacgttgtatttaacactaggggttttgtacagttttttgccttttctactagaaaacaatgtaaagtgatttcacaatgtgaagagaaaaaaaaattgccactatgaccaaacgcacagtctgttctgcagcaacaacgggattcaatcaactcagtcgtgattcagccgtagaaatgcttttcctttatcttgtttgagcttttcctttctttcctgttttgatttgcaaaagaaaatgtcttttttgtgtgaacttgtgttgtactctgtagaaaattatggattttactttaatggtttaaaaaaaggcaaggagagccctcgtcgcttttcttacctaatcacagagtttgtgtagtgaatttaaaaagaaaaaaaaattgttataagtttggagcaagggagtatgtgtttcaaaggaatctccttcctttttttgtgtgtttttccttttgtcccaatggggaacctaaatctgttttaattgcacagacacatggacaaaaagtcattttgtatctgccaagtgtggtaccttcctttgtttatttgctattaaactgtttgagaagaactg

SEQ ID NO: 8752 - protein, 486 aa, Homo sapiens; identical to SEQ ID NO: 1330

SEQ ID NO: 8753 - DNA, 2199 bp, Homo sapiens
atactttgaaaataacagctcttttttgttccctcgtgtgtctcttcccaattgtatccctattgtattttctcatagtatgtttcagcagaaatcaaggtagacgaagtaacctcttgtcctgaattttcatagttgctcattcttaataatggcagcagaagcaacaatgagagtaactacctcctcagctcaaagaaaatgaacggcaccctggaccacccagaccaaccagatcttgatgctatcaagatgtttgtgggccaggttccaaggacctggtctgaaaaggacttgcgggaactcttcgaacagtatggtgctgtgtatgaaatcaacgtcctaagggataggagccaaaacccgcctcagagcaaagggtgctgttttgttacattttacacccgtaaagctgcattagaagctcagaatgctcttcacaacatgaaagtcctcccagggatgcatcaccctatacagatgaaacctgctgacagtgagaagaacaatgcagtggaagacaggaagctgtttattggtatgatttccaagaagtgcactgaaaatgacatccgagtcatgttctcttcgtttggacagattgaagaatgccggatattgcggggacctgatggcctgagccgaggttgtgcatttgtgacttttacaacaagagccatggcacagacggctatcaaggcaatgcaccaagcacagaccatggagggttgctcatcacccatggtggtaaaatttgctgatacacagaaggacaaagaacagaagagaatggcccagcagctccagcagcagatgcagcaaatcagcgcagcatctgtgtggggaaaccttgctggtctaaatactcttggaccccagtatttagcactttatttgcagctccttcagcagactgcctcctctgggaacctcaacaccctgagcagcctccacccaatgggagggttgaatgcaatgcagttacagaatttggctgcactagctgctgcagctagtgcagctcagaacacaccaagtggtaccaatgctctcactacatccagcagtcccctcagcgtgctcactagttcagggtcctcacctagctctagcagcagtaattctgtcaaccccatagcctcacttggagccctgcagacattagctggagcaacggctggcctcaatgttggctctttggcaggaatggctgctttaaatggtggcctgggcagcagtggcctttccaatggcaccgggagcaccatggaggccctcactcaggcctactcgggtatccagcaatatgctgctgctgcgctccccactctgtacaaccagaatcttctgacacagcagagtattggtgctgctggaagccagaaggaaggtccagagggagccaacctgttcatctaccacctgccccaggagtttggtgatcaggacctgctgcagatgtttatgccctttgggaatgtcgtgtctgccaaggttttcatagacaagcagacaaacctgagcaagtgttttggttttgtaagttacgacaatcctgtttcggcccaagctgccatccagtccatgaacggctttcagattggcatgaagcggcttaaagtgcagctcaaacgttcgaagaatgacagcaagccctactgagcgtgctcccctctgagactggagtgagagggtcttctgattcctgccgtttgttcatcgttgtgcctaaagcatgtcgatgtggcgtcaagtacatcgtccaaatccctgtctcttcagcttctctgatgcttgaactctcacctttgaccttgtgttgacctttgatgctgatgtgtatttttattatgtttgtttctttcttcgtttttttttctttttttctttcctttttttttccttttgtgctgccaaattggttttgctagaacgactgctgaaggggaaatatttaaacttgcatttgaatataaaaaaaatctatttttctagaacttcataagataaccacttgattttgtgattccaattctttgtaattgtcttcagagcagccctactagcacataccgcgtggtgtttgtatttctgtgaacacacagccagtccgtttctaggctttgtttctctgtgtgcttagttttaaagacaactttgaagtaaacaatgaaataaaagatgtcactaaaacctctg

SEQ ID NO: 8754 - protein, 486 aa, Homo sapiens; identical to SEQ ID NO: 1330

SEQ ID NO: 8755 - DNA, 2153 bp, Homo sapiens
tggggtgttctgctctggcggcagcggcagcggcggcgggacgcggaggctcccccgggattcggcctcagcagcgaggcggcggcggcggctgcggaggcgcaggcagcaactgaggcagcggcaggctcaggtgcagccgctgctcaaagaaaatgaacggcaccctggaccacccagaccaaccagatcttgatgctatcaagatgtttgtgggccaggttccaaggacctggtctgaaaaggacttgcgggaactcttcgaacagtatggtgctgtgtatgaaatcaacgtcctaagggataggagccaaaacccgcctcagagcaaagggtgctgttttgttacattttacacccgtaaagctgcattagaagctcagaatgctcttcacaacatgaaagtcctcccagggatgcatcaccctatacagatgaaacctgctgacagtgagaagaacaatgcagtggaagacaggaagctgtttattggtatgatttccaagaagtgcactgaaaatgacatccgagtcatgttctcttcgtttggacagattgaagaatgccggatattgcggggacctgatggcctgagccgaggttgtgcatttgtgacttttacaacaagagccatggcacagacggctatcaaggcaatgcaccaagcacagaccatggagggttgctcatcacccatggtggtaaaatttgctgatacacagaaggacaaagaacagaagagaatggcccagcagctccagcagcagatgcagcaaatcagcgcagcatctgtgtggggaaaccttgctggtctaaatactcttggaccccagtatttagcactttatttgcagctccttcagcagactgcctcctctgggaacctcaacaccctgagcagcctccacccaatgggagggttgaatgcaatgcagttacagaatttggctgcactagctgctgcagctagtgcagctcagaacacaccaagtggtaccaatgctctcactacatccagcagtcccctcagcgtgctcactagttcagggtcctcacctagctctagcagcagtaattctgtcaaccccatagcctcacttggagccctgcagacattagctggagcaacggctggcctcaatgttggctctttggcaggaatggctgctttaaatggtggcctgggcagcagtggcctttccaatggcaccgggagcaccatggaggccctcactcaggcctactcgggtatccagcaatatgctgctgctgcgctccccactctgtacaaccagaatcttctgacacagcagagtattggtgctgctggaagccagaaggaaggtccagagggagccaacctgttcatctaccacctgccccaggagtttggtgatcaggacctgctgcagatgtttatgccctttgggaatgtcgtgtctgccaaggttttcatagacaagcagacaaacctgagcaagtgttttggttttgtaagttacgacaatcctgtttcggcccaagctgccatccagtccatgaacggctttcagattggcatgaagcggcttaaagtgcagctcaaacgttcgaagaatgacagcaagccctactgagcgtgctcccctctgagactggagtgagagggtcttctgattcctgccgtttgttcatcgttgtgcctaaagcatgtcgatgtggcgtcaagtacatcgtccaaatccctgtctcttcagcttctctgatgcttgaactctcacctttgaccttgtgttgacctttgatgctgatgtgtatttttattatgtttgtttctttcttcgtttttttttctttttttctttcctttttttttccttttgtgctgccaaattggttttgctagaacgactgctgaaggggaaatatttaaacttgcatttgaatataaaaaaaatctatttttctagaacttcataagataaccacttgattttgtgattccaattctttgtaattgtcttcagagcagccctactagcacataccgcgtggtgtttgtatttctgtgaacacacagccagtccgtttctaggctttgtttctctgtgtgcttagttttaaagacaactttgaagtaaacaatgaaataaaagatgtcactaaaacctctg

SEQ ID NO: 8756 - protein, 486 aa, Homo sapiens; identical to SEQ ID NO: 1330

SEQ ID NO: 8757 - DNA, 1984 bp, Homo sapiens
cattcttggttccagccggttgggattcagaacagcgcctccccaacctagcatttttttcttttttttttttgttttcttttttcttttttatttttattttttgcatttatttaaaaaatcccatcatgaccctggaagcctttagaacagttttatcctttgaaacacaggacacatttctcccagtgcgcagaatttcaagtttacgtggttcagcttaagaagtgtatgtttcacgttccttagaggacaacagacccaagttatcactatgagaaaggaacagctgtcccagcttcaatgggataatccaacaccaccagctacctgtacaacagtaagatggtcaatccctgtctgttacccacagggacagcatgacaaggagagagcccccatctgacttaatagcaaaccaacccctttattcttatctctgctgctaggggtcaagactggtatttgttgaggtttcagattccagagacccagggatcccatccctggctgtggctacagtcacatcttaacaggggagctaactgtagcacgaggacaaaaatgaacacggtaatactgaggtaaatgaacactcaattcatgtggaggctgtaaacgtcctgatgtcacctctgcctcaagagcagaaaatgtgactggagtggttacaggaggggcctgccagacccctgtgggaatactacatctgggacacctcaatcaaggaggcaagggagaatttctggccactggcaaatgaagcatactggcttgcagggaccttctgattcaagtacaccaagaaataagctcctcctcccccaactagatggtattgatcactctgcccacaaatggtacccccttcagcaagaactgcaagcccttcttggatttgccttcatgagaaaatggtggcttgggatggaggtgacattccttgctgtggtgaactgcaaagaaggaaaccaggcaatgtattccatagaggcctttaaagagacccgttggaaatgggccatggtctaatttggtgttgaaataaactaacctctttggctgtttctcccaaactgccaccagccaggcaaggccaatccaatactgactgctggctgggggagctcgtaatgggtgatgccgccctgctttttgcatatgtcaggctaacaggtgctttatttccagagaattgttaatgcccttttttgaaaagagcagcagaaattccggacaagaatctgaaaaataggtgtcaaaaactatttcccagaaggtagctgtacaggagtttgagtctccagctgccagggcattaggtgtctagtcactccactcttccccaaagccgctctgctccccacagctcccaggtgtcagttctcattctacccaccctcacactaagagaggttctgggggtcacttttttgttccactcagtcctctctcttggggtggtttggggcaaatcctgatcatcgtctgtgttaaatgtttccctgtcccccttccccagggtggtttggtgttggtccttctcaacacacactggttacaaacacagcaaactttaaataaaggagaaacaaaaacaaaaacaaaaaaaacctcaggatatggcacctaaactccaaagtaaaacactggaaaccaaagcacaaacttgtcctctgtacgaagcgaaactcccacagaaggcagtagccgagtcttcagggcaagctgtgcctgcgagagtggcagggatcagggtccagggctgtcaacacacagcctcagggcttcgaatcattaagggtgctcctcccccacttaccagaagaccctctcactccagtctcagaggggagcacgctcagtagggcttgctgtcattcttcgaacgtttgagctgcactttaagccgcttcatgccaatctgaaagccgttcatggactggatggcagcttgggccgaaacaggattgtcgtaacttac

SEQ ID NO: 8758 - protein, 90 aa, Homo sapiens [sequence omitted]

SEQ ID NO: 8759 - DNA, 1822 bp, Homo sapiens
atatcaaaggccatactttacgtgtttatagtcattttgattttgaggttatacttggagcaattccttttcatgtacacaactgtggtgtattgctgtgtgtttgtttttgggaggggtggggggatgggggacagattttcactcttgtcacccaggccagagtgcaatggtgtgatcctggctcactgcaacctccgcctctcgggttcaacccattctcgcctgtagtcccagctacttgggaggctgaggcaggagaattgcttgaacccgggaggcagaggctgcagtgagctgagatcatgccactgcactccagcctggacaacagaacaagactccatctggggggaaaaaaaaaaggaaaattttgtgtatttgagtgtttgtacattttattgtatgcatggaagaaatcctggtagaagataaaccaaaatatggttgtaagtataattaattaaagttggggaaatggaaaaattaaaacaggaaggaatacttatgaaatattttgtttaaaaaaaaaaaaagagggtggccgggcgcagtggctcacgcctgtaatcctagcactttgggaggccgaggtgggcggatcacgaggtcaggagatcgagaccatcctggctaacatggtgaaaccccatctctactaaaaatacaaaaaattaggcgtggtggcgggtgcctgtagtcccagctactcggaaggctgaggcaggagaatggcatgcacccgagaggcggagcttgcagtgagctgagatcacgccactgcactccagcctgggtgacagagcgagactctgtctcaaaaaaaaaaaaagagggggtgctgcccacatgttgcttttacagtacctgcaatttcaggggggaaaacccccaaaaaactaggaagtgcaagtatgtctcaattcaggaaagttcatagaaactttacaaattacaccagataaactggggaattaagttcaacaattgaaggtctgatatgtgttacttttattcaggtgttctgtggatatgaatataaatgagaaagttgaaacatagttcactaacaacattttgaaatgagattaaaatcactaacaacattttaaatgaggtgaattgtatgtgatgtggactaaactagatagctgtttaaaaacttgtttagagaaaatacaattatagttttagatgacctagtgttagtctagattaatctagtcccatcctctagggattggaagtccaagaggggaccattctaagaatggttgtgaaccccttatagaatctgatgaaagctgtggattttgttttcaggaaatctcacttgtccattttcacacggtttagcataaagtttagtctgtttagcctaaagcattgttgggcttacaggcctccagctcctgagaggtctgcttcccgcttgatccttttatctgtttacttggctctctggagcatgagagtaggtgaacatggagttttccaaagcagggggcctaacttacttattgagctaggcatgtaacaggaagaaagaagtaaagggcattgcaagctgaccaaaaagtaatactttaaagagaatatacttttcccaagttatttctattatttgtcttttttctcttttccagttaaaagtttgggcagggtgcggaggctcacatctgtaatcccaacatttcgggaggctgaggcaggcagatcatttgaggtcaggagttcgagaccaccctggctaacatggccagactctgtctctactaaaaatacaaaaaaaattagctgggcagagtgatccctcatctct

SEQ ID NO: 8760 - protein, 52 aa, Homo sapiens
MYTTVVYCCVFVFGRGGGMGDRFSLLSPRPECNGVILAHCNLRLSGSTHSRL

SEQ ID NO: 8761 - DNA, 4539 bp, Homo sapiens
agagatggggtttctccatgttggtcaggctggtctcaaactcctgacctcaggtgaactgcccgcctcagcctcccaaagttgattgctattaatataatcctatagttaccagaacacgtatactagaattacagtacactgaaatggtcaaaaggcaaataaaatagaaataagaaaattttgatgaaaatctggagaattaagtctttctgtaattgagagttgattttttgattgtggaatccttgaaatggtttgaaagaatgatgtgacttgaatgggctttataaacacagcctggtaaggatagctgtgacagcttgggacagtggatttggggtaccaccagttaacatttctggccctgttttcctgtctttaaagtggagataccaactcagaatagtaatgtgaggattaattgaggtaacttatgctaggcactgaacagtgcctgatacagtattgataatgctgtttctttttccatgtgtaaaatgggcataccactagtctcttgggtcagtaatgcatttcagccaaatgaaataaataacacaggtgaactgcctaggagtgccatacatagatgagcagtagctactatgtcagtgttccttttgttcccttttatgagtgcattttgttttgcattttcttgtgtctgttgtggcttaagggataagatttgtgtgtctgaaatgctgtgctaaacaggacgttgttccttgtggaatacttgggtaatatggtttcctagatttcatattcactatttctactttgagagtctactgttaggaggcttctgtgttcaaagaaaactgaaaattataaatgaatattttggatttgtaataggggacacttgggtctcttcgtagtttcaagtgacaagttgaggcggggaggagggctctaatatttagagttgtaatgcagatttaagacttaatcagttttagctatttgctttgtaaactatattgtatcaagagtccttatttgccgaaaacagctttcttttttttttagagacggggtggggacaggggtccacgggtccgctatgtagcccaaactggtgcaaactcttgagctcaagcacgattctcctgcctcagcctcccaagttgctgggattataggcatgcgccaccacacccagctaattttgtgttttaagtagagacggggtttcaccatgttggccaggctggtctcaaactcctgacctcaggagatccacccgccttggcctcccaaagtgctgggattacaagtgtgagcctccacacctggccaagtagtttccattttcatagtaacattgctactctttagcaaaataatcattaagttagaaactgtcaccactttctccttgttcttttacctttttgtttcctgtgagattgagtaagctcttgcagactgtgtgaatatgtatgatattggtgataatgtgaggtgactaatagtctactgtgagtagattgtcttttttaacccagtattatttggacatctgttaagtttttgttaatttctgttttgtacagataatttgctgtacgctttttccagttgctttgtacttctagcttttgtgtatgggaaacattctacttttcagctccagccgctttccctcacactgcagtcacatagctcagctagtgtttctttcctggatgaattctgtctgggtgttgctgctgctaacttaccatgctagatcgggtgggatattctcagtgagaaacacctgtgccatttactggctgcttgcctgttttttgttttgttgttgttgttgttgttgtttgagatggagtctctctctgtcgcccaggctggagtccagtggcgcgatctcggctcactgcagcctccacctcctggtttcaagccattctccctgcctcagcctcccaagtagctgtgattacaggtgcccaccaccatgcccgggtaatttttgtatttttagtagagacggggtttcaccatcttggccagggtggtcttgaactcctgacctcgtgatccacccacctcggcctccccaaagtgctgggattacaggcgtgagccaccgcgcccagcctgcttgcctgattttgagtgctctctgagcaagagtctcgtgggggccgaggagtgaaaggaagtcagggtggtgatgacagcttgaaaatgcataactgtttgacatttgtcagctagtgggtgattactgcatgatgaagcagcactgctttgtgttcaaagtcattttatagcaggctttcaacaaggatattttactggaagctgtttatgtggtaaaagattatttatcccttaggtctgtatttcctagatggctagagcaagaggagcagacatcacatttcgtgtttaggaatgctcttcagcccctccatgctcatgattcagtatttgtcatttagtgcacagctaatctttttcatgaggcttttcctgtccattcattcctgtacctgatttagtattttattatttcagcaagattttaagctttttgaggatggaaactgccttactgcttagtgtattgcatatactttaggggagtggttcaggcatatagtccctactctaattataccttgtgatttagcccctcttgtaatatcttattgcaccagaggtggacacctggcccaagctgggcaaatcactttgtcctaggaatttgagattagaactgagattcaagtctttaagatacaaatagtcacctacattcagagaactcaggacataaaatcagatgctggtatgcagccaagttcaggctcgtacaggtggaagcagtgaaggtcattccgtagggagggagaagtaagtagatttcatctggaaagaagcatagatgagaaatgcagctctggagagagggcagccatccacatgcagagcaaaaatctggatgcctaaagactttccaggtgtgggcctgtttggagttcttggagtggtctagtaccctttcagttaactctagtttttatgtaagctttctgttattttcagccgaaataactttgagttagacttagtacagagctctgcacagcacttgtaaaatttgaaatttagaatcatcttgtcagggatcatggctctttggaagagtagctgggattacaggtgtgtgccaccattcatgcctggctgattttttgtatttttagtagaaacagggtttcaccatgttagccgtgactggtctcgaactcccgacctcaggtgttctgtccgcatcggcctcccaaagtgccgggattacaggcttgagccaccacacccagctgttgggaagagtgctttttcccccataccctccttagccccaggcaaaaggccgctggaggtcttgactccttcagtatatatatttgcatttggtgtttagaatgctttgccagatcaagattatgagtttatttttttaacaagttttttataattatttgtttttaatttttttaggaatatgagcctgttaaaaataatactgctatttcagataggaaacttaaagtgagccatcagttttagagaatttttgtttgtgaggcatatggattcagtcttttcttcatttctagttaagtggcgtttgttttagtttcctgattgtttcctcttaaaaaaatgttgatgggcttgagtggaacacaataatgtgggttgaatggctgttgagactttaaacaaagggtaatggtgaatggctgtgtgcccagttgatggagtctctctggtcccagctcagtaacttcatgaatgatctgtgagaggagcatcacagtggtgtttttctctttgagaaatgttaataagggagagggggaagctctgagaaagacagtttagcgcttctaacgtgattttgtttttttcctgtgatattttggtttgttaggttgaaagactttattccagagaaatgtaaacattccctgtaatactaatgagcaggaattaaaaagagacaagctagttttgaaatggagattttttttttttttttttttgagacggagtcttgctcttttgcccaggctggagtgcagtggcgcgatctcggctcactgcaagctctgtctcccgggttcacgccattctcctgcctcagcctcccgagtagctgggagtacaggtgcccaccaccatgcctggctaattttttgtatttttagtagagacggggtttcaccgtgttggccaggatggtcttgatctactgacctcgtgatctgcccgcctgggcctcccaaagtgctgggattagaggcgtgagccaccacgcccagccaaaatggagatttatatacaacctggtacacagccaacatcaagattctgtcttccatatatagataatgtaggatagaaaaagctagaagatattatttgatatcagagatcaaatgatgattgcaaatatatctaaacaatattatgggccaggcatggtagctcatgcctgcattaccagca

SEQ ID NO: 8762 - protein, 139 aa, Homo sapiens [sequence omitted]

SEQ ID NO: 8763 - DNA, 638 bp, Homo sapiens
agtagagatggggtttcaccatgttggctaggctggtctcgaactcctgacctcaggtgatccacctgcctcggcctcccgaagtgctgaaattacagacgcacgccaccgcgcccagcccagtacggctttagaaagaactctccactaactttatgacctccaggtcttctttttatagctacattcagctttgacaaaatggagttgaataattttactttctttctaagttataactccattaaaactgtgttttgggggggaatgtctttagtttggggattatgcaaaatgaagttttttgattcctgggctgtgtaattttgtactgttatacttttaatttcgaagggtcagtagtttccattttctttctttctttctttctttctttctttctttctttctttcgttagtctcgccctgtcaccaggctctggagtacagtggtgagatcttggctcgctgcaacctctgcctcctgggttcaagcgattctcctgcctcagcctcccaagttgctgggattataggcatgcgccaccacacccagctaattttgtgttttaagtagagacggggtttcaccatgttggccaggctggtctcaaactcctgacctcaggagatccacc

SEQ ID NO: 8764 - protein, 40 aa, Homo sapiens
MELNNFTFFLSYNSIKTVFWGGMSLVWGLCKMKFFDSWAV

SEQ ID NO: 8765 - DNA, 1158 bp, Homo sapiens
ctcttacactgcacacattataaagcatttcatgctctttaaaactgttatacagcctttttactcgaaggtaataaacctacagctctctcctggcgagaaagagattccattttgcggaaacagattccagtcaaaatcttaccacattcccctcaactatgggtatgagcctaaaccaatgagaagctccttggtgcatgtgtaatggtctccaagaattacaacaacatcctacccggaggaccacaaccacgacaccactggctttaaaatcaaagcctggtccctagcgaagaaagcgctttaatgtgctcctcccgctcccgggtgcgagattcctgcccagctactaggccacgactgggagtggacactaagaacacgtgagacgacaggggcagagatggggtgtcccgggcaggtagcctgggtccagcacggcagccagaaagacgaggaaaacggagctggccctgggcagggcacgaggcctctgagcctagagagtgaagatgaaggagggagccctgccctaggacaggggaggggaggaggaaggcgacctcaacccaggacccctgttcaccctgggatcaggccctcacccaggtagctcctctgtttgaaagctctaagcccttccactgtcctcttcagggctaccccgccacacagcctctccttgtcttgtcttccctttggcggggtcacacccgcacctgggtcactgcccccttcctctggtcgagggttggggggagtgtcccctcctccctcggccggagtcacagttccacacgcaggggtccttcctgcccctctcacctggggtcacaacccccctccctcggaggagggaggtcaccggccacaggcgggggcctcagtttcccacgctacagggctcacacgtgtctggcctgcgacgcgctctcccttcgccggggtcccagtttcccgcccaggaaacctcggtccctcctccgaggccgccgggccctcctccagagtcccgccagtcccccagagtccaggccagtccccgccgtcacccggtgcgagcccgcgagaggcctagtgcagctggcagccccgccccggcacccgcctgctcttctcgcgggtccggaccgcgagcgcgggggccgacgggtc

SEQ ID NO: 8766 - protein, 69 aa, Homo sapiens
MGCPGQVAWVQHGSQKDEENGAGPGQGTRPLSLESEDEGGSPALGQGRGGGRRPQPRTPVHPGIRPSPR

SEQ ID NO: 8767 - DNA, 1772 bp, Homo sapiens
tttcccacgctacagggctcacacgtgtctggcctgcgacgcgctctcccttcgccggggtcccagtttcccgcccaggaaacctcggtccctcctccgaggccgccgggccctcctccagagtcccgccagtcccccagagtccaggccagtccccgccgtcacccggtgcgagcccgcgagaggcctagtgcagctggcagccccgccccggcacccgcctgctcttctcgcgggtccggaccgcgagcgcgggggccgacgggtcgccgctgcgccgggccgggatggcggccaccgcgctgctggaggccggcctggcgcgggtgctcttctacccgacgctgctctacaccctgttccgcgggaaggtgccgggtcgggcgcaccgggactggtaccaccgcatcgaccccaccgtgctgctgggcgcgctgccgttgcggagcttgacgcgccagctggtacaggacgagaacgtgcgcggggtgatcaccatgaacgaggagtacgagacgaggttcctgtgcaactcttcacaggtgcacaaatggagtccagaggaggctgtaagagccatcgccaagatccggtcatacatccacatcaggcctggccagctggatgttcttaaagagttccacaagcagattactgcacgggcaacaaaggatgggacttttgtcatttcaaagacatgatgtatggggattagaaagaactcaagacactcctgcttgatacagaacaaaaagagcttaacaggaccaacagggcttaagcccagacttgacgtaacagaaatgtgccaatagccactgtcagaccacggaatgatgtggcccacaagcagctctcagcttttggagagtatgtggctgaaatcttgcccaagtatgtccaacaagttcaggtaatacttactaatgttatttgggtctgggtcaagaaagaaccatgttcgcagggcatgtgggagtgggcagacttgtttcaaagaaactacagattcctccatcccaagcttggacttttctctcagcattaaaccaggtgactccagctgaagttagctgttccctcagtagctctttgttccctctcccctcactttcatgtgtgcaggtgtcctgcttcaatgagttagaggtctgtatccatcctgatggcgtcatcccagtgctgactttcctcagggatcacaccaatgcacagttcaaatctctggttgacttgacagcagtggacgtcccaactcggcaaaaccgttttgagattgtctacaacctgttgtctctgcgcttcaactcacggatccgtgtgaagacctacacagatgagctgacgcccattgagtctgctgtctctgtgttcaaggcagccaactggtatgaaagggagatctgggacatgtttggagtcttctttgctaaccaccctgatctaagaaggatcctgacagattatggcttcgagggacatcctttccggaaagactttcctctatctggctatgttgagttacgttatgatgatgaagtgaagcgggtggtggcagagccggtggagttggcccaagagttccgcaaatttgacctgaacagcccctgggaggctttcccagtctatcgccaacccccggagagtctcaagcttgaagccggagacaagaagcctgatgccaagtagctccagggaacgcatgtggatcctagacagcgccttatctatgattgagtgtccgtgtaaataaattcctacttagacttacc

SEQ ID NO: 8768 - protein, 243 aa, Homo sapiens
MFAGHVGVGRLVSKKLQIPPSQAWTFLSALNQVTPAEVSCSLSSSLFPLPSLSCVQVSCFNELEVCIHPDGVIPVLTFLRDHTNAQFKSLVDLTAVDVPTRQNRFEIVYNLLSLRFNSRIRVKTYTDELTPIESAVSVFKAANWYEREIWDMFGVFFANHPDLRRILTDYGFEGHPFRKDFPLSGYVELRYDDEVKRVVAEPVELAQEFRKFDLNSPWEAFPVYRQPPESLKLEAGDKKPDAK

SEQ ID NO: 8769 - DNA, 901 bp, Homo sapiens
ctccgaggccgccgggccctcctccagagtcccgccagtcccccagagtccaggccagtccccgccgtcacccggtgcgagcccgcgagaggcctagtgcagctggcagccccgccccggcacccgcctgctcttctcgcgggtccggaccgcgagcgcgggggccgacgggtcgccgctgcgccgggccgggatggcggccaccgcgctgctggaggccggcctggcgcgggtgctcttctacccgacgctgctctacaccctgttccgcgggaaggtgccgggtcgggcgcaccgggactggtaccaccgcatcgaccccaccgtgctgctgggcgcgctgccgttgcggagcttgacgcgccaggtgagccgggccggggagcccgggcccctgccccgtccccgccgctccgtccctgtcgggccgctggggtctccaccgtctttgctgagccacctctttgcctcggcagctggtacaggacgagaacgtgcgcggggtgatcaccatgaacgaggagtacgagacgaggttcctgtgcaactcttcacaggtgcacaaatggagtccagaggaggctgtaagagccatcgccaagatccggtcatacatccacatcaggcctggccagctggatgttcttaaagagttccacaagcagattactgcacgggcaacaaaggatgggacttttgtcatttcaaagacatgatgtatggggattagaaagaactcaagacactcctgcttgatacagaacaaaaagagcttaacaggaccaacagggcttaagcccagacttgacgtaacagaaatgtgccaataggtaataggtaatttttctttctctgacttgttttgttttcttgaaataacactgttgtgtggctagaaagg

SEQ ID NO: 8770 - protein, 151 aa, Homo sapiens
MAATALLEAGLARVLFYPTLLYTLFRGKVPGRAHRDWYHRIDPTVLLGALPLRSLTRQVSRAGEPGPLPRPRRSVPVGPLGSPPSLLSHLFASAAGTGRERARGDHHERGVRDEVPVQLFTGAQMESRGGCKSHRQDPVIHPHQAWPAGCS

SEQ ID NO: 8771 - DNA, 2547 bp, Homo sapiens
ctccgaggccgccgggccctcctccagagtcccgccagtcccccagagtccaggccagtccccgccgtcacccggtgcgagcccgcgagaggcctagtgcagctggcagccccgccccggcacccgcctgctcttctcgcgggtccggaccgcgagcgcgggggccgacgggtcgccgctgcgccgggccgggatggcggccaccgcgctgctggaggccggcctggcgcgggtgctcttctacccgacgctgctctacaccctgttccgcgggaaggtgccgggtcgggcgcaccgggactggtaccaccgcatcgaccccaccgtgctgctgggcgcgctgccgttgcggagcttgacgcgccaggtgagccgggccggggagcccgggcccctgccccgtccccgccgctccgtccctgtcgggccgctggggtctccaccgtctttgctgagccacctctttgcctcggcagctggtacaggacgagaacgtgcgcggggtgatcaccatgaacgaggagtacgagacgaggttcctgtgcaactcttcacaggtgcacaaatggagtccagaggaggctgtaagagccatcgccaagatccggtcatacatccacatcaggcctggccagctggatgttcttaaagagttccacaagcagattactgcacgggcaacaaaggatgggacttttgtcatttcaaagacatgatgtatggggattagaaagaactcaagacactcctgcttgatacagaacaaaaagagcttaacaggaccaacagggcttaagcccagacttgacgtaacagaaatgtgccaataggtaataggtaatttttctttctctgacttgttttgttttcttgaaataacactgttgtgtggctagaaaggaaaagatttagtgtggcttgtattcatgggatacaggacagggatggggctatcatcttttcttgaatagggctaaagaagtattttaacaaaaatctattatgtacctaatattgtgcctaataatatttagcaccacaactcaaaaaacatttagcacttgaaaaaaggagactcacctctggctctttgccactgtcagaatctgaatctcactggccctgtggagtagggatcctatctggagaagtgggagcatgggctgcagtcaggactgctgcagactgagccatgtgatggtacgtaatgagttcccctgagggaatgaaacaccctcaccccttcaaagtcacccctttggaattcaacacagacacacatatcccttcaaaaacttttatttgtatcaacagttcctagctcttgacttagcttagagcttttaaaagagcagacaccttatatatttgagattgaaaaagtttctgctattaatcagaaataatcatttctattttctggcttaccccttggaataagccaaaaataaaaccaaagttacatttcctgacagatggataagaaaacaatagaaggaacatcctgaattctagagttgactcttgctggtgaagtacaccttcagcttagtccattctcctaagtaaagcctgaaggaaaactcttaacacctaattctttgtggaaaaatgatcaactagccatttcacaggctatagaacaaaagtacaattgggcatctttccttatgtcctgggatcaggggtgcttacatttaacattgatcaggtaaagaggagaggctgtgcctaaggtctgagaaaaggcttgctctaagcaagctgtggtgaggcacaggatgactagggaatggcagagaacaggctggcctactgtcagttcaagcaaccagctgagcagcagcagtctaaaaagccccaaacagaacacctccatggattcagggaagggctgaggcactgcctttctagtatgtgccaaaaaaaacataactctgaattggggcccaggggactttgagtttgtatggggagggaaaaggagtgagcagttctcctcccctccccacagccttaggccaacacaaactgcaaattggtaagcagcaccttaatacctcttgtgacagttacggctgaagtggcagggtcaagcttgtaggtgttggcatccccctttttatatcggtcccggaagacatagatgctcccgttacagctggcaatcttccagagggatggggcagagctccaggcctcaggaaggcaaagccgggtgaagctgtctagcaagggattgtagcacaccagggagtccccttcagccacgatgaacaccagatctttatgcacagctgcgtgcatgcggcctgcaaagggcagcacatagggcttcacatggcatttgtctgtctctgtgtcaaagcactggatgagtcgggaaggtttggtaaagaagtccagatcattctcctccccccctagtaagtagatgatcccgttgaggttggcaccagcagcccctgacacagccacctctagctgagttgtctctgtccacacattatcacctacgcgataataaatgactgcgttggagagggt

SEQ ID NO: 8772 - protein, 151 aa, Homo sapiens; identical to SEQ ID NO: 8770

SEQ ID NO: 8773 - DNA, 3286 bp, Homo sapiens
ctccgaggccgccgggccctcctccagagtcccgccagtcccccagagtccaggccagtccccgccgtcacccggtgcgagcccgcgagaggcctagtgcagctggcagccccgccccggcacccgcctgctcttctcgcgggtccggaccgcgagcgcgggggccgacgggtcgccgctgcgccgggccgggatggcggccaccgcgctgctggaggccggcctggcgcgggtgctcttctacccgacgctgctctacaccctgttccgcgggaaggtgccgggtcgggcgcaccgggactggtaccaccgcatcgaccccaccgtgctgctgggcgcgctgccgttgcggagcttgacgcgccaggtgagccgggccggggagcccgggcccctgccccgtccccgccgctccgtccctgtcgggccgctggggtctccaccgtctttgctgagccacctctttgcctcggcagctggtacaggacgagaacgtgcgcggggtgatcaccatgaacgaggagtacgagacgaggttcctgtgcaactcttcacaggtgcacaaatggagtccagaggaggctgtaagagccatcgccaagatccggtcatacatccacatcaggcctggccagctggatgttcttaaagagttccacaagcagattactgcacgggcaacaaaggatgggacttttgtcatttcaaagacatgatgtatggggattagaaagaactcaagacactcctgcttgatacagaacaaaaagagcttaacaggaccaacagggcttaagcccagacttgacgtaacagaaatgtgccaataggtaataggtaatttttctttctctgacttgttttgttttcttgaaataacactgttgtgtggctagaaaggaaaagatttagtgtggcttgtattcatgggatacaggacagggatggggctatcatcttttcttgaatagggctaaagaagtattttaacaaaaatctattatgtacctaatattgtgcctaataatatttagcaccacaactcaaaaaacatttagcacttgaaaaaaggagactcacctctggctctttgccactgtcagaatctgaatctcactggccctgtggagtagggatcctatctggagaagtgggagcatgggctgcagtcaggactgctgcagactgagccatgtgatggtacgtaatgagttcccctgagggaatgaaacaccctcaccccttcaaagtcacccctttggaattcaacacagacacacatatcccttcaaaaacttttatttgtatcaacagttcctagctcttgacttagcttagagcttttaaaagagcagacaccttatatatttgagattgaaaaagtttctgctattaatcagaaataatcatttctattttctggcttaccccttggaataagccaaaaataaaaccaaagttacatttcctgacagatggataagaaaacaatagaaggaacatcctgaattctagagttgactcttgctggtgaagtacaccttcagcttagtccattctcctaagtaaagcctgaaggaaaactcttaacacctaattctttgtggaaaaatgatcaactagccatttcacaggctatagaacaaaagtacaattgggcatctttccttatgtcctgggatcaggggtgcttacatttaacattgatcaggtaaagaggagaggctgtgcctaaggtctgagaaaaggcttgctctaagcaagctgtggtgaggcacaggatgactagggaatggcagagaacaggctggcctactgtcagttcaagcaaccagctgagcagcagcagtctaaaaagccccaaacagaacacctccatggattcagggaagggctgaggcactgcctttctagtatgtgccaaaaaaaacataactctgaattggggcccaggggactttgagtttgtatggggagggaaaaggagtgagcagttctcctcccctccccacagccttaggccaacacaaactgcaaattggtaagcagcaccttaatacctcttgtgacagttacggctgaagtggcagggtcaagcttgtaggtgttggcatccccctttttatatcggtcccggaagacatagatgctcccgttacagctggcaatcttccagagggatggggcagagctccaggcctcaggaaggcaaagccgggtgaagctgtctagcaagggattgtagcacaccagggagtccccttcagccacgatgaacaccagatctttatgcacagctgcgtgcatgcggcctgcaaagggcagcacatagggcttcacatggcatttgtctgtctctgtgtcaaagcactggatgagtcgggaaggtttggtaaagaagtccagatcattctcctccccccctagtaagtagatgatcccgttgaggttggcaccagcagcccctgacacagccacctctagctgagttgtctctgtccacacattatcacctacgcgataataaatgactgcgttggagagggtatcttgcagtgtcttgccacccagtgaatatatggcatctttcccgggcacagacaccagggtgtgctggagccggtcccgaggcaaaggagcacaccactcccagtcaacggtggcattgttgcacttccacatgcgccgtgggatggaccctcccaccacatacaagtctccaccatgcttgcaggccgcagtgatctggtggcacaaactgttttggccacttacactgatggagtcatcttctgcacagtgcaaggacacagccaacgagtgggtacgagatgactctttcccaatcaggtaaatgtgcacattctccccaatttcctattggcaaaattaaaattatatgacagctgttaaattctaggctaaggctcagctaagacacatatccttaagatcctggccctcacacttgttcctagctttatcatactactctctaattactgtatggcatccaactctcctctagtcactttctttgaggcaatttatgccgggcggagaatctgttgtattcatccttgtagcttttaaaaaactctcataagctagtgcttcagacaaagggtgattaagattgttaacttgatgacagtagttctcaaggaactttgaaagctcatagattggtggtactggggttacaaagacatccttctccccagctcatatcaacttcaagccagagataacttattcaaaaataaataaataaatacaaaaaatt

SEQ ID NO: 8774 - protein, 151 aa, Homo sapiens; identical to SEQ ID NO: 8770

SEQ ID NO: 8775 - DNA, 2711 bp, Homo sapiens
gtcccgccagtcccccagagtccaggccagtccccgccgtcacccggtgcgagcccgcgagaggcctagtgcagctggcagccccgccccggcacccgcctgctcttctcgcgggtccggaccgcgagcgcgggggccgacgggtcgccgctgcgccgggccgggatggcggccaccgcgctgctggaggccggcctggcgcgggtgctcttctacccgacgctgctctacaccctgttccgcgggaaggtgccgggtcgggcgcaccgggactggtaccaccgcatcgaccccaccgtgctgctgggcgcgctgccgttgcggagcttgacgcgccaggtgagccgggccggggagcccgggcccctgccccgtccccgccgctccgtccctgtcgggccgctggggtctccaccgtctttgctgagccacctctttgcctcggcagctggtacaggacgagaacgtgcgcggggtgatcaccatgaacgaggagtacgagacgaggttcctgtgcaactcttcacaggagtggaagagactaggagtcgagcagctgcggctcagcacagtagacatgactgggatccccaccttggacaacctccagaagggagtccaatttgctctcaagtaccagtcgctgggccagtgtgtttacgtgcattgtaaggctgggcgctccaggagtgccactatggtggcagcatacctgattcaggtgcacaaatggagtccagaggaggctgtaagagccatcgccaagatccggtcatacatccacatcaggcctggccagctggatgttcttaaagagttccacaagcagattactgcacgggcaacaaaggatgggacttttgtcatttcaaagacatgatgtatggggattagaaagaactcaagacactcctgcttgatacagaacaaaaagagcttaacaggaccaacagggcttaagcccagacttgacgtaacagaaatgtgccaataggtaataggtaatttttctttctctgacttgttttgttttcttgaaataacactgttgtgtggctagaaaggaaaagatttagtgtggcttgtattcatgggatacaggacagggatggggctatcatcttttcttgaatagggctaaagaagtattttaacaaaaatctattatgtacctaatattgtgcctaataatatttagcaccacaactcaaaaaacatttagcacttgaaaaaaggagactcacctctggctctttgccactgtcagaatctgaatctcactggccctgtggagtagggatcctatctggagaagtgggagcatgggctgcagtcaggactgctgcagactgagccatgtgatggtacgtaatgagttcccctgagggaatgaaacaccctcaccccttcaaagtcacccctttggaattcaacacagacacacatatcccttcaaaaacttttatttgtatcaacagttcctagctcttgacttagcttagagcttttaaaagagcagacaccttatatatttgagattgaaaaagtttctgctattaatcagaaataatcatttctattttctggcttaccccttggaataagccaaaaataaaaccaaagttacatttcctgacagatggataagaaaacaatagaaggaacatcctgaattctagagttgactcttgctggtgaagtacaccttcagcttagtccattctcctaagtaaagcctgaaggaaaactcttaacacctaattctttgtggaaaaatgatcaactagccatttcacaggctatagaacaaaagtacaattgggcatctttccttatgtcctgggatcaggggtgcttacatttaacattgatcaggtaaagaggagaggctgtgcctaaggtctgagaaaaggcttgctctaagcaagctgtggtgaggcacaggatgactagggaatggcagagaacaggctggcctactgtcagttcaagcaaccagctgagcagcagcagtctaaaaagccccaaacagaacacctccatggattcagggaagggctgaggcactgcctttctagtatgtgccaaaaaaaacataactctgaattggggcccaggggactttgagtttgtatggggagggaaaaggagtgagcagttctcctcccctccccacagccttaggccaacacaaactgcaaattggtaagcagcaccttaatacctcttgtgacagttacggctgaagtggcagggtcaagcttgtaggtgttggcatccccctttttatatcggtcccggaagacatagatgctcccgttacagctggcaatcttccagagggatggggcagagctccaggcctcaggaaggcaaagccgggtgaagctgtctagcaagggattgtagcacaccagggagtccccttcagccacgatgaacaccagatctttatgcacagctgcgtgcatgcggcctgcaaagggcagcacatagggcttcacatggcatttgtctgtctctgtgtcaaagcactggatgagtcgggaaggtttggtaaagaagtccagatcattctcctccccccctagtaagtagatgatcccgttgaggttggcaccagcagcccctgacacagccacctctagctgagttgtctctgtccacacattatcacctacgcgataataaatgactgcgttggagagggt

SEQ ID NO: 8776 - protein, 168 aa, Homo sapiens
MAATALLEAGLARVLFYPTLLYTLFRGKVPGRAHRDWYHRIDPTVLLGALPLRSLTRQVSRAGEPGPLPRPRRSVPVGPLGSPPSLLSHLFASAAGTGRERARGDHHERGVRDEVPVQLFTGVEETRSRAAAAQHSRHDWDPHLGQPPEGSPICSQVPVAGPVCLRAL

SEQ ID NO: 8777 - DNA, 3450 bp, Homo sapiens
gtcccgccagtcccccagagtccaggccagtccccgccgtcacccggtgcgagcccgcgagaggcctagtgcagctggcagccccgccccggcacccgcctgctcttctcgcgggtccggaccgcgagcgcgggggccgacgggtcgccgctgcgccgggccgggatggcggccaccgcgctgctggaggccggcctggcgcgggtgctcttctacccgacgctgctctacaccctgttccgcgggaaggtgccgggtcgggcgcaccgggactggtaccaccgcatcgaccccaccgtgctgctgggcgcgctgccgttgcggagcttgacgcgccaggtgagccgggccggggagcccgggcccctgccccgtccccgccgctccgtccctgtcgggccgctggggtctccaccgtctttgctgagccacctctttgcctcggcagctggtacaggacgagaacgtgcgcggggtgatcaccatgaacgaggagtacgagacgaggttcctgtgcaactcttcacaggagtggaagagactaggagtcgagcagctgcggctcagcacagtagacatgactgggatccccaccttggacaacctccagaagggagtccaatttgctctcaagtaccagtcgctgggccagtgtgtttacgtgcattgtaaggctgggcgctccaggagtgccactatggtggcagcatacctgattcaggtgcacaaatggagtccagaggaggctgtaagagccatcgccaagatccggtcatacatccacatcaggcctggccagctggatgttcttaaagagttccacaagcagattactgcacgggcaacaaaggatgggacttttgtcatttcaaagacatgatgtatggggattagaaagaactcaagacactcctgcttgatacagaacaaaaagagcttaacaggaccaacagggcttaagcccagacttgacgtaacagaaatgtgccaataggtaataggtaatttttctttctctgacttgttttgttttcttgaaataacactgttgtgtggctagaaaggaaaagatttagtgtggcttgtattcatgggatacaggacagggatggggctatcatcttttcttgaatagggctaaagaagtattttaacaaaaatctattatgtacctaatattgtgcctaataatatttagcaccacaactcaaaaaacatttagcacttgaaaaaaggagactcacctctggctctttgccactgtcagaatctgaatctcactggccctgtggagtagggatcctatctggagaagtgggagcatgggctgcagtcaggactgctgcagactgagccatgtgatggtacgtaatgagttcccctgagggaatgaaacaccctcaccccttcaaagtcacccctttggaattcaacacagacacacatatcccttcaaaaacttttatttgtatcaacagttcctagctcttgacttagcttagagcttttaaaagagcagacaccttatatatttgagattgaaaaagtttctgctattaatcagaaataatcatttctattttctggcttaccccttggaataagccaaaaataaaaccaaagttacatttcctgacagatggataagaaaacaatagaaggaacatcctgaattctagagttgactcttgctggtgaagtacaccttcagcttagtccattctcctaagtaaagcctgaaggaaaactcttaacacctaattctttgtggaaaaatgatcaactagccatttcacaggctatagaacaaaagtacaattgggcatctttccttatgtcctgggatcaggggtgcttacatttaacattgatcaggtaaagaggagaggctgtgcctaaggtctgagaaaaggcttgctctaagcaagctgtggtgaggcacaggatgactagggaatggcagagaacaggctggcctactgtcagttcaagcaaccagctgagcagcagcagtctaaaaagccccaaacagaacacctccatggattcagggaagggctgaggcactgcctttctagtatgtgccaaaaaaaacataactctgaattggggcccaggggactttgagtttgtatggggagggaaaaggagtgagcagttctcctcccctccccacagccttaggccaacacaaactgcaaattggtaagcagcaccttaatacctcttgtgacagttacggctgaagtggcagggtcaagcttgtaggtgttggcatccccctttttatatcggtcccggaagacatagatgctcccgttacagctggcaatcttccagagggatggggcagagctccaggcctcaggaaggcaaagccgggtgaagctgtctagcaagggattgtagcacaccagggagtccccttcagccacgatgaacaccagatctttatgcacagctgcgtgcatgcggcctgcaaagggcagcacatagggcttcacatggcatttgtctgtctctgtgtcaaagcactggatgagtcgggaaggtttggtaaagaagtccagatcattctcctccccccctagtaagtagatgatcccgttgaggttggcaccagcagcccctgacacagccacctctagctgagttgtctctgtccacacattatcacctacgcgataataaatgactgcgttggagagggtatcttgcagtgtcttgccacccagtgaatatatggcatctttcccgggcacagacaccagggtgtgctggagccggtcccgaggcaaaggagcacaccactcccagtcaacggtggcattgttgcacttccacatgcgccgtgggatggaccctcccaccacatacaagtctccaccatgcttgcaggccgcagtgatctggtggcacaaactgttttggccacttacactgatggagtcatcttctgcacagtgcaaggacacagccaacgagtgggtacgagatgactctttcccaatcaggtaaatgtgcacattctccccaatttcctattggcaaaattaaaattatatgacagctgttaaattctaggctaaggctcagctaagacacatatccttaagatcctggccctcacacttgttcctagctttatcatactactctctaattactgtatggcatccaactctcctctagtcactttctttgaggcaatttatgccgggcggagaatctgttgtattcatccttgtagcttttaaaaaactctcataagctagtgcttcagacaaagggtgattaagattgttaacttgatgacagtagttctcaaggaactttgaaagctcatagattggtggtactggggttacaaagacatccttctccccagctcatatcaacttcaagccagagataacttattcaaaaataaataaataaatacaaaaaatt

SEQ ID NO: 8778 - protein, 168 aa, Homo sapiens; identical to SEQ ID NO: 8776

SEQ ID NO: 8779 - DNA, 827 bp, Homo sapiens
ccgccccggcacccgcctgctcttctcgcgggtccggaccgcgagcgcgggggccgacgggtcgccgctgcgccgggccgggatggcggccaccgcgctgctggaggccggcctggcgcgggtgctcttctacccgacgctgctctacaccctgttccgcgggaaggtgccgggtcgggcgcaccgggactggtaccaccgcatcgaccccaccgtgctgctgggcgcgctgccgttgcggagcttgacgcgccagctggtacaggacgagaacgtgcgcggggtgatcaccatgaacgaggagtacgagacgaggttcctgtgcaactcttcacaggagtggaagagactaggagtcgagcagctgcggctcagcacagtagacatgactgggatccccaccttggacaacctccagaagggagtccaatttgctctcaagtaccagtcgctgggccagtgtgtttacgtgcattgtaaggctgggcgctccaggagtgccactatggtggcagcatacctgattcaggtgcacaaatggagtccagaggaggctgtaagagccatcgccaagatccggtcatacatccacatcaggcctggccagctggatgttcttaaagagttccacaagcagattactgcacgggcaacaaaggatgggacttttgtcatttcaaagacatgatgtatggggattagaaagaactcaagacactcctgcttgatacagaacaaaaagagcttaacaggaccaacagggcttaagcccagacttgacgtaacagaaatgtgccaataggtaataggtaatttttctttctctg

SEQ ID NO: 8780 - protein, 201 aa, Homo sapiens
MAATALLEAGLARVLFYPTLLYTLFRGKVPGRAHRDWYHRIDPTVLLGALPLRSLTRQLVQDENVRGVITMNEEYETRFLCNSSQEWKRLGVEQLRLSTVDMTGIPTLDNLQKGVQFALKYQSLGQCVYVHCKAGRSRSATMVAAYLIQVHKWSPEEAVRAIAKIRSYIHIRPGQLDVLKEFHKQITARATKDGTFVISKT

SEQ ID NO: 8781 - DNA, 873 bp, Homo sapiens
ccgccccggcacccgcctgctcttctcgcgggtccggaccgcgagcgcgggggccgacgggtcgccgctgcgccgggccgggatggcggccaccgcgctgctggaggccggcctggcgcgggtgctcttctacccgacgctgctctacaccctgttccgcgggaaggtgccgggtcgggcgcaccgggactggtaccaccgcatcgaccccaccgtgctgctgggcgcgctgccgttgcggagcttgacgcgccagctggtacaggacgagaacgtgcgcggggtgatcaccatgaacgaggagtacgagacgaggttcctgtgcaactcttcacaggagtggaagagactaggagtcgagcagctgcggctcagcacagtagacatgactgggatccccaccttggacaacctccagaagggagtccaatttgctctcaagtaccagtcgctgggccagtgtgtttacgtgcattgtaaggctgggcgctccaggagtgccactatggtggcagcatacctgattcaggtgcacaaatggagtccagaggaggctgtaagagccatcgccaagatccggtcatacatccacatcaggcctggccagctggatgttcttaaagagttccacaagcagattactgcacgggcaacaaaggatgggacttttgtcatttcaaagacatgatgtatggggattagaaagaactcaagacactcctgcttgatacagaacaaaaagagcttaacaggaccaacagggcttaagcccagacttgacgtaacagaaatgtgccaataggtaataggtaatttttctttctctgacttgttttgttttcttgaaataacactgttgtgtggctagaaagg

SEQ ID NO: 8782 - protein, 201 aa, Homo sapiens; identical to SEQ ID NO: 8780

SEQ ID NO: 8783 - DNA, 2519 bp, Homo sapiens
ccgccccggcacccgcctgctcttctcgcgggtccggaccgcgagcgcgggggccgacgggtcgccgctgcgccgggccgggatggcggccaccgcgctgctggaggccggcctggcgcgggtgctcttctacccgacgctgctctacaccctgttccgcgggaaggtgccgggtcgggcgcaccgggactggtaccaccgcatcgaccccaccgtgctgctgggcgcgctgccgttgcggagcttgacgcgccagctggtacaggacgagaacgtgcgcggggtgatcaccatgaacgaggagtacgagacgaggttcctgtgcaactcttcacaggagtggaagagactaggagtcgagcagctgcggctcagcacagtagacatgactgggatccccaccttggacaacctccagaagggagtccaatttgctctcaagtaccagtcgctgggccagtgtgtttacgtgcattgtaaggctgggcgctccaggagtgccactatggtggcagcatacctgattcaggtgcacaaatggagtccagaggaggctgtaagagccatcgccaagatccggtcatacatccacatcaggcctggccagctggatgttcttaaagagttccacaagcagattactgcacgggcaacaaaggatgggacttttgtcatttcaaagacatgatgtatggggattagaaagaactcaagacactcctgcttgatacagaacaaaaagagcttaacaggaccaacagggcttaagcccagacttgacgtaacagaaatgtgccaataggtaataggtaatttttctttctctgacttgttttgttttcttgaaataacactgttgtgtggctagaaaggaaaagatttagtgtggcttgtattcatgggatacaggacagggatggggctatcatcttttcttgaatagggctaaagaagtattttaacaaaaatctattatgtacctaatattgtgcctaataatatttagcaccacaactcaaaaaacatttagcacttgaaaaaaggagactcacctctggctctttgccactgtcagaatctgaatctcactggccctgtggagtagggatcctatctggagaagtgggagcatgggctgcagtcaggactgctgcagactgagccatgtgatggtacgtaatgagttcccctgagggaatgaaacaccctcaccccttcaaagtcacccctttggaattcaacacagacacacatatcccttcaaaaacttttatttgtatcaacagttcctagctcttgacttagcttagagcttttaaaagagcagacaccttatatatttgagattgaaaaagtttctgctattaatcagaaataatcatttctattttctggcttaccccttggaataagccaaaaataaaaccaaagttacatttcctgacagatggataagaaaacaatagaaggaacatcctgaattctagagttgactcttgctggtgaagtacaccttcagcttagtccattctcctaagtaaagcctgaaggaaaactcttaacacctaattctttgtggaaaaatgatcaactagccatttcacaggctatagaacaaaagtacaattgggcatctttccttatgtcctgggatcaggggtgcttacatttaacattgatcaggtaaagaggagaggctgtgcctaaggtctgagaaaaggcttgctctaagcaagctgtggtgaggcacaggatgactagggaatggcagagaacaggctggcctactgtcagttcaagcaaccagctgagcagcagcagtctaaaaagccccaaacagaacacctccatggattcagggaagggctgaggcactgcctttctagtatgtgccaaaaaaaacataactctgaattggggcccaggggactttgagtttgtatggggagggaaaaggagtgagcagttctcctcccctccccacagccttaggccaacacaaactgcaaattggtaagcagcaccttaatacctcttgtgacagttacggctgaagtggcagggtcaagcttgtaggtgttggcatccccctttttatatcggtcccggaagacatagatgctcccgttacagctggcaatcttccagagggatggggcagagctccaggcctcaggaaggcaaagccgggtgaagctgtctagcaagggattgtagcacaccagggagtccccttcagccacgatgaacaccagatctttatgcacagctgcgtgcatgcggcctgcaaagggcagcacatagggcttcacatggcatttgtctgtctctgtgtcaaagcactggatgagtcgggaaggtttggtaaagaagtccagatcattctcctccccccctagtaagtagatgatcccgttgaggttggcaccagcagcccctgacacagccacctctagctgagttgtctctgtccacacattatcacctacgcgataataaatgactgcgttggagagggt

SEQ ID NO: 8784 - protein, 201 aa, Homo sapiens; identical to SEQ ID NO: 8780

SEQ ID NO: 8785 - DNA, 3258 bp, Homo sapiens
ccgccccggcacccgcctgctcttctcgcgggtccggaccgcgagcgcgggggccgacgggtcgccgctgcgccgggccgggatggcggccaccgcgctgctggaggccggcctggcgcgggtgctcttctacccgacgctgctctacaccctgttccgcgggaaggtgccgggtcgggcgcaccgggactggtaccaccgcatcgaccccaccgtgctgctgggcgcgctgccgttgcggagcttgacgcgccagctggtacaggacgagaacgtgcgcggggtgatcaccatgaacgaggagtacgagacgaggttcctgtgcaactcttcacaggagtggaagagactaggagtcgagcagctgcggctcagcacagtagacatgactgggatccccaccttggacaacctccagaagggagtccaatttgctctcaagtaccagtcgctgggccagtgtgtttacgtgcattgtaaggctgggcgctccaggagtgccactatggtggcagcatacctgattcaggtgcacaaatggagtccagaggaggctgtaagagccatcgccaagatccggtcatacatccacatcaggcctggccagctggatgttcttaaagagttccacaagcagattactgcacgggcaacaaaggatgggacttttgtcatttcaaagacatgatgtatggggattagaaagaactcaagacactcctgcttgatacagaacaaaaagagcttaacaggaccaacagggcttaagcccagacttgacgtaacagaaatgtgccaataggtaataggtaatttttctttctctgacttgttttgttttcttgaaataacactgttgtgtggctagaaaggaaaagatttagtgtggcttgtattcatgggatacaggacagggatggggctatcatcttttcttgaatagggctaaagaagtattttaacaaaaatctattatgtacctaatattgtgcctaataatatttagcaccacaactcaaaaaacatttagcacttgaaaaaaggagactcacctctggctctttgccactgtcagaatctgaatctcactggccctgtggagtagggatcctatctggagaagtgggagcatgggctgcagtcaggactgctgcagactgagccatgtgatggtacgtaatgagttcccctgagggaatgaaacaccctcaccccttcaaagtcacccctttggaattcaacacagacacacatatcccttcaaaaacttttatttgtatcaacagttcctagctcttgacttagcttagagcttttaaaagagcagacaccttatatatttgagattgaaaaagtttctgctattaatcagaaataatcatttctattttctggcttaccccttggaataagccaaaaataaaaccaaagttacatttcctgacagatggataagaaaacaatagaaggaacatcctgaattctagagttgactcttgctggtgaagtacaccttcagcttagtccattctcctaagtaaagcctgaaggaaaactcttaacacctaattctttgtggaaaaatgatcaactagccatttcacaggctatagaacaaaagtacaattgggcatctttccttatgtcctgggatcaggggtgcttacatttaacattgatcaggtaaagaggagaggctgtgcctaaggtctgagaaaaggcttgctctaagcaagctgtggtgaggcacaggatgactagggaatggcagagaacaggctggcctactgtcagttcaagcaaccagctgagcagcagcagtctaaaaagccccaaacagaacacctccatggattcagggaagggctgaggcactgcctttctagtatgtgccaaaaaaaacataactctgaattggggcccaggggactttgagtttgtatggggagggaaaaggagtgagcagttctcctcccctccccacagccttaggccaacacaaactgcaaattggtaagcagcaccttaatacctcttgtgacagttacggctgaagtggcagggtcaagcttgtaggtgttggcatccccctttttatatcggtcccggaagacatagatgctcccgttacagctggcaatcttccagagggatggggcagagctccaggcctcaggaaggcaaagccgggtgaagctgtctagcaagggattgtagcacaccagggagtccccttcagccacgatgaacaccagatctttatgcacagctgcgtgcatgcggcctgcaaagggcagcacatagggcttcacatggcatttgtctgtctctgtgtcaaagcactggatgagtcgggaaggtttggtaaagaagtccagatcattctcctccccccctagtaagtagatgatcccgttgaggttggcaccagcagcccctgacacagccacctctagctgagttgtctctgtccacacattatcacctacgcgataataaatgactgcgttggagagggtatcttgcagtgtcttgccacccagtgaatatatggcatctttcccgggcacagacaccagggtgtgctggagccggtcccgaggcaaaggagcacaccactcccagtcaacggtggcattgttgcacttccacatgcgccgtgggatggaccctcccaccacatacaagtctccaccatgcttgcaggccgcagtgatctggtggcacaaactgttttggccacttacactgatggagtcatcttctgcacagtgcaaggacacagccaacgagtgggtacgagatgactctttcccaatcaggtaaatgtgcacattctccccaatttcctattggcaaaattaaaattatatgacagctgttaaattctaggctaaggctcagctaagacacatatccttaagatcctggccctcacacttgttcctagctttatcatactactctctaattactgtatggcatccaactctcctctagtcactttctttgaggcaatttatgccgggcggagaatctgttgtattcatccttgtagcttttaaaaaactctcataagctagtgcttcagacaaagggtgattaagattgttaacttgatgacagtagttctcaaggaactttgaaagctcatagattggtggtactggggttacaaagacatccttctccccagctcatatcaacttcaagccagagataacttattcaaaaataaataaataaatacaaaaaatt

SEQ ID NO: 8786 - protein, 201 aa, Homo sapiens; identical to SEQ ID NO: 8780

SEQ ID NO: 8787 - DNA, 642 bp, Homo sapiens
cgcgagcgcgggggccgacgggtcgccgctgcgccgggccgggatggcggccaccgcgctgctggaggccggcctggcgcgggtgctcttctacccgacgctgctctacaccctgttccgcgggaaggtgccgggtcgggcgcaccgggactggtaccaccgcatcgaccccaccgtgctgctgggcgcgctgccgttgcggagcttgacgcgccagctggtacaggacgagaacgtgcgcggggtgatcaccatgaacgaggagtacgagacgaggttcctgtgcaactcttcacaggtgcacaaatggagtccagaggaggctgtaagagccatcgccaagatccggtcatacatccacatcaggcctggccagctggatgttcttaaagagttccacaagcagattactgcacgggcaacaaaggatgggacttttgtcatttcaaagacatgatgtatggggattagaaagaactcaagacactcctgcttgatacagaacaaaaagagcttaacaggaccaacagggcttaagcccagacttgacgtaacagaaatgtgccaataggtaataggtaatttttctttctctgacttgttttgttttcttgaaataacactgttgtgtggctagaaagg

SEQ ID NO: 8788 - protein, 137 aa, Homo sapiens
MAATALLEAGLARVLFYPTLLYTLFRGKVPGRAHRDWYHRIDPTVLLGALPLRSLTRQLVQDENVRGVITMNEEYETRFLCNSSQVHKWSPEEAVRAIAKIRSYIHIRPGQLDVLKEFHKQITARATKDGTFVISKT

SEQ ID NO: 8789 - DNA, 2288 bp, Homo sapiens
cgcgagcgcgggggccgacgggtcgccgctgcgccgggccgggatggcggccaccgcgctgctggaggccggcctggcgcgggtgctcttctacccgacgctgctctacaccctgttccgcgggaaggtgccgggtcgggcgcaccgggactggtaccaccgcatcgaccccaccgtgctgctgggcgcgctgccgttgcggagcttgacgcgccagctggtacaggacgagaacgtgcgcggggtgatcaccatgaacgaggagtacgagacgaggttcctgtgcaactcttcacaggtgcacaaatggagtccagaggaggctgtaagagccatcgccaagatccggtcatacatccacatcaggcctggccagctggatgttcttaaagagttccacaagcagattactgcacgggcaacaaaggatgggacttttgtcatttcaaagacatgatgtatggggattagaaagaactcaagacactcctgcttgatacagaacaaaaagagcttaacaggaccaacagggcttaagcccagacttgacgtaacagaaatgtgccaataggtaataggtaatttttctttctctgacttgttttgttttcttgaaataacactgttgtgtggctagaaaggaaaagatttagtgtggcttgtattcatgggatacaggacagggatggggctatcatcttttcttgaatagggctaaagaagtattttaacaaaaatctattatgtacctaatattgtgcctaataatatttagcaccacaactcaaaaaacatttagcacttgaaaaaaggagactcacctctggctctttgccactgtcagaatctgaatctcactggccctgtggagtagggatcctatctggagaagtgggagcatgggctgcagtcaggactgctgcagactgagccatgtgatggtacgtaatgagttcccctgagggaatgaaacaccctcaccccttcaaagtcacccctttggaattcaacacagacacacatatcccttcaaaaacttttatttgtatcaacagttcctagctcttgacttagcttagagcttttaaaagagcagacaccttatatatttgagattgaaaaagtttctgctattaatcagaaataatcatttctattttctggcttaccccttggaataagccaaaaataaaaccaaagttacatttcctgacagatggataagaaaacaatagaaggaacatcctgaattctagagttgactcttgctggtgaagtacaccttcagcttagtccattctcctaagtaaagcctgaaggaaaactcttaacacctaattctttgtggaaaaatgatcaactagccatttcacaggctatagaacaaaagtacaattgggcatctttccttatgtcctgggatcaggggtgcttacatttaacattgatcaggtaaagaggagaggctgtgcctaaggtctgagaaaaggcttgctctaagcaagctgtggtgaggcacaggatgactagggaatggcagagaacaggctggcctactgtcagttcaagcaaccagctgagcagcagcagtctaaaaagccccaaacagaacacctccatggattcagggaagggctgaggcactgcctttctagtatgtgccaaaaaaaacataactctgaattggggcccaggggactttgagtttgtatggggagggaaaaggagtgagcagttctcctcccctccccacagccttaggccaacacaaactgcaaattggtaagcagcaccttaatacctcttgtgacagttacggctgaagtggcagggtcaagcttgtaggtgttggcatccccctttttatatcggtcccggaagacatagatgctcccgttacagctggcaatcttccagagggatggggcagagctccaggcctcaggaaggcaaagccgggtgaagctgtctagcaagggattgtagcacaccagggagtccccttcagccacgatgaacaccagatctttatgcacagctgcgtgcatgcggcctgcaaagggcagcacatagggcttcacatggcatttgtctgtctctgtgtcaaagcactggatgagtcgggaaggtttggtaaagaagtccagatcattctcctccccccctagtaagtagatgatcccgttgaggttggcaccagcagcccctgacacagccacctctagctgagttgtctctgtccacacattatcacctacgcgataataaatgactgcgttggagagggt

SEQ ID NO: 8790 - protein, 137 aa, Homo sapiens; identical to SEQ ID NO: 8788

SEQ ID NO: 8791 - DNA, 3027 bp, Homo sapiens
cgcgagcgcgggggccgacgggtcgccgctgcgccgggccgggatggcggccaccgcgctgctggaggccggcctggcgcgggtgctcttctacccgacgctgctctacaccctgttccgcgggaaggtgccgggtcgggcgcaccgggactggtaccaccgcatcgaccccaccgtgctgctgggcgcgctgccgttgcggagcttgacgcgccagctggtacaggacgagaacgtgcgcggggtgatcaccatgaacgaggagtacgagacgaggttcctgtgcaactcttcacaggtgcacaaatggagtccagaggaggctgtaagagccatcgccaagatccggtcatacatccacatcaggcctggccagctggatgttcttaaagagttccacaagcagattactgcacgggcaacaaaggatgggacttttgtcatttcaaagacatgatgtatggggattagaaagaactcaagacactcctgcttgatacagaacaaaaagagcttaacaggaccaacagggcttaagcccagacttgacgtaacagaaatgtgccaataggtaataggtaatttttctttctctgacttgttttgttttcttgaaataacactgttgtgtggctagaaaggaaaagatttagtgtggcttgtattcatgggatacaggacagggatggggctatcatcttttcttgaatagggctaaagaagtattttaacaaaaatctattatgtacctaatattgtgcctaataatatttagcaccacaactcaaaaaacatttagcacttgaaaaaaggagactcacctctggctctttgccactgtcagaatctgaatctcactggccctgtggagtagggatcctatctggagaagtgggagcatgggctgcagtcaggactgctgcagactgagccatgtgatggtacgtaatgagttcccctgagggaatgaaacaccctcaccccttcaaagtcacccctttggaattcaacacagacacacatatcccttcaaaaacttttatttgtatcaacagttcctagctcttgacttagcttagagcttttaaaagagcagacaccttatatatttgagattgaaaaagtttctgctattaatcagaaataatcatttctattttctggcttaccccttggaataagccaaaaataaaaccaaagttacatttcctgacagatggataagaaaacaatagaaggaacatcctgaattctagagttgactcttgctggtgaagtacaccttcagcttagtccattctcctaagtaaagcctgaaggaaaactcttaacacctaattctttgtggaaaaatgatcaactagccatttcacaggctatagaacaaaagtacaattgggcatctttccttatgtcctgggatcaggggtgcttacatttaacattgatcaggtaaagaggagaggctgtgcctaaggtctgagaaaaggcttgctctaagcaagctgtggtgaggcacaggatgactagggaatggcagagaacaggctggcctactgtcagttcaagcaaccagctgagcagcagcagtctaaaaagccccaaacagaacacctccatggattcagggaagggctgaggcactgcctttctagtatgtgccaaaaaaaacataactctgaattggggcccaggggactttgagtttgtatggggagggaaaaggagtgagcagttctcctcccctccccacagccttaggccaacacaaactgcaaattggtaagcagcaccttaatacctcttgtgacagttacggctgaagtggcagggtcaagcttgtaggtgttggcatccccctttttatatcggtcccggaagacatagatgctcccgttacagctggcaatcttccagagggatggggcagagctccaggcctcaggaaggcaaagccgggtgaagctgtctagcaagggattgtagcacaccagggagtccccttcagccacgatgaacaccagatctttatgcacagctgcgtgcatgcggcctgcaaagggcagcacatagggcttcacatggcatttgtctgtctctgtgtcaaagcactggatgagtcgggaaggtttggtaaagaagtccagatcattctcctccccccctagtaagtagatgatcccgttgaggttggcaccagcagcccctgacacagccacctctagctgagttgtctctgtccacacattatcacctacgcgataataaatgactgcgttggagagggtatcttgcagtgtcttgccacccagtgaatatatggcatctttcccgggcacagacaccagggtgtgctggagccggtcccgaggcaaaggagcacaccactcccagtcaacggtggcattgttgcacttccacatgcgccgtgggatggaccctcccaccacatacaagtctccaccatgcttgcaggccgcagtgatctggtggcacaaactgttttggccacttacactgatggagtcatcttctgcacagtgcaaggacacagccaacgagtgggtacgagatgactctttcccaatcaggtaaatgtgcacattctccccaatttcctattggcaaaattaaaattatatgacagctgttaaattctaggctaaggctcagctaagacacatatccttaagatcctggccctcacacttgttcctagctttatcatactactctctaattactgtatggcatccaactctcctctagtcactttctttgaggcaatttatgccgggcggagaatctgttgtattcatccttgtagcttttaaaaaactctcataagctagtgcttcagacaaagggtgattaagattgttaacttgatgacagtagttctcaaggaactttgaaagctcatagattggtggtactggggttacaaagacatccttctccccagctcatatcaacttcaagccagagataacttattcaaaaataaataaataaatacaaaaaatt

SEQ ID NO: 8792 - protein, 137 aa, Homo sapiens; identical to SEQ ID NO: 8788

SEQ ID NO: 8793 - DNA, 893 bp, Homo sapiens
agcgcgggggccgacgggtcgccgctgcgccgggccgggatggcggccaccgcgctgctggaggccggcctggcgcgggtgctcttctacccgacgctgctctacaccctgttccgcgggaaggtgccgggtcgggcgcaccgggactggtaccaccgcatcgaccccaccgtgctgctgggcgcgctgccgttgcggagcttgacgcgccaggtgagccgggccggggagcccgggcccctgccccgtccccgccgctccgtccctgtcgggccgctggggtctccaccgtctttgctgagccacctctttgcctcggcagctggtacaggacgagaacgtgcgcggggtgatcaccatgaacgaggagtacgagacgaggttcctgtgcaactcttcacaggagtggaagagactaggagtcgagcagctgcggctcagcacagtagacatgactgggatccccaccttggacaacctccagaagggagtccaatttgctctcaagtaccagtcgctgggccagtgtgtttacgtgcattgtaaggctgggcgctccaggagtgccactatggtggcagcatacctgattcaggtgcacaaatggagtccagaggaggctgtaagagccatcgccaagatccggtcatacatccacatcaggcctggccagctggatgttcttaaagagttccacaagcagattactgcacgggcaacaaaggatgggacttttgtcatttcaaagacatgatgtatggggattagaaagaactcaagacactcctgcttgatacagaacaaaaagagcttaacaggaccaacagggcttaagcccagacttgacgtaacagaaatgtgccaataggtaataggtaatttttctttctctg

SEQ ID NO: 8794 - protein, 168 aa, Homo sapiens; identical to SEQ ID NO: 8776

SEQ ID NO: 8795 - DNA, 939 bp, Homo sapiens
agcgcgggggccgacgggtcgccgctgcgccgggccgggatggcggccaccgcgctgctggaggccggcctggcgcgggtgctcttctacccgacgctgctctacaccctgttccgcgggaaggtgccgggtcgggcgcaccgggactggtaccaccgcatcgaccccaccgtgctgctgggcgcgctgccgttgcggagcttgacgcgccaggtgagccgggccggggagcccgggcccctgccccgtccccgccgctccgtccctgtcgggccgctggggtctccaccgtctttgctgagccacctctttgcctcggcagctggtacaggacgagaacgtgcgcggggtgatcaccatgaacgaggagtacgagacgaggttcctgtgcaactcttcacaggagtggaagagactaggagtcgagcagctgcggctcagcacagtagacatgactgggatccccaccttggacaacctccagaagggagtccaatttgctctcaagtaccagtcgctgggccagtgtgtttacgtgcattgtaaggctgggcgctccaggagtgccactatggtggcagcatacctgattcaggtgcacaaatggagtccagaggaggctgtaagagccatcgccaagatccggtcatacatccacatcaggcctggccagctggatgttcttaaagagttccacaagcagattactgcacgggcaacaaaggatgggacttttgtcatttcaaagacatgatgtatggggattagaaagaactcaagacactcctgcttgatacagaacaaaaagagcttaacaggaccaacagggcttaagcccagacttgacgtaacagaaatgtgccaataggtaataggtaatttttctttctctgacttgttttgttttcttgaaataacactgttgtgtggctagaaagg

SEQ ID NO: 8796 - protein, 168 aa, Homo sapiens; identical to SEQ ID NO: 8776

SEQ ID NO: 8797 - DNA, 3931 bp, Homo sapiens
gctacacacccctcccccgctctctgagccaagcttttgacgagggcgggcgggcctgagcgggaagaacggtttccctggcgaccgtttccaagacgactcaaggtggagcggggacattgcacagggtgatgggcctcccagtgccccggcctgggggcggatggactcaagttctgggacgcagccatagggagtctttcgagcgagcggggaagtgtgggggaagcagctcagaagagagcaaatgtaagacccacggatatcccaggctaggcttcatatggagcgtcttaactccatgcgctgggaaggagaggacctggccactaggccggggccaggggtcctttttgtctgattctactgcccctgagcttcactagttttatgccccagttatttggttagtaaggcttttacgatcacaggcctctcccagccctttgctttcatatattgacctaaatcccaagtcttttgttaacattatggaaaggaattattccgtgttttctcaggaaaacacccagagttggaacttttatttatatcattagcggaggggcgccactggggataacgaacccagatttggttaaaggatagcgtcagggacatcatggatagggccaggactaaggccaatctggacccactttgctctcacttcttccttttccctccctgagttggacagttggattcacagactatggctgtgaattcctcaggttactcaagatggtgttgctttgcagacagctggcagagagagaagttggctagcatggaatcaccagaggagcctggagcatccatggatgagaactactttgtgaactacactttcaaagatcggtcacattcaggccgtgtggctcaaggcatcatgaaactgtgtctagaggaggagctctttgctgatgtcaccatttcggtggaaggccgggagtttcagctccatcggctggtcctctcagctcagagctgcttcttccgatccatgttcacttccaacctgaaggaggcccacaaccgggtgattgtgctgcaggatgtcagcgagtctgttttccagctcctggttgattatatctaccatgggactgtgaaacttcgagctgaggagttgcaggaaatttatgaggtgtcagacatgtatcagctgacatctctctttgaggaatgctctcggtttttggcccgcacagtgcaagtgggaaactgccttcaggtgatgtggctggcagatcggcacagtgatcctgagctctatacggctgccaagcactgtgccaagacccacctggcccagctgcagaatacagaggaatttctccacttgccccaccgcttactcacagatatcatctcggatggagttccgtgttctcagaacccaacagaggcaatagaagcctggatcaactttaataaagaggaaagagaggcttttgcagagtcactcaggacaagcttgaaggaaattggggagaatgtgcacatttacctgattgggaaagagtcatctcgtacccactcgttggctgtgtccttgcactgtgcagaagatgactccatcagtgtaagtggccaaaacagtttgtgccaccagatcactgcggcctgcaagcatggtggagacttgtatgtggtgggagggtccatcccacggcgcatgtggaagtgcaacaatgccaccgttgactgggagtggtgtgctcctttgcctcgggaccggctccagcacaccctggtgtctgtgcccgggaaagatgccatatattcactgggtggcaagacactgcaagataccctctccaacgcagtcatttattatcgcgtaggtgataatgtgtggacagagacaactcagctagaggtggctgtgtcaggggctgctggtgccaacctcaacgggatcatctacttactagggggggaggagaatgatctggacttctttaccaaaccttcccgactcatccagtgctttgacacagagacagacaaatgccatgtgaagccctatgtgctgccctttgcaggccgcatgcacgcagctgtgcataaagatctggtgttcatcgtggctgaaggggactccctggtgtgctacaatcccttgctagacagcttcacccggctttgccttcctgaggcctggagctctgccccatccctctggaagattgccagctgtaacgggagcatctatgtcttccgggaccgatataaaaagggggatgccaacacctacaagcttgaccctgccacttcagccgtaactgtcacaagaggtattaaggtgctgcttaccaatttgcagtttgtgttggcctaaggctgtggggaggggaggagaactgctcactccttttccctccccatacaaactcaaagtcccctgggccccaattcagagttatgttttttttggcacatactagaaaggcagtgcctcagcccttccctgaatccatggaggtgttctgtttggggctttttagactgctgctgctcagctggttgcttgaactgacagtaggccagcctgttctctgccattccctagtcatcctgtgcctcaccacagcttgcttagagcaagccttttctcagaccttaggcacagcctctcctctttacctgatcaatgttaaatgtaagcacccctgatcccaggacataaggaaagatgcccaattgtacttttgttctatagcctgtgaaatggctagttgatcatttttccacaaagaattaggtgttaagagttttccttcaggctttacttaggagaatggactaagctgaaggtgtacttcaccagcaagagtcaactctagaattcaggatgttccttctattgttttcttatccatctgtcaggaaatgtaactttggttttatttttggcttattccaaggggtaagccagaaaatagaaatgattatttctgattaatagcagaaactttttcaatctcaaatatataaggtgtctgctcttttaaaagctctaagctaagtcaagagctaggaactgttgatacaaataaaagtttttgaagggatatgtgtgtctgtgttgaattccaaaggggtgactttgaaggggtgagggtgtttcattccctcaggggaactcattacgtaccatcacatggctcagtctgcagcagtcctgactgcagcccatgctcccacttctccagataggatccctactccacagggccagtgagattcagattctgacagtggcaaagagccagaggtgagtctccttttttcaagtgctaaatgttttttgagttgtggtgctaaatattattaggcacaatattaggtacataatagatttttgttaaaatacttctttagccctattcaagaaaagatgatagccccatccctgtcctgtatcccatgaatacaagccacactaaatcttttcctttctagccacacaacagtgttatttcaagaaaacaaaacaagtcagagaaagaaaaattacctattacctattggcacatttctgttacgtcaagtctgggcttaagccctgttggtcctgttaagctctttttgttctgtatcaagcaggagtgtcttgagttctttctaatccccatacatcatgtctttgaaatgacaaaagtcccatcctttgttgcccgtgcagtaatctgcttgtggaactctttaagaacatccagctggccaggcctgatgtggatgtatgaccggatcttggcgatggctcttacagcctcctctggactccatttgtgcacctgaagtacagggttgggaaatcagcagagaaagaaagaagcaggtgtcaaggtgcccttgacccatgagcaggtgctaaaggactctgagatttcatttctttggaaactctattttgcaggca

SEQ ID NO: 8798 - protein, 543 aa, Homo sapiens
MAVNSSGYSRWCCFADSWQREKLASMESPEEPGASMDENYFVNYTFKDRSHSGRVAQGIMKLCLEEELFADVTISVEGREFQLHRLVLSAQSCFFRSMFTSNLKEAHNRVIVLQDVSESVFQLLVDYIYHGTVKLRAEELQEIYEVSDMYQLTSLFEECSRFLARTVQVGNCLQVMWLADRHSDPELYTAAKHCAKTHLAQLQNTEEFLHLPHRLLTDIISDGVPCSQNPTEAIEAWINFNKEEREAFAESLRTSLKEIGENVHIYLIGKESSRTHSLAVSLHCAEDDSISVSGQNSLCHQITAACKHGGDLYVVGGSIPRRMWKCNNATVDWEWCAPLPRDRLQHTLVSVPGKDAIYSLGGKTLQDTLSNAVIYYRVGDNVWTETTQLEVAVSGAAGANLNGIIYLLGGEENDLDFFTKPSRLIQCFDTETDKCHVKPYVLPFAGRMHAAVHKDLVFIVAEGDSLVCYNPLLDSFTRLCLPEAWSSAPSLWKIASCNGSIYVFRDRYKKGDANTYKLDPATSAVTVTRGIKVLLTNLQFVLA

SEQ ID NO: 8799 - DNA, 3316 bp, Homo sapiens
agcggaggttccgggctccgggatgaaaggagggaacgcaggtgagaaagcgagacaggcaggtagggaaatcgtgaggtgagcgtggtcctagctccttgtggcagagcctagagagaaggcgaggacgctgaagaaccaggcggacagctggcagagagagaagttggctagcatggaatcaccagaggagcctggagcatccatggatgagaactactttgtgaactacactttcaaagatcggtcacattcaggccgtgtggctcaaggcatcatgaaactgtgtctagaggaggagctctttgctgatgtcaccatttcggtggaaggccgggagtttcagctccatcggctggtcctctcagctcagagctgcttcttccgatccatgttcacttccaacctgaaggaggcccacaaccgggtgattgtgctgcaggatgtcagcgagtctgttttccagctcctggttgattatatctaccatgggactgtgaaacttcgagctgaggagttgcaggaaatttatgaggtgtcagacatgtatcagctgacatctctctttgaggaatgctctcggtttttggcccgcacagtgcaagtgggaaactgccttcaggtgatgtggctggcagatcggcacagtgatcctgagctctatacggctgccaagcactgtgccaagacccacctggcccagctgcagaatacagaggaatttctccacttgccccaccgcttactcacagatatcatctcggatggagttccgtgttctcagaacccaacagaggcaatagaagcctggatcaactttaataaagaggaaagagaggcttttgcagagtcactcaggacaagcttgaaggaaattggggagaatgtgcacatttacctgattgggaaagagtcatctcgtacccactcgttggctgtgtccttgcactgtgcagaagatgactccatcagtgtaagtggccaaaacagtttgtgccaccagatcactgcggcctgcaagcatggtggagacttgtatgtggtgggagggtccatcccacggcgcatgtggaagtgcaacaatgccaccgttgactgggagtggtgtgctcctttgcctcgggaccggctccagcacaccctggtgtctgtgcccgggaaagatgccatatattcactgggtggcaagacactgcaagataccctctccaacgcagtcatttattatcgcgtaggtgataatgtgtggacagagacaactcagctagaggtggctgtgtcaggggctgctggtgccaacctcaacgggatcatctacttactagggggggaggagaatgatctggacttctttaccaaaccttcccgactcatccagtgctttgacacagagacagacaaatgccatgtgaagccctatgtgctgccctttgcaggccgcatgcacgcagctgtgcataaagatctggtgttcatcgtggctgaaggggactccctggtgtgctacaatcccttgctagacagcttcacccggctttgccttcctgaggcctggagctctgccccatccctctggaagattgccagctgtaacgggagcatctatgtcttccgggaccgatataaaaagggggatgccaacacctacaagcttgaccctgccacttcagccgtaactgtcacaagaggtattaaggtgctgcttaccaatttgcagtttgtgttggcctaaggctgtggggaggggaggagaactgctcactccttttccctccccatacaaactcaaagtcccctgggccccaattcagagttatgttttttttggcacatactagaaaggcagtgcctcagcccttccctgaatccatggaggtgttctgtttggggctttttagactgctgctgctcagctggttgcttgaactgacagtaggccagcctgttctctgccattccctagtcatcctgtgcctcaccacagcttgcttagagcaagccttttctcagaccttaggcacagcctctcctctttacctgatcaatgttaaatgtaagcacccctgatcccaggacataaggaaagatgcccaattgtacttttgttctatagcctgtgaaatggctagttgatcatttttccacaaagaattaggtgttaagagttttccttcaggctttacttaggagaatggactaagctgaaggtgtacttcaccagcaagagtcaactctagaattcaggatgttccttctattgttttcttatccatctgtcaggaaatgtaactttggttttatttttggcttattccaaggggtaagccagaaaatagaaatgattatttctgattaatagcagaaactttttcaatctcaaatatataaggtgtctgctcttttaaaagctctaagctaagtcaagagctaggaactgttgatacaaataaaagtttttgaagggatatgtgtgtctgtgttgaattccaaaggggtgactttgaaggggtgagggtgtttcattccctcaggggaactcattacgtaccatcacatggctcagtctgcagcagtcctgactgcagcccatgctcccacttctccagataggatccctactccacagggccagtgagattcagattctgacagtggcaaagagccagaggtgagtctccttttttcaagtgctaaatgttttttgagttgtggtgctaaatattattaggcacaatattaggtacataatagatttttgttaaaatacttctttagccctattcaagaaaagatgatagccccatccctgtcctgtatcccatgaatacaagccacactaaatcttttcctttctagccacacaacagtgttatttcaagaaaacaaaacaagtcagagaaagaaaaattacctattacctattggcacatttctgttacgtcaagtctgggcttaagccctgttggtcctgttaagctctttttgttctgtatcaagcaggagtgtcttgagttctttctaatccccatacatcatgtctttgaaatgacaaaagtcccatcctttgttgcccgtgcagtaatctgcttgtggaactctttaagaacatccagctggccaggcctgatgtggatgtatgaccggatcttggcgatggctcttacagcctcctctggactccatttgtgcacctgaagtacagggttgggaaatcagcagagaaagaaagaagcaggtgtcaaggtgcccttgacccatgagcaggtgctaaaggactctgagatttcatttctttggaaactctattttgcaggca

SEQ ID NO: 8800 - protein, 518 aa, Homo sapiens
MESPEEPGASMDENYFVNYTFKDRSHSGRVAQGIMKLCLEEELFADVTISVEGREFQLHRLVLSAQSCFFRSMFTSNLKEAHNRVIVLQDVSESVFQLLVDYIYHGTVKLRAEELQEIYEVSDMYQLTSLFEECSRFLARTVQVGNCLQVMWLADRHSDPELYTAAKHCAKTHLAQLQNTEEFLHLPHRLLTDIISDGVPCSQNPTEAIEAWINFNKEEREAFAESLRTSLKEIGENVHIYLIGKESSRTHSLAVSLHCAEDDSISVSGQNSLCHQITAACKHGGDLYVVGGSIPRRMWKCNNATVDWEWCAPLPRDRLQHTLVSVPGKDAIYSLGGKTLQDTLSNAVIYYRVGDNVWTETTQLEVAVSGAAGANLNGIIYLLGGEENDLDFFTKPSRLIQCFDTETDKCHVKPYVLPFAGRMHAAVHKDLVFIVAEGDSLVCYNPLLDSFTRLCLPEAWSSAPSLWKIASCNGSIYVFRDRYKKGDANTYKLDPATSAVTVTRGIKVLLTNLQFVLA

SEQ ID NO: 8801 - DNA, 3245 bp, Homo sapiens
agcagatcttcttccgggcggacgtggagccggaagcggaggttccgggctccgggatgaaaggagggaacgcagacagctggcagagagagaagttggctagcatggaatcaccagaggagcctggagcatccatggatgagaactactttgtgaactacactttcaaagatcggtcacattcaggccgtgtggctcaaggcatcatgaaactgtgtctagaggaggagctctttgctgatgtcaccatttcggtggaaggccgggagtttcagctccatcggctggtcctctcagctcagagctgcttcttccgatccatgttcacttccaacctgaaggaggcccacaaccgggtgattgtgctgcaggatgtcagcgagtctgttttccagctcctggttgattatatctaccatgggactgtgaaacttcgagctgaggagttgcaggaaatttatgaggtgtcagacatgtatcagctgacatctctctttgaggaatgctctcggtttttggcccgcacagtgcaagtgggaaactgccttcaggtgatgtggctggcagatcggcacagtgatcctgagctctatacggctgccaagcactgtgccaagacccacctggcccagctgcagaatacagaggaatttctccacttgccccaccgcttactcacagatatcatctcggatggagttccgtgttctcagaacccaacagaggcaatagaagcctggatcaactttaataaagaggaaagagaggcttttgcagagtcactcaggacaagcttgaaggaaattggggagaatgtgcacatttacctgattgggaaagagtcatctcgtacccactcgttggctgtgtccttgcactgtgcagaagatgactccatcagtgtaagtggccaaaacagtttgtgccaccagatcactgcggcctgcaagcatggtggagacttgtatgtggtgggagggtccatcccacggcgcatgtggaagtgcaacaatgccaccgttgactgggagtggtgtgctcctttgcctcgggaccggctccagcacaccctggtgtctgtgcccgggaaagatgccatatattcactgggtggcaagacactgcaagataccctctccaacgcagtcatttattatcgcgtaggtgataatgtgtggacagagacaactcagctagaggtggctgtgtcaggggctgctggtgccaacctcaacgggatcatctacttactagggggggaggagaatgatctggacttctttaccaaaccttcccgactcatccagtgctttgacacagagacagacaaatgccatgtgaagccctatgtgctgccctttgcaggccgcatgcacgcagctgtgcataaagatctggtgttcatcgtggctgaaggggactccctggtgtgctacaatcccttgctagacagcttcacccggctttgccttcctgaggcctggagctctgccccatccctctggaagattgccagctgtaacgggagcatctatgtcttccgggaccgatataaaaagggggatgccaacacctacaagcttgaccctgccacttcagccgtaactgtcacaagaggtattaaggtgctgcttaccaatttgcagtttgtgttggcctaaggctgtggggaggggaggagaactgctcactccttttccctccccatacaaactcaaagtcccctgggccccaattcagagttatgttttttttggcacatactagaaaggcagtgcctcagcccttccctgaatccatggaggtgttctgtttggggctttttagactgctgctgctcagctggttgcttgaactgacagtaggccagcctgttctctgccattccctagtcatcctgtgcctcaccacagcttgcttagagcaagccttttctcagaccttaggcacagcctctcctctttacctgatcaatgttaaatgtaagcacccctgatcccaggacataaggaaagatgcccaattgtacttttgttctatagcctgtgaaatggctagttgatcatttttccacaaagaattaggtgttaagagttttccttcaggctttacttaggagaatggactaagctgaaggtgtacttcaccagcaagagtcaactctagaattcaggatgttccttctattgttttcttatccatctgtcaggaaatgtaactttggttttatttttggcttattccaaggggtaagccagaaaatagaaatgattatttctgattaatagcagaaactttttcaatctcaaatatataaggtgtctgctcttttaaaagctctaagctaagtcaagagctaggaactgttgatacaaataaaagtttttgaagggatatgtgtgtctgtgttgaattccaaaggggtgactttgaaggggtgagggtgtttcattccctcaggggaactcattacgtaccatcacatggctcagtctgcagcagtcctgactgcagcccatgctcccacttctccagataggatccctactccacagggccagtgagattcagattctgacagtggcaaagagccagaggtgagtctccttttttcaagtgctaaatgttttttgagttgtggtgctaaatattattaggcacaatattaggtacataatagatttttgttaaaatacttctttagccctattcaagaaaagatgatagccccatccctgtcctgtatcccatgaatacaagccacactaaatcttttcctttctagccacacaacagtgttatttcaagaaaacaaaacaagtcagagaaagaaaaattacctattacctattggcacatttctgttacgtcaagtctgggcttaagccctgttggtcctgttaagctctttttgttctgtatcaagcaggagtgtcttgagttctttctaatccccatacatcatgtctttgaaatgacaaaagtcccatcctttgttgcccgtgcagtaatctgcttgtggaactctttaagaacatccagctggccaggcctgatgtggatgtatgaccggatcttggcgatggctcttacagcctcctctggactccatttgtgcacctgaagtacagggttgggaaatcagcagagaaagaaagaagcaggtgtcaaggtgcccttgacccatgagcaggtgctaaaggactctgagatttcatttctttggaaactctattttgcaggca

SEQ ID NO: 8802 - protein, 534 aa, Homo sapiens
MKGGNADSWQREKLASMESPEEPGASMDENYFVNYTFKDRSHSGRVAQGIMKLCLEEELFADVTISVEGREFQLHRLVLSAQSCFFRSMFTSNLKEAHNRVIVLQDVSESVFQLLVDYIYHGTVKLRAEELQEIYEVSDMYQLTSLFEECSRFLARTVQVGNCLQVMWLADRHSDPELYTAAKHCAKTHLAQLQNTEEFLHLPHRLLTDIISDGVPCSQNPTEAIEAWINFNKEEREAFAESLRTSLKEIGENVHIYLIGKESSRTHSLAVSLHCAEDDSISVSGQNSLCHQITAACKHGGDLYVVGGSIPRRMWKCNNATVDWEWCAPLPRDRLQHTLVSVPGKDAIYSLGGKTLQDTLSNAVIYYRVGDNVWTETTQLEVAVSGAAGANLNGIIYLLGGEENDLDFFTKPSRLIQCFDTETDKCHVKPYVLPFAGRMHAAVHKDLVFIVAEGDSLVCYNPLLDSFTRLCLPEAWSSAPSLWKIASCNGSIYVFRDRYKKGDANTYKLDPATSAVTVTRGIKVLLTNLQFVLA

SEQ ID NO: 8803 - DNA, 3079 bp, Homo sapiens
gctacacacccctcccccgctctctgagccaagcttttgacgagggcgggcgggcctgagcgggaagaacggtttccctggcgaccgtttccaagacgactcaaggtggagcggggacattgcacagggtgatgggcctcccagtgccccggcctgggggcggatggactcaagttctgggacgcagccatagggagtctttcgagcgagcggggaagtgtgggggaagcagctcagaagagagcaaatgtaagacccacggatatcccaggctaggcttcatatggagcgtcttaactccatgcgctgggaaggagaggacctggccactaggccggggccaggggtcctttttgtctgattctactgcccctgagcttcactagttttatgccccagttatttggttagtaaggcttttacgatcacaggcctctcccagccctttgctttcatatattgacctaaatcccaagtcttttgttaacattatggaaaggaattattccgtgttttctcaggaaaacacccagagttggaacttttatttatatcattagcggaggggcgccactggggataacgaacccagatttggttaaaggatagcgtcagggacatcatggatagggccaggactaaggccaatctggacccactttgctctcacttcttccttttccctccctgagttggacagttggattcacagactatggctgtgaattcctcaggttactcaagatggtgttgctttgcagacagctggcagagagagaagttggctagcatggaatcaccagaggagcctggagcatccatggatgagaactactttgtgaactacactttcaaagatcggtcacattcaggccgtgtggctcaaggcatcatgaaactgtgtctagaggaggagctctttgctgatgtcaccatttcggtggaaggccgggagtttcagctccatcggctggtcctctcagctcagagctgcttcttccgatccatgttcacttccaacctgaaggaggcccacaaccgggtgattgtgctgcaggatgtcagcgagtctgttttccagctcctggttgattatatctaccatgggactgtgaaacttcgagctgaggagttgcaggaaatttatgaggtgtcagacatgtatcagctgacatctctctttgaggaatgctctcggtttttggcccgcacagtgcaagtgggaaactgccttcaggtgatgtggctggcagatcggcacagtgatcctgagctctatacggctgccaagcactgtgccaagacccacctggcccagctgcagaatacagaggaatttctccacttgccccaccgcttactcacagatatcatctcggatggagttccgtgttctcagaacccaacagaggcaatagaagcctggatcaactttaataaagaggaaagagaggcttttgcagagtcactcaggacaagcttgaaggaaattggggagaatgtgcacatttacctgattgggaaagagtcatctcgtacccactcgttggctgtgtccttgcactgtgcagaagatgactccatcagtgtaagtggccaaaacagtttgtgccaccagatcactgcggcctgcaagcatggtggagacttgtatgtggtgggagggtccatcccacggcgcatgtggaagtgcaacaatgccaccgttgactgggagtggtgtgctcctttgcctcgggaccggctccagcacaccctggtgtctgtgcccgggaaagatgccatatattcactgggtggcaagacactgcaagataccctctccaacgcagtcatttattatcgcgtaggtgataatgtgtggacagagacaactcagctagaggtggctgtgtcaggggctgctggtgccaacctcaacgggatcatctacttactagggggggaggagaatgatctggacttctttaccaaaccttcccgactcatccagtgctttgacacagagacagacaaatgccatgtgaagccctatgtgctgccctttgcaggccgcatgcacgcagctgtgcataaagatctggtgttcatcgtggctgaaggggactccctggtgtgctacaatcccttgctagacagcttcacccggctttgccttcctgaggcctggagctctgccccatccctctggaagattgccagctgtaacgggagcatctatgtcttccgggaccgatataaaaagggggatgccaacacctacaagcttgaccctgccacttcagccgtaactgtcacaagaggtattaaggtgctgcttaccaatttgcagtttgtgttggcctaaggctgtggggaggggaggagaactgctcactccttttccctccccatacaaactcaaagtcccctgggccccaattcagagttatgttttttttggcacatactagaaaggcagtgcctcagcccttccctgaatccatggaggtgttctgtttggggctttttagactgctgctgctcagctggttgcttgaactgacagtaggccagcctgttctctgccattccctagtcatcctgtgcctcaccacagcttgcttagagcaagccttttctcagaccttaggcacagcctctcctctttacctgatcaatgttaaatgtaagcacccctgatcccaggacataaggaaagatgcccaattgtacttttgttctatagcctgtgaaatggctagttgatcatttttccacaaagaattaggtgttaagagttttccttcaggctttacttaggagaatggactaagctgaaggtgtacttcaccagcaagagtcaactctagaattcaggatgttccttctattgttttcttatccatctgtcaggaaatgtaactttggttttatttttggcttattccaaggggtaagccagaaaatagaaatgattatttctgattaatagcagaaactttttcaatctcaaatatataaggtgtctgctcttttaaaagctctaagctaagtcaagagctaggaactgttgatacaaataaaagtttttgaaggg

SEQ ID NO: 8804 - protein, 543 aa, Homo sapiens; identical to SEQ ID NO: 8798

SEQ ID NO: 8805 - DNA, 2464 bp, Homo sapiens
agcggaggttccgggctccgggatgaaaggagggaacgcaggtgagaaagcgagacaggcaggtagggaaatcgtgaggtgagcgtggtcctagctccttgtggcagagcctagagagaaggcgaggacgctgaagaaccaggcggacagctggcagagagagaagttggctagcatggaatcaccagaggagcctggagcatccatggatgagaactactttgtgaactacactttcaaagatcggtcacattcaggccgtgtggctcaaggcatcatgaaactgtgtctagaggaggagctctttgctgatgtcaccatttcggtggaaggccgggagtttcagctccatcggctggtcctctcagctcagagctgcttcttccgatccatgttcacttccaacctgaaggaggcccacaaccgggtgattgtgctgcaggatgtcagcgagtctgttttccagctcctggttgattatatctaccatgggactgtgaaacttcgagctgaggagttgcaggaaatttatgaggtgtcagacatgtatcagctgacatctctctttgaggaatgctctcggtttttggcccgcacagtgcaagtgggaaactgccttcaggtgatgtggctggcagatcggcacagtgatcctgagctctatacggctgccaagcactgtgccaagacccacctggcccagctgcagaatacagaggaatttctccacttgccccaccgcttactcacagatatcatctcggatggagttccgtgttctcagaacccaacagaggcaatagaagcctggatcaactttaataaagaggaaagagaggcttttgcagagtcactcaggacaagcttgaaggaaattggggagaatgtgcacatttacctgattgggaaagagtcatctcgtacccactcgttggctgtgtccttgcactgtgcagaagatgactccatcagtgtaagtggccaaaacagtttgtgccaccagatcactgcggcctgcaagcatggtggagacttgtatgtggtgggagggtccatcccacggcgcatgtggaagtgcaacaatgccaccgttgactgggagtggtgtgctcctttgcctcgggaccggctccagcacaccctggtgtctgtgcccgggaaagatgccatatattcactgggtggcaagacactgcaagataccctctccaacgcagtcatttattatcgcgtaggtgataatgtgtggacagagacaactcagctagaggtggctgtgtcaggggctgctggtgccaacctcaacgggatcatctacttactagggggggaggagaatgatctggacttctttaccaaaccttcccgactcatccagtgctttgacacagagacagacaaatgccatgtgaagccctatgtgctgccctttgcaggccgcatgcacgcagctgtgcataaagatctggtgttcatcgtggctgaaggggactccctggtgtgctacaatcccttgctagacagcttcacccggctttgccttcctgaggcctggagctctgccccatccctctggaagattgccagctgtaacgggagcatctatgtcttccgggaccgatataaaaagggggatgccaacacctacaagcttgaccctgccacttcagccgtaactgtcacaagaggtattaaggtgctgcttaccaatttgcagtttgtgttggcctaaggctgtggggaggggaggagaactgctcactccttttccctccccatacaaactcaaagtcccctgggccccaattcagagttatgttttttttggcacatactagaaaggcagtgcctcagcccttccctgaatccatggaggtgttctgtttggggctttttagactgctgctgctcagctggttgcttgaactgacagtaggccagcctgttctctgccattccctagtcatcctgtgcctcaccacagcttgcttagagcaagccttttctcagaccttaggcacagcctctcctctttacctgatcaatgttaaatgtaagcacccctgatcccaggacataaggaaagatgcccaattgtacttttgttctatagcctgtgaaatggctagttgatcatttttccacaaagaattaggtgttaagagttttccttcaggctttacttaggagaatggactaagctgaaggtgtacttcaccagcaagagtcaactctagaattcaggatgttccttctattgttttcttatccatctgtcaggaaatgtaactttggttttatttttggcttattccaaggggtaagccagaaaatagaaatgattatttctgattaatagcagaaactttttcaatctcaaatatataaggtgtctgctcttttaaaagctctaagctaagtcaagagctaggaactgttgatacaaataaaagtttttgaaggg

SEQ ID NO: 8806 - protein, 518 aa, Homo sapiens; identical to SEQ ID NO: 8800

SEQ ID NO: 8807 - DNA, 2393 bp, Homo sapiens
agcagatcttcttccgggcggacgtggagccggaagcggaggttccgggctccgggatgaaaggagggaacgcagacagctggcagagagagaagttggctagcatggaatcaccagaggagcctggagcatccatggatgagaactactttgtgaactacactttcaaagatcggtcacattcaggccgtgtggctcaaggcatcatgaaactgtgtctagaggaggagctctttgctgatgtcaccatttcggtggaaggccgggagtttcagctccatcggctggtcctctcagctcagagctgcttcttccgatccatgttcacttccaacctgaaggaggcccacaaccgggtgattgtgctgcaggatgtcagcgagtctgttttccagctcctggttgattatatctaccatgggactgtgaaacttcgagctgaggagttgcaggaaatttatgaggtgtcagacatgtatcagctgacatctctctttgaggaatgctctcggtttttggcccgcacagtgcaagtgggaaactgccttcaggtgatgtggctggcagatcggcacagtgatcctgagctctatacggctgccaagcactgtgccaagacccacctggcccagctgcagaatacagaggaatttctccacttgccccaccgcttactcacagatatcatctcggatggagttccgtgttctcagaacccaacagaggcaatagaagcctggatcaactttaataaagaggaaagagaggcttttgcagagtcactcaggacaagcttgaaggaaattggggagaatgtgcacatttacctgattgggaaagagtcatctcgtacccactcgttggctgtgtccttgcactgtgcagaagatgactccatcagtgtaagtggccaaaacagtttgtgccaccagatcactgcggcctgcaagcatggtggagacttgtatgtggtgggagggtccatcccacggcgcatgtggaagtgcaacaatgccaccgttgactgggagtggtgtgctcctttgcctcgggaccggctccagcacaccctggtgtctgtgcccgggaaagatgccatatattcactgggtggcaagacactgcaagataccctctccaacgcagtcatttattatcgcgtaggtgataatgtgtggacagagacaactcagctagaggtggctgtgtcaggggctgctggtgccaacctcaacgggatcatctacttactagggggggaggagaatgatctggacttctttaccaaaccttcccgactcatccagtgctttgacacagagacagacaaatgccatgtgaagccctatgtgctgccctttgcaggccgcatgcacgcagctgtgcataaagatctggtgttcatcgtggctgaaggggactccctggtgtgctacaatcccttgctagacagcttcacccggctttgccttcctgaggcctggagctctgccccatccctctggaagattgccagctgtaacgggagcatctatgtcttccgggaccgatataaaaagggggatgccaacacctacaagcttgaccctgccacttcagccgtaactgtcacaagaggtattaaggtgctgcttaccaatttgcagtttgtgttggcctaaggctgtggggaggggaggagaactgctcactccttttccctccccatacaaactcaaagtcccctgggccccaattcagagttatgttttttttggcacatactagaaaggcagtgcctcagcccttccctgaatccatggaggtgttctgtttggggctttttagactgctgctgctcagctggttgcttgaactgacagtaggccagcctgttctctgccattccctagtcatcctgtgcctcaccacagcttgcttagagcaagccttttctcagaccttaggcacagcctctcctctttacctgatcaatgttaaatgtaagcacccctgatcccaggacataaggaaagatgcccaattgtacttttgttctatagcctgtgaaatggctagttgatcatttttccacaaagaattaggtgttaagagttttccttcaggctttacttaggagaatggactaagctgaaggtgtacttcaccagcaagagtcaactctagaattcaggatgttccttctattgttttcttatccatctgtcaggaaatgtaactttggttttatttttggcttattccaaggggtaagccagaaaatagaaatgattatttctgattaatagcagaaactttttcaatctcaaatatataaggtgtctgctcttttaaaagctctaagctaagtcaagagctaggaactgttgatacaaataaaagtttttgaaggg

SEQ ID NO: 8808 - protein, 534 aa, Homo sapiens; identical to SEQ ID NO: 8802

SEQ ID NO: 8809 - DNA, 934 bp, Homo sapiens
tgactcttgctggtgaagtacaccttcagcttagtccattctcctaagtaaagcctgaaggaaaactcttaacacctaattctttgtggaaaaatgatcaactagccatttcacaggctatagaacaaaagtacaattgggcatctttccttatgtcctgggatcaggggtgcttacatttaacattgatcaggtaaagaggagaggctgtgcctaaggtctgagaaaaggcttgctctaagcaagctgtggtgaggcacaggatgactagggaatggcagagaacaggctggcctactgtcagttcaagcaaccagctgagcagcagcagtctaaaaagccccaaacagaacacctccatggattcagggaagggctgaggcactgcctttctagtatgtgccaaaaaaaacataacttgcaaattggtaagcagcaccttaatacctcttgtgacagttacggctgaagtggcagggtcaagcttgtaggtgttggcatccccctttttatatcggtcccggaagacatagatgctcccgttacagctggcaatcttccagagggatggggcagagctccaggcctcaggaaggcaaagccgggtgaagctgtctagcaagggattgtagcacaccagggagtccccttcagccacgatgaacaccagatctttatgcacagctgcgtgcatgcggcctgcaaagggcagcacatagggcttcacatggcatttgtctgtctctgtgtcaaagcactggatgagtcgggaaggtttggtaaagaagtccagatcattctcctccccccctagtaagtagatgatcccgttgaggttggcaccagcagcccctgacacagccacctctagctgagttgtctctgtccacacattatcacctacgcgataataaatgactgcgttggagagggt

SEQ ID NO: 8810 - protein, 64 aa, Homo sapiens
MAENRLAYCQFKQPAEQQQSKKPQTEHLHGFREGLRHCLSSMCQKKHNLQIGKQHLNTSCDSYG

SEQ ID NO: 8811 - DNA, 1673 bp, Homo sapiens
tgactcttgctggtgaagtacaccttcagcttagtccattctcctaagtaaagcctgaaggaaaactcttaacacctaattctttgtggaaaaatgatcaactagccatttcacaggctatagaacaaaagtacaattgggcatctttccttatgtcctgggatcaggggtgcttacatttaacattgatcaggtaaagaggagaggctgtgcctaaggtctgagaaaaggcttgctctaagcaagctgtggtgaggcacaggatgactagggaatggcagagaacaggctggcctactgtcagttcaagcaaccagctgagcagcagcagtctaaaaagccccaaacagaacacctccatggattcagggaagggctgaggcactgcctttctagtatgtgccaaaaaaaacataacttgcaaattggtaagcagcaccttaatacctcttgtgacagttacggctgaagtggcagggtcaagcttgtaggtgttggcatccccctttttatatcggtcccggaagacatagatgctcccgttacagctggcaatcttccagagggatggggcagagctccaggcctcaggaaggcaaagccgggtgaagctgtctagcaagggattgtagcacaccagggagtccccttcagccacgatgaacaccagatctttatgcacagctgcgtgcatgcggcctgcaaagggcagcacatagggcttcacatggcatttgtctgtctctgtgtcaaagcactggatgagtcgggaaggtttggtaaagaagtccagatcattctcctccccccctagtaagtagatgatcccgttgaggttggcaccagcagcccctgacacagccacctctagctgagttgtctctgtccacacattatcacctacgcgataataaatgactgcgttggagagggtatcttgcagtgtcttgccacccagtgaatatatggcatctttcccgggcacagacaccagggtgtgctggagccggtcccgaggcaaaggagcacaccactcccagtcaacggtggcattgttgcacttccacatgcgccgtgggatggaccctcccaccacatacaagtctccaccatgcttgcaggccgcagtgatctggtggcacaaactgttttggccacttacactgatggagtcatcttctgcacagtgcaaggacacagccaacgagtgggtacgagatgactctttcccaatcaggtaaatgtgcacattctccccaatttcctattggcaaaattaaaattatatgacagctgttaaattctaggctaaggctcagctaagacacatatccttaagatcctggccctcacacttgttcctagctttatcatactactctctaattactgtatggcatccaactctcctctagtcactttctttgaggcaatttatgccgggcggagaatctgttgtattcatccttgtagcttttaaaaaactctcataagctagtgcttcagacaaagggtgattaagattgttaacttgatgacagtagttctcaaggaactttgaaagctcatagattggtggtactggggttacaaagacatccttctccccagctcatatcaacttcaagccagagataacttattcaaaaataaataaataaatacaaaaaatt

SEQ ID NO: 8812 - protein, 64 aa, Homo sapiens; identical to SEQ ID NO: 8810

SEQ ID NO: 8813 - DNA, 952 bp, Homo sapiens
tttccggtccgtgcccttggggctccgtgtcctgctgtctttccgtccgctgcctagtctgcatctgagtaacatggcggcggcggcggtagccaggctgtggtggcgcgggatcttgggggcctcggcgctgaccagggggactgggcgaccctccgttctgttgctgccggtgaggcgggagagcgccggggccgacacgcgccccactgtcagaccacggaatgatgtggcccacaagcagctctcagcttttggagagtatgtggctgaaatcttgcccaagtatgtccaacaagttcaggtgtcctgcttcaatgagttagaggtctgtatccatcctgatggcgtcatcccagtgctgactttcctcagggatcacaccaatgcacagttcaaatctctggttgacttgacagcagtggacgtcccaactcggcaaaaccgttttgagattgtctacaacctgttgtctctgcgcttcaactcacggatccgtgtgaagacctacacagatgagctgacgcccattgagtctgctgtctctgtgttcaaggcagccaactggtatgaaagggagatctgggacatgtttggagtcttctttgctaaccaccctgatctaagaaggatcctgacagattatggcttcgagggacatcctttccggaaagactttcctctatctggctatgttgagttacgttatgatgatgaagtgaagcgggtggtggcagagccggtggagttggcccaagagttccgcaaatttgacctgaacagcccctgggaggctttcccagtctatcgccaacccccggagagtctcaagcttgaagccggagacaagaagcctgatgccaagtagctccagggaacgcatgtggatcctagacagcgccttatctatgattgagtgtccgtgtaaataaattcctacttagacttacca

SEQ ID NO: 8814 - protein, 264 aa, Homo sapiens; identical to SEQ ID NO: 1340

SEQ ID NO: 8815 - DNA, 869 bp, Homo sapiens
tcctgctgtctttccgtccgctgcctagtctgcatctgagtaacatggcggcggcggcggtagccaggctgtggtggcgcgggatcttgggggcctcggcgctgaccagggggactgggcgaccctccgttctgttgctgccggtgaggcgggagagcgccggggccgacacgcgccccactgtcagaccacggaatgatgtggcccacaagcagctctcagcttttggagagtatgtggctgaaatcttgcccaagtatgtccaacaagttcaggtgtcctgcttcaatgagttagaggtctgtatccatcctgatggcgtcatcccagtgctgactttcctcagggatcacaccaatgcacagttcaaatctctggttgacttgacagcagtggacgtcccaactcggatccgtgtgaagacctacacagatgagctgacgcccattgagtctgctgtctctgtgttcaaggcagccaactggtatgaaagggagatctgggacatgtttggagtcttctttgctaaccaccctgatctaagaaggatcctgacagattatggcttcgagggacatcctttccggaaagactttcctctatctggctatgttgagttacgttatgatgatgaagtgaagcgggtggtggcagagccggtggagttggcccaagagttccgcaaatttgacctgaacagcccctgggaggctttcccagtctatcgccaacccccggagagtctcaagcttgaagccggagacaagaagcctgatgccaagtagctccagggaacgcatgtggatcctagacagcgccttatctatgattgagtgtccgtgtaaataaattcctacttagacttacca

SEQ ID NO: 8816 - protein, 246 aa, Homo sapiens
MAAAAVARLWWRGILGASALTRGTGRPSVLLLPVRRESAGADTRPTVRPRNDVAHKQLSAFGEYVAEILPKYVQQVQVSCFNELEVCIHPDGVIPVLTFLRDHTNAQFKSLVDLTAVDVPTRIRVKTYTDELTPIESAVSVFKAANWYEREIWDMFGVFFANHPDLRRILTDYGFEGHPFRKDFPLSGYVELRYDDEVKRVVAEPVELAQEFRKFDLNSPWEAFPVYRQPPESLKLEAGDKKPDAK

SEQ ID NO: 8817 - DNA, 526 bp, Homo sapiens
agtctgcatctgagtaacatggcggcggcggcggtagccaggctgtggtggcgcgggatcttgggggcctcggcgctgaccagggggactgggcgaccctccgttctgttgctgccggtgaggcgggagagcgccggggccgacacgcgccccactgtcagaccacggaatgatgtggcccacaagcagctctcagcttttggagagtatgtggctgaaatcttgcccaagtatgtccaacaagttcaggtgtcctgcttcaatgagttagaggtctgtatccatcctgatggcgtcatcccagtgctgactttcctcagggatcacaccaatgcacagttcaaatctctggttgacttgacagcagtggacgtcccaactcggcaaaaccgttttgaggtcagttgggagatctgagaaggttttgggggtaaggatattaatttcagtttgtaacatacaatagaacacagcagttaaactggaacttcagagtcaagtagatctgaagttggatcttggttct

SEQ ID NO: 8818 - protein, 132 aa, Homo sapiens
MAAAAVARLWWRGILGASALTRGTGRPSVLLLPVRRESAGADTRPTVRPRNDVAHKQLSAFGEYVAEILPKYVQQVQVSCFNELEVCIHPDGVIPVLTFLRDHTNAQFKSLVDLTAVDVPTRQNRFEVSWEI

SEQ ID NO: 8819 - DNA, 982 bp, Homo sapiens
cggcggcggtagccaggctgtggtggcgcgggatcttgggggcctcggcgctgaccaggggtgagcacgggcagccagctgagaccggggtcaggcgcagcggcgtgcccagtgcagagagctcctcagggctcatcccgcgcgtctgtgccttttatctccctgtgcagggactgggcgaccctccgttctgttgctgccggtgaggcgggagagcgccggggccgacacgcgccccactgtcagaccacggaatgatgtggcccacaagcagctctcagcttttggagagtatgtggctgaaatcttgcccaagtatgtccaacaagttcaggtgtcctgcttcaatgagttagaggtctgtatccatcctgatggcgtcatcccagtgctgactttcctcagggatcacaccaatgcacagttcaaatctctggttgacttgacagcagtggacgtcccaactcggcaaaaccgttttgagattgtctacaacctgttgtctctgcgcttcaactcacggatccgtgtgaagacctacacagatgagctgacgcccattgagtctgctgtctctgtgttcaaggcagccaactggtatgaaagggagatctgggacatgtttggagtcttctttgctaaccaccctgatctaagaaggatcctgacagattatggcttcgagggacatcctttccggaaagactttcctctatctggctatgttgagttacgttatgatgatgaagtgaagcgggtggtggcagagccggtggagttggcccaagagttccgcaaatttgacctgaacagcccctgggaggctttcccagtctatcgccaacccccggagagtctcaagcttgaagccggagacaagaagcctgatgccaagtagctccagggaacgcatgtggatcctagacagcgccttatctatgattgagtgtccgtgtaaataaattcctacttagacttacca

SEQ ID NO: 8820 - protein, 92 aa, Homo sapiens
MFGVFFANHPDLRRILTDYGFEGHPFRKDFPLSGYVELRYDDEVKRVVAEPVELAQEFRKFDLNSPWEAFPVYRQPPESLKLEAGDKKPDAK

SEQ ID NO: 8821 - DNA, 815 bp, Homo sapiens
gcaggaggggcacttggccctgtctgggaggcttctttgaaaagagagaatgtttgtgctgaatctaaaatatgagtaggagaccaggtagccttgtgagatggaccagggaaatattcctgacaaagtgaatagcatgagcaaacacaggcatgctgacatgctaagctacagctgtggcctgggcctttggaagtagttgtaagcataggagaatcttgaggttttgaggttcagaatagaaggcagggtcacagggcagaactctcccaatcagggactcccatctcagccctccagatccttctgttctccctagattgtctacaacctgttgtctctgcgcttcaactcacggatccgtgtgaagacctacacagatgagctgacgcccattgagtctgctgtctctgtgttcaaggcagccaactggtatgaaagggagatctgggacatgtttggagtcttctttgctaaccaccctgatctaagaaggatcctgacagattatggcttcgagggacatcctttccggaaagactttcctctatctggctatgttgagttacgttatgatgatgaagtgaagcgggtggtggcagagccggtggagttggcccaagagttccgcaaatttgacctgaacagcccctgggaggctttcccagtctatcgccaacccccggagagtctcaagcttgaagccggagacaagaagcctgatgccaagtagctccagggaacgcatgtggatcctagacagcgccttatctatgattgagtgtccgtgtaaataaattcctacttagacttac

SEQ ID NO: 8822 - protein, 92 aa, Homo sapiens; identical to SEQ ID NO: 8820

SEQ ID NO: 8823 - DNA, 896 bp, Homo sapiens
tgtgctgaatctaaaatatgagtaggagaccaggtagccttgtgagatggaccagggaaatattcctgacaaagtgaatagcatgagcaaacacaggcatgctgacatgctaagctacagctgtggcctgggcctttggaagtagttgtaagcataggagaatcttgaggttttgaggttcagaatagaaggcagggtcacagggcagaactctcccaatcagggactcccatctcagccctccagatccttctgttctccctagattgtctacaacctgttgtctctgcgcttcaactcacggatccgtgtgaagacctacacagatgagctgacgcccattgagtctgctgtctctgtgttcaaggcagccaactggtatgaaagggaggtgagttaccggatatggtggacctgcctctgggccacagttgcagaactggttcagactacgggatgcagtgtagccccttccccctgttgttagtcttgatggattggctgtttgaggtggtctctttcctagatctgggacatgtttggagtcttctttgctaaccaccctgatctaagaaggatcctgacagattatggcttcgagggacatcctttccggaaagactttcctctatctggctatgttgagttacgttatgatgatgaagtgaagcgggtggtggcagagccggtggagttggcccaagagttccgcaaatttgacctgaacagcccctgggaggctttcccagtctatcgccaacccccggagagtctcaagcttgaagccggagacaagaagcctgatgccaagtagctccagggaacgcatgtggatcctagacagcgccttatctatgattgagtgtccgtgtaaataaattcctacttagacttac

SEQ ID NO: 8824 - protein, 92 aa, Homo sapiens; identical to SEQ ID NO: 8820

SEQ ID NO: 8825 - DNA, 652 bp, Homo sapiens
gcagtggaaagttggagctgaggtgtgtggcaggcagatgagggagcagagaactgctgaacagagtgagactcagaggacgtggttgagcatggctgcgaccctgcagttcctggtttgcctggtggtagccatttgtctcctctctggtgtgactacaacccagccccatgcagggcagcccatggacacaccacgtgcccagtgacttggagggcactgagcagtggctgcagcagctccaggacctgcggaaggggcctcctcttagcacttgggactttgaacatctgctcctcacaggcctgtcctgcgtctaccggctccacgcagctagtgaggctgaggaacggggccgctgggcccaggtcttcgctctcctggcacaggaaacactctgggacctgtgcaaaggtttctgcccccaggaccggcccccttccctggggtcctgggcctccatccttgaccccttcccctgaccctcctcttttgttctttcacctgccattaccccctcccatctcctcctcaaccccccaggcagacccatcttgcgcaggggcttctgtctggcatctgattcttttcaccgtgttcagatctctgggcttggcttgcaccctggacaccccctctctgcttaccccga

SEQ ID NO: 8826 - protein, 103 aa, Homo sapiens
MQGSPWTHHVPSDLEGTEQWLQQLQDLRKGPPLSTWDFEHLLLTGLSCVYRLHAASEAEERGRWAQVFALLAQETLWDLCKGFCPQDRPPSLGSWASILDPFP

SEQ ID NO: 8827 - DNA, 1388 bp, Homo sapiens
agctgaggtgtgtggcaggcagatgagggagcagagaactgctgaacagagtgagactcagaggacgtggttgagcatggctgcgaccctgcagttcctggtttgcctggtggtagccatttgtctcctctctggtgtgactacaacccagccccatgcagggcagcccatggacagcaccagcgtgggaggtggcctgcaggagccagaggccccggaagtgatgtttgagctgctctgggctgggctggagctggatgtcatggggcagctgcacatccaggatgaggaactagcgtccacacacccaggccgccgactcagactcctcctgcagcaccacgtgcccagtgacttggagggcactgagcagtggctgcagcagctccaggacctgcggaaggggcctcctcttagcacttgggactttgaacatctgctcctcacaggcctgtcctgcgtctaccggctccacgcagctagtgaggctgaggaacggggccgctgggcccaggtcttcgctctcctggcacaggaaacactctgggacctgtgcaaaggtttctgcccccaggaccggcccccttccctggggtcctgggcctccatccttgaccccttcccctgaccctcctcttttgttctttcacctgccattaccccctcccatctcctcctcaaccccccaggcagacccatcttgcgcaggggcttctgtctggcatctgattcttttcaccgtgttcagatctctgggcttggcttgcaccctggacaccccctctctgcttaccccgaccagatcttgtttcctagatcttgagaggctaagaacccaggctctgggtcgcaaggagtgcgcaaggagtgggcacagagctaagggcacgacttgcaggcagtgtgtgtgtgagtgtgtgtgtgtgtgtgtgtgtgtgtgtgtgtgtgtggagatcaggggtcagggttgagaagtgtgttcaagagatgctgaagggaagctgccccaagtaaggcctggtcagaccttccaactcctaccctggcagtctgtgacaggtcctgtggaattcacaggaatcctctaggtgctgagcatccccttttaggcacaaccaaggatttggggtctctgagcctccaagttcccatctgggttgggagaatcgactttttgagttctgtcagttggaagagtggagggaagcagggggagggaggaacattatctcttttggggtagggaggcaatatctcaacaagcgtcgggtgaatacctcagaggggggagtaaggctgggagaccaaggagagacaagcggaggtgggctggagcaggtgtggccctgattctgtgttgctcttctcataaaatgttctgtttcggc

SEQ ID NO: 8828 - protein, 201 aa, Homo sapiens
MREQRTAEQSETQRTWLSMAATLQFLVCLVVAICLLSGVTTTQPHAGQPMDSTSVGGGLQEPEAPEVMFELLWAGLELDVMGQLHIQDEELASTHPGRRLRLLLQHHVPSDLEGTEQWLQQLQDLRKGPPLSTWDFEHLLLTGLSCVYRLHAASEAEERGRWAQVFALLAQETLWDLCKGFCPQDRPPSLGSWASILDPFP

SEQ ID NO: 8829 - DNA, 1414 bp, Homo sapiens
cttcgctctcgctcggctccctctctagctgaccttccctttccctcacgcctccccacgcccggcccctggccccagcaccctgtccgctgccgcctcagagccgggaaaagcagccggagcccccgccgcccctgccgcagcgcgggcggtcagcgcgcagcccggcacccgcagcctgcagcctgcagcccgcagcccgcagcccggagccagatcgcgggctcagaccgaacccgactcgaccgccgcccccagccaggcgccatgctgccgcttctgctgggcctgctgggcccagcggcctgctgggccctgggcccgacccccggcccgggatcctctgagctgcgctcggccttctcggcggcacgcaccacccccctggagggcacgtcggagatggcggtgaccttcgacaaggtgtacgtgaacatcgggggcgacttcgatgtggccaccggccagtttcgctgccgcgtgcccggcgcctacttcttctccttcacggctggcaaggccccgcacaagagcctgtcggtgatgctggtgcgaaaccgcgacgaggtgcaggcgctggccttcgacgagcagcggcggccaggcgcgcggcgcgcagccagccagagcgccatgctgcagctcgactacggcgacacagtgtggctgcggctgcatggcgccccgcagtacgcgctaggcgcgcccggcgccaccttcagcggctacctagtctacgccgacgccgacgctgacgcgcctgcgcgcgggccgcccgcgccccccgagccgcgctcggccttctcggcggcgcgcacgcgcagcttggtgggctcggacgctggccccgggccgcggcaccaaccactcgccttcgacaccgagttcgtcaacattggcggcgacttcgacgcggcggccggcgtgttccgctgccgtctgcccggcgcctacttcttctccttcacgctgggcaagctgccgcgtaagacgctgtcggttaagctgatgaagaaccgcgacgaggtgcaggccatgatttacgacgacggcgcgtcgcggcgccgcgagatgcagagccagagcgtgatgctggccctgcggcgcggcgacgccgtctggctgctcagccacgaccacgacggctacggcgcctacagcaaccacggcaagtacatcaccttctccggcttcctggtgtaccccgacctcgcccccgccgccccgccgggcctcggggcctcggagctactgtgagccccgggccagagaagagcccgggagggccaggggcgtgcatgccaggccgggccggaggctcgaaagtcccgcgcgagcgccacggcctccgggcgcgcctggactctgccaataaagcggaaagcgggcacgcgcagcgcccggcagcccaggc

SEQ ID NO: 8830 - protein, 329 aa, Homo sapiens
MLPLLLGLLGPAACWALGPTPGPGSSELRSAFSAARTTPLEGTSEMAVTFDKVYVNIGGDFDVATGQFRCRVPGAYFFSFTAGKAPHKSLSVMLVRNRDEVQALAFDEQRRPGARRAASQSAMLQLDYGDTVWLRLHGAPQYALGAPGATFSGYLVYADADADAPARGPPAPPEPRSAFSAARTRSLVGSDAGPGPRHQPLAFDTEFVNIGGDFDAAAGVFRCRLPGAYFFSFTLGKLPRKTLSVKLMKNRDEVQAMIYDDGASRRREMQSQSVMLALRRGDAVWLLSHDHDGYGAYSNHGKYITFSGFLVYPDLAPAAPPGLGASELL

SEQ ID NO: 8831 - DNA, 2708 bp, Homo sapiens
aggcttgaatttactttggaagaacttagactactaccctcattcttctatgaggaaaaattttgcatcattaccgaaatggtgttttttgtttttttttttttaattttcagagtatctccccatacggattttgaatatcataaataccctgtgagataggcaggacagctataattagtatcactttagagattaaaaaacattgatgctctgagagtttcatctgctgcctgtcacatcgctgctgagtgctggagctggcatttgaagctggtcttcaatccgtggggaaatgctcttcccactattccatgctgcctcacctaggtcacccagaccctagaaatgtggtttttgatgcctctcatctgtatctgtacttgggaccattcttgctttgtaatttttctcgtcttttgctctgccaaatatgaatatcagatagcttagcaaaatcatttttttaagctagtcaaagcaaaacaatatttaagtctcttctgcaaagcacctcgcaaatcttttgcctccctgcttacagttatgaatagtaaggtgagccactgagggtatagccgacctgcattttaaacataggaacaaaagtcactggagatcagcttcaagtacagctgtgttaacgagaatgaactaggtatgcgggctggattctggtgtttgattccttttttacttccctagaatgttttgtgacctctaattatttgacaaacatttgtactgaagagcctgtcatgttactgatcacattttttggttcttatttttattgtttcttcatgtaggggtcttgttcctcgccttctaggtgacatcctttctttgtggctgtgtaactcactggcctacctcgtcaatacctatgcactggacagtggggtttctaccatgaatgaaatgaagagttattctcaagctgtcacaggattttttgcgagtatgttgacctatccctttgtgcttgtctccaatcttatggctgtcaacaactgtggtcttgctggtggatgccctccttactccccaatatatacgtcttggatagactgttggtgcatgctacaaaaagaggggaatatgagccgaggaaatagcttatttttccggaaggtcccctttgggaagacttattgttgtgacctgaaaatgttaatttgaagatgtggggcagggacagtgacatttctgtagtcccagatgcacagaattatgggagagaatgttgatttctatacagtgtggcgcgcttttttaataatcatttaatcttgggaaaattcaggtgtttggtgtctgccttttttgttcttttttccagcacaacataacttaccactgatactccccctttagttattctgaattaggatatttttgctccaaattcttattttacttaaccagaagggaaaaaaagttgtattttcctgaagctacaggcactttgtcatgtgatttttgagtctcaatttaaggctttgtaaaatgaagagtagaattccaagaaaaatgagaaataattttgtaaaacttaacaaaatcactaaattaaactatatgggaggttatgaattactttttcttgggtagaccctaaaatgtcagtagcatgcaccagaatctgactcccattatgcttctaagcacatttcattgaccttgtctctcatacttcaagaaaaggacagtacattgctacattaccctagaaagtctgtgtgaggatctgccccttcagtctgttattgcaaagtaataaaatgtcacctacagggagcctctgagcctactctagttcaagaggctacctgaaaaaaaataaataagataaagggtcagcaacaacaaagaaaaagacaattacagaaaataagcaagatttggaaaggaagtataatggcacttttttcctcaaaggaagttcttgttttcacataaaatatgaaaagcagatcctgcaggagtaacccccttctttaagagccaagtatttgccagtgcttaaattacaccatacagttctaattatatataatcttttgttcttcagttttttgttttgtttcctttttgttattgttgccgaaggtgagtagttttgcatttctgatgacagccttggaaagtatatttgtaactccatgtctggtaatgccaacccaagtcgacatgggtcttaggacactgaccacctcacatgccataccctcagttaagcatgttaacatttataggaggaaaaaaatcactttgggagaaaataaaattcaactcaagcataaagcttctgtttactcaggccttctaaaaagcaggttaaaatgctctaaaatgagaaagcctgtggtttcacttatttatataactcactgggacattgccaaatgagtaagcacttaattcgctgcttctgagacttctctgtcaaaacagccccactgataatattagacagaacgagaatgcaggggtctcttccctcccctggggtttaggaagctcatgaggagctcggcttaaaatgtctttgatgtctcttcctttgtctcaaaaagtaatgtcaattttatatactatttcaatattactatctgcatttgttttaatataaaaatgtttgctgcctacctttttctcccaaaaaatctttaagtaaagatgatctgggaaaatgtgccatgttt

SEQ ID NO: 8832 - protein, 89 aa, Homo sapiens
MNEMKSYSQAVTGFFASMLTYPFVLVSNLMAVNNCGLAGGCPPYSPIYTSWIDCWCMLQKEGNMSRGNSLFFRKVPFGKTYCCDLKMLI

SEQ ID NO: 8833 - DNA, 1905 bp, Homo sapiens
gaatccaagtactgtggactttgtgattccataataaccatctatcgggaagagggcattctaggatttttcgcgggtcttgttcctcgccttctaggtgacatcctttctttgtggctgtgtaactcactggcctacctcgtcaatacctatgcactggacagtggggtttctaccatgaatgaaatgaagagttattctcaagctgtcacaggatcttgctggtggatgccctccttactccccaatatatacgtcttggatagactgttggtgcatgctacaaaaagaggggaatatgagccgaggaaatagcttatttttccggaaggtcccctttgggaagacttattgttgtgacctgaaaatgttaatttgaagatgtggggcagggacagtgacatttctgtagtcccagatgcacagaattatgggagagaatgttgatttctatacagtgtggcgcgcttttttaataatcatttaatcttgggaaaattcaggtgtttggtgtctgccttttttgttcttttttccagcacaacataacttaccactgatactccccctttagttattctgaattaggatatttttgctccaaattcttattttacttaaccagaagggaaaaaaagttgtattttcctgaagctacaggcactttgtcatgtgatttttgagtctcaatttaaggctttgtaaaatgaagagtagaattccaagaaaaatgagaaataattttgtaaaacttaacaaaatcactaaattaaactatatgggaggttatgaattactttttcttgggtagaccctaaaatgtcagtagcatgcaccagaatctgactcccattatgcttctaagcacatttcattgaccttgtctctcatacttcaagaaaaggacagtacattgctacattaccctagaaagtctgtgtgaggatctgccccttcagtctgttattgcaaagtaataaaatgtcacctacagggagcctctgagcctactctagttcaagaggctacctgaaaaaaaataaataagataaagggtcagcaacaacaaagaaaaagacaattacagaaaataagcaagatttggaaaggaagtataatggcacttttttcctcaaaggaagttcttgttttcacataaaatatgaaaagcagatcctgcaggagtaacccccttctttaagagccaagtatttgccagtgcttaaattacaccatacagttctaattatatataatcttttgttcttcagttttttgttttgtttcctttttgttattgttgccgaaggtgagtagttttgcatttctgatgacagccttggaaagtatatttgtaactccatgtctggtaatgccaacccaagtcgacatgggtcttaggacactgaccacctcacatgccataccctcagttaagcatgttaacatttataggaggaaaaaaatcactttgggagaaaataaaattcaactcaagcataaagcttctgtttactcaggccttctaaaaagcaggttaaaatgctctaaaatgagaaagcctgtggtttcacttatttatataactcactgggacattgccaaatgagtaagcacttaattcgctgcttctgagacttctctgtcaaaacagccccactgataatattagacagaacgagaatgcaggggtctcttccctcccctggggtttaggaagctcatgaggagctcggcttaaaatgtctttgatgtctcttcctttgtctcaaaaagtaatgtcaattttatatactatttcaatattactatctgcatttgttttaatataaaaatgtttgctgcctacctttttctcccaaaaaatctttaagtaaagatgatctgggaaaatgtgccatgttt

SEQ ID NO: 8834 - protein, 45 aa, Homo sapiens
MNEMKSYSQAVTGSCWWMPSLLPNIYVLDRLLVHATKRGEYEPRK

SEQ ID NO: 8835 - DNA, 1285 bp, Homo sapiens
acctaggaccggctcaccgggtcgcttggtggctccgtctgtctgtccgtccgcccgcgggtgccatcatggcggacgcggccagtcaggtgctcctgggctccggtctcaccatcctgtcccagccgctcatgtacgtgaaagtgctcatccaggtgggatatgagcctcttcctccaacaataggacgaaatatttttgggcggcaagtgtgtcagcttcctggtctctttagttatggtaagtgcatttcattgaccttgtctctcatacttcaagaaaaggacagtacattgctacattaccctagaaagtctgtgtgaggatctgccccttcagtctgttattgcaaagtaataaaatgtcacctacagggagcctctgagcctactctagttcaagaggctacctgaaaaaaaataaataagataaagggtcagcaacaacaaagaaaaagacaattacagaaaataagcaagatttggaaaggaagtataatggcacttttttcctcaaaggaagttcttgttttcacataaaatatgaaaagcagatcctgcaggagtaacccccttctttaagagccaagtatttgccagtgcttaaattacaccatacagttctaattatatataatcttttgttcttcagttttttgttttgtttcctttttgttattgttgccgaaggtgagtagttttgcatttctgatgacagccttggaaagtatatttgtaactccatgtctggtaatgccaacccaagtcgacatgggtcttaggacactgaccacctcacatgccataccctcagttaagcatgttaacatttataggaggaaaaaaatcactttgggagaaaataaaattcaactcaagcataaagcttctgtttactcaggccttctaaaaagcaggttaaaatgctctaaaatgagaaagcctgtggtttcacttatttatataactcactgggacattgccaaatgagtaagcacttaattcgctgcttctgagacttctctgtcaaaacagccccactgataatattagacagaacgagaatgcaggggtctcttccctcccctggggtttaggaagctcatgaggagctcggcttaaaatgtctttgatgtctcttcctttgtctcaaaaagtaatgtcaattttatatactatttcaatattactatctgcatttgttttaatataaaaatgtttgctgcctacctttttctcccaaaaaatctttaagtaaagatgatctgggaaaatgtgccatgttt

SEQ ID NO: 8836 - protein, 84 aa, Homo sapiens
MADAASQVLLGSGLTILSQPLMYVKVLIQVGYEPLPPTIGRNIFGRQVCQLPGLFSYGKCISLTLSLILQEKDSTLLHYPRKSV

SEQ ID NO: 8837 - DNA, 2632 bp, Homo sapiens
ctcgcgagcgcctgccgtttctcggggcgggacgggggggcggggactgggcggagaggcgcgtgctgctgcgtgcgtgcgcgcgcgccgcgggcgggccagtgaaaccggcggccctggcacgtgacctaggaccggctcaccgggtcgcttggtggctccgtctgtctgtccgtccgcccgcgggtgccatcatggcggacgcggccagtcaggtgctcctgggctccggtctcaccatcctgtcccagccgctcatgtacgtgaaagtgctcatccaggtgggatatgagcctcttcctccaacaataggacgaaatatttttgggcggcaagtgtgtcagcttcctggtctctttagttatgctcagcacattgccagtatcgatgggaggcgcgggttgttcacaggcttaactccaagactgtgttcgggagtccttggaactgtggtccatggtaaagttttacagcattaccaggagagtgacaagggtgaggagttaggacctggaaatgtacagaaagaagtctcatcttcctttgaccacgttatcaaggagacaactcgagagatgatcgctcgttctgctgctaccctcatcacacatcccttccatgtgatcactctgagatctatggtacagttcattggcagagaatccaagtactgtggactttgtgattccataataaccatctatcgggaagagggcattctaggatttttcgcgggtcttgttcctcgccttctaggtgacatcctttctttgtggctgtgtaactcactggcctacctcgtcaatacctatgcactggacagtggggtttctaccatgaatgaaatgaagagttattctcaagctgtcacaggattttttgcgagtatgttgacctatccctttgtgcttgtctccaatcttatggctgtcaacaactgtggtcttgctggtggatgccctccttactccccaatatatacgtcttggatagactgttggtgcatgctacaaaaagaggggaatatgagccgaggaaatagcttatttttccggaaggtcccctttgggaagacttattgttgtgacctgaaaatgttaatttgaagatgtggggcagggacagtgacatttctgtagtcccagatgcacagaattatgggagagaatgttgatttctatacagtgtggcgcgcttttttaataatcatttaatcttgggaaaattcaggtgtttggtgtctgccttttttgttcttttttccagcacaacataacttaccactgatactccccctttagttattctgaattaggatatttttgctccaaattcttattttacttaaccagaagggaaaaaaagttgtattttcctgaagctacaggcactttgtcatgtgatttttgagtctcaatttaaggctttgtaaaatgaagagtagaattccaagaaaaatgagaaataattttgtaaaacttaacaaaatcactaaattaaactatatgggaggttatgaattactttttcttgggtagaccctaaaatgtcagtagcatgcaccagaatctgactcccattatgcttctaagcacatttcattgaccttgtctctcatacttcaagaaaaggacagtacattgctacattaccctagaaagtctgtgtgaggatctgccccttcagtctgttattgcaaagtaataaaatgtcacctacagggagcctctgagcctactctagttcaagaggctacctgaaaaaaaataaataagataaagggtcagcaacaacaaagaaaaagacaattacagaaaataagcaagatttggaaaggaagtataatggcacttttttcctcaaaggaagttcttgttttcacataaaatatgaaaagcagatcctgcaggagtaacccccttctttaagagccaagtatttgccagtgcttaaattacaccatacagttctaattatatataatcttttgttcttcagttttttgttttgtttcctttttgttattgttgccgaaggtgagtagttttgcatttctgatgacagccttggaaagtatatttgtaactccatgtctggtaatgccaacccaagtcgacatgggtcttaggacactgaccacctcacatgccataccctcagttaagcatgttaacatttataggaggaaaaaaatcactttgggagaaaataaaattcaactcaagcataaagcttctgtttactcaggccttctaaaaagcaggttaaaatgctctaaaatgagaaagcctgtggtttcacttatttatataactcactgggacattgccaaatgagtaagcacttaattcgctgcttctgagacttctctgtcaaaacagccccactgataatattagacagaacgagaatgcaggggtctcttccctcccctggggtttaggaagctcatgaggagctcggcttaaaatgtctttgatgtctcttcctttgtctcaaaaagtaatgtcaattttatatactatttcaatattactatctgcatttgttttaatataaaaatgtttgctgcctacctttttctcccaaaaaatctttaagtaaagatgatctgggaaaatgtgccatgttt

SEQ ID NO: 8838 - protein, 303 aa, Homo sapiens; identical to SEQ ID NO: 1346

SEQ ID NO: 8839 - DNA, 789 bp, Homo sapiens
ctcgcgagcgcctgccgtttctcggggcgggacgggggggcggggactgggcggagaggcgcgtgctgctgcgtgcgtgcgcgcgcgccgcgggcgggccagtgaaaccggcggccctggcacgtgacctaggaccggctcaccgggtcgcttggtggctccgtctgtctgtccgtccgcccgcgggtgccatcatggcggacgcggccagtcaggtgctcctgggctccggtctcaccatcctgtcccagccgctcatgtacgtgaaagtgctcatccaggtgggatatgagcctcttcctccaacaataggacgaaatatttttgggcggcaagtgtgtcagcttcctggtctctttagttatgctcagcacattgccagtatcgatgggaggcgcgggttgttcacaggcttaactccaagactgtgttcgggagtccttggaactgtggtccatggtaaagttttacagcattaccaggagagtgacaagggtgaggagttaggacctggaaatgtacagaaagaagtctcatcttcctttgaccacgttatcaaggaggtaagagatgaaatgcaggggtctcttccctcccctggggtttaggaagctcatgaggagctcggcttaaaatgtctttgatgtctcttcctttgtctcaaaaagtaatgtcaattttatatactatttcaatattactatctgcatttgttttaatataaaaatgtttgctgcctacctttttctcccaaaaaatctttaagtaaagatgatctgggaaaatgtg

SEQ ID NO: 8840 - protein, 137 aa, Homo sapiens
MADAASQVLLGSGLTILSQPLMYVKVLIQVGYEPLPPTIGRNIFGRQVCQLPGLFSYAQHIASIDGRRGLFTGLTPRLCSGVLGTVVHGKVLQHYQESDKGEELGPGNVQKEVSSSFDHVIKEVRDEMQGSLPSPGV

SEQ ID NO: 8841 - DNA, 1304 bp, Homo sapiens
aggcttgaatttactttggaagaacttagactactaccctcattcttctatgaggaaaaattttgcatcattaccgaaatggtgttttttgtttttttttttttaattttcagagtatctccccatacggattttgaatatcataaataccctgtgagataggcaggacagctataattagtatcactttagagattaaaaaacattgatgctctgagagtttcatctgctgcctgtcacatcgctgctgagtgctggagctggcatttgaagctggtcttcaatccgtggggaaatgctcttcccactattccatgctgcctcacctaggtcacccagaccctagaaatgtggtttttgatgcctctcatctgtatctgtacttgggaccattcttgctttgtaatttttctcgtcttttgctctgccaaatatgaatatcagatagcttagcaaaatcatttttttaagctagtcaaagcaaaacaatatttaagtctcttctgcaaagcacctcgcaaatcttttgcctccctgcttacagttatgaatagtaaggtgagccactgagggtatagccgacctgcattttaaacataggaacaaaagtcactggagatcagcttcaagtacagctgtgttaacgagaatgaactaggtatgcgggctggattctggtgtttgattccttttttacttccctagaatgttttgtgacctctaattatttgacaaacatttgtactgaagagcctgtcatgttactgatcacattttttggttcttatttttattgtttcttcatgtaggggtcttgttcctcgccttctaggtgacatcctttctttgtggctgtgtaactcactggcctacctcgtcaatacctatgcactggacagtggggtttctaccatgaatgaaatgaagagttattctcaagctgtcacaggattttttgcgagtatgttgacctatccctttgtgcttgtctccaatcttatggctgtcaacaactgtggtcttgctggtggatgccctccttactccccaatatatacgtcttggatagactgttggtgcatgctacaaaaagaggggaatatgagccgaggaaatagcttatttttccggaaggtcccctttgggaagacttattgttgtgacctgaaaatgttaatttgaagatgtggggcagggacagtgacatttctgtagtcccagatgcacagaattatgggagagaatgttgatttctatacagtgtggcgcgcttttttaataatcatttaatcttgggaaaattc

SEQ ID NO: 8842 - protein, 89 aa, Homo sapiens; identical to SEQ ID NO: 8832

SEQ ID NO: 8843 - DNA, 501 bp, Homo sapiens
gaatccaagtactgtggactttgtgattccataataaccatctatcgggaagagggcattctaggatttttcgcgggtcttgttcctcgccttctaggtgacatcctttctttgtggctgtgtaactcactggcctacctcgtcaatacctatgcactggacagtggggtttctaccatgaatgaaatgaagagttattctcaagctgtcacaggatcttgctggtggatgccctccttactccccaatatatacgtcttggatagactgttggtgcatgctacaaaaagaggggaatatgagccgaggaaatagcttatttttccggaaggtcccctttgggaagacttattgttgtgacctgaaaatgttaatttgaagatgtggggcagggacagtgacatttctgtagtcccagatgcacagaattatgggagagaatgttgatttctatacagtgtggcgcgcttttttaataatcatttaatcttgggaaaattc

SEQ ID NO: 8844 - protein, 45 aa, Homo sapiens; identical to SEQ ID NO: 8834

SEQ ID NO: 8845 - DNA, 590 bp, Homo sapiens
atggtacagttcattggcagagaatccaagtactgtggactttgtgattccataataaccatctatcgggaagagggcattctaggatttttcgcgggtcttgttcctcgccttctaggtgacatcctttctttgtggctgtgtaactcactggcctacctcgtcaatacctatgcactggacagtggggtttctaccatgaatgaaatgaagagttattctcaagctgtcacaggattttttgcgagtatgttgacctatccctttgtgcttgtctccaatcttatggctgtcaacaactgtggtcttgctggtggatgccctccttactccccaatatatacgtcttggatagactgttggtgcatgctacaaaaagaggggaatatgagccgaggaaatagcttatttttccggaaggtcccctttgggaagacttattgttgtgacctgaaaatgttaatttgaagatgtggggcagggacagtgacatttctgtagtcccagatgcacagaattatgggagagaatgttgatttctatacagtgtggcgcgcttttttaataatcatttaatcttgggaaaattc

SEQ ID NO: 8846 - protein, 155 aa, Homo sapiens
MVQFIGRESKYCGLCDSIITIYREEGILGFFAGLVPRLLGDILSLWLCNSLAYLVNTYALDSGVSTMNEMKSYSQAVTGFFASMLTYPFVLVSNLMAVNNCGLAGGCPPYSPIYTSWIDCWCMLQKEGNMSRGNSLFFRKVPFGKTYCCDLKMLI

SEQ ID NO: 8847 - DNA, 1228 bp, Homo sapiens
ctcgcgagcgcctgccgtttctcggggcgggacgggggggcggggactgggcggagaggcgcgtgctgctgcgtgcgtgcgcgcgcgccgcgggcgggccagtgaaaccggcggccctggcacgtgacctaggaccggctcaccgggtcgcttggtggctccgtctgtctgtccgtccgcccgcgggtgccatcatggcggacgcggccagtcaggtgctcctgggctccggtctcaccatcctgtcccagccgctcatgtacgtgaaagtgctcatccaggtgggatatgagcctcttcctccaacaataggacgaaatatttttgggcggcaagtgtgtcagcttcctggtctctttagttatgctcagcacattgccagtatcgatgggaggcgcgggttgttcacaggcttaactccaagactgtgttcgggagtccttggaactgtggtccatggtaaagttttacagcattaccaggagagtgacaagggtgaggagttaggacctggaaatgtacagaaagaagtctcatcttcctttgaccacgttatcaaggagacaactcgagagatgatcgctcgttctgctgctaccctcatcacacatcccttccatgtgatcactctgagatctatggtacagttcattggcagagaatccaagtactgtggactttgtgattccataataaccatctatcgggaagagggcattctaggatttttcgcgggtcttgttcctcgccttctaggtgacatcctttctttgtggctgtgtaactcactggcctacctcgtcaatacctatgcactggacagtggggtttctaccatgaatgaaatgaagagttattctcaagctgtcacaggattttttgcgagtatgttgacctatccctttgtgcttgtctccaatcttatggctgtcaacaactgtggtcttgctggtggatgccctccttactccccaatatatacgtcttggatagactgttggtgcatgctacaaaaagaggggaatatgagccgaggaaatagcttatttttccggaaggtcccctttgggaagacttattgttgtgacctgaaaatgttaatttgaagatgtggggcagggacagtgacatttctgtagtcccagatgcacagaattatgggagagaatgttgatttctatacagtgtggcgcgcttttttaataatcatttaatcttgggaaaattc

SEQ ID NO: 8848 - protein, 303 aa, Homo sapiens; identical to SEQ ID NO: 1346

SEQ ID NO: 8849 - DNA, 552 bp, Homo sapiens
acggttgtgttttcagtgcccagcacatacgaggtgctcaataaatatttattgcacaagtgtgagtcaccacacctggttggattatttattcttggatttgtgcattgatggtgccaaataatattgccttgtcccactgatgctagtgagcatggggaggcacagagcctcttgccaggggtgggtggttgggggattcagtctgctccacaatattttccaatggtgtgaggcagaagctgctgatgaggttttgggaagaatctgcagagaataggtaaccgaagtcagcagtatagataagggaagaggtgctatgtacagctgcctaggctgtgcactgcataactcagagtggggccagtcacaaagactatgatctgaatggcattccctgatacagttcagtatgatgaccctaagatgggttatatttgctgacccatattgcagtggtgagaggaataacggaagtcaaaaggggcagaattaactgggaaggaaacagaactagaacagcatgtcactgaagtcaacagaaaagtttgg

SEQ ID NO: 8850 - protein, 45 aa, Homo sapiens
MLVSMGRHRASCQGWVVGGFSLLHNIFQWCEAEAADEVLGRICRE

SEQ ID NO: 8851 - DNA, 1798 bp, Homo sapiens
ctcaagaggcagctgcaaagaaagctgtggtcttgagtgccagagttcaccctggagaaagtaatggctcctgggttatgaaaggctttttggacttcatccttagcaactccccagatgcccagctcctcagagatatttttgtcttcaaggtgcttcccatgttaaatccagatggtgtgattgtggggaattatcggtgttccttggccggaagggatttgaacaggcattataaaaccattctgaaggagtctttcccttgtatttggtacaccaggaacatgatcaaaagttctcttttcacagttgtaattttaaggtccaaaaatgcaaagaaggaacaggacgagttgttatgtggcggatgggaatcctaaacagctacaccatggagtctacctttggcgggtccaccctgggtaataaaagagacacccactttaccatcgaagatctgaagtccttaggttatcatgtctgtgacacccttctggacttttgtgatcctgaccaaatgaagttcactcagtgtctagcagagcttaaggagcttttacgacaggaaatccacaagaaattccatgaacttggacaagatgtagatttagaaggaagttggagtgacatctctttgtctgacattgaatccagcaccagtggctctgacagttctctctcagatggtcttcctgttcacctagcaaacatagcagatgagctgactcagaaaaagaagatgtttaagaagaaaaaaaagaagtcacttcagactaggaaacagcgaaatgagcagtatcagaaaaaaaatttgatgcagaagttaaagttaacagaagatacctcagaaaaggcaggatttgcttctactctgcaaaagcagccaacctttttcaaaaactcagagaattccagttttttaccaatgaaaaatgaaaacccaaggttaaatgagacaaatttaaatagaagagacaaagacacccccctggacccatcaatggccaccctgattctgcctaagaataaagggagaatgcagaataagaagccaggctttacagtatcatgctctccaaagagaaccataaactccagccaagagccagctccaggtatgaagccaaactggcctaggagcagatatcctgccacaaagagaggctgtgctgccatggcggcatacccatccttgcacatatacacatacccgtaggtgagcctgggctgtgccacacaagcacttcatcgggggttttgagattagacacattttataatgggggagatgtatgactgggaactgcatttacttgtggtatactgtgttgtgcactcatgcactgaccttacactttgtacttacactgtgggcatgtggtcaagatgcatacctcatgaattcaactattttttcataaaatgaaattttattatgatgtgtaaaaatgctttatcagaaactgaagtgtgttctcatggcacacttcatggcagcacagatatacctcattttaaccaatagatattctctctaaaattatgtgcaaatcaatttttaaaaatcaaaatctatgttaaacacattttggcagtgtgctataataaaaaaaagtgttgtgtcaaagctttctagtgacggtcagtcctactgctgtatgtcaggtttgctcacaatgaggtattcccacatagaaataacaatgcatgtattacccagaatttaatgttgcgtaccttatgttcaatgaggttttgtaatttttttaggctgatgattaaaattctttctctctaa

SEQ ID NO: 8852 - protein, 285 aa, Homo sapiens
MWRMGILNSYTMESTFGGSTLGNKRDTHFTIEDLKSLGYHVCDTLLDFCDPDQMKFTQCLAELKELLRQEIHKKFHELGQDVDLEGSWSDISLSDIESSTSGSDSSLSDGLPVHLANIADELTQKKKMFKKKKKKSLQTRKQRNEQYQKKNLMQKLKLTEDTSEKAGFASTLQKQPTFFKNSENSSFLPMKNENPRLNETNLNRRDKDTPLDPSMATLILPKNKGRMQNKKPGFTVSCSPKRTINSSQEPAPGMKPNWPRSRYPATKRGCAAMAAYPSLHIYTYP

SEQ ID NO: 8853 - DNA, 3590 bp, Homo sapiens
agactacccgggccctcacagaaggcggtggcgggcgggtgcagcgagtttgtccccttgcccgcacactgcttggcctctgtacttaagtgcggtggccgcctgcctcgctggagcttctctgccgcagccatccgtgctgcttgggacgggccggggcgcgaaggcggtcgcatccatcgctctgccctcctgggaacttctcttgtgtaatcagctgcctatttggaaattgggcagggtttgcgactggatgctaatgtcactgactagttttcagcctaccatccagaagtaacatgttcccagctttggaaacgcacctaaagcagactattcctgatccttatgaagactttatgtaccgtcacctccaatattatggctactttaaagctcagagaggcagtttaccaaactctgctacgcatcagcatgttcggaagaataaccctcaatgcctgttgaatggctctcttggggaaaaagatgatttgataccagacaccctgcaaaaggagaagcttctatggcctatcagtttatcttcagctgtgcacagacagatagaagccatcaacagagactttcactcttgcctgggctggatgcagtggcgcggcctcagctcactgcaacctccacctcccagattcaaggattctcctgcctcagctttccgagtagctgggattacagattcacatatgctgagtttaccacatcttaggagcagacagcttctttatgatgagttggatgaagtaaacccacgtcttcgagaaccccaagagctcttttccattttgtctaccaagaggccactgcaggctccaagatggccaattgaatgtgaggtcatcaaggaaaacatccatcatattgagtgggctccacctcaaccagaatatttctatcagcctaaaggaaatgaaaaggtaccagagattgtaggagagaaaaaaggaacagttgtctatcaattagattcagtgcctatagaaggttcctattttaccagttccagagtgggaggcaaacgaggaattgtcaaggaacttgctgtcacgttgcaaggaccagaagataatactctactgtttgaatcaaggtttgagagtgggaatctgcaaaaagctgtcagagtagacacctatgagtatgaactcaccttgcgaactgacctctacactaacaaacacactcagtggttttattttcgtgttcagaacaccagaaaagatgctacctatcgcttcaccattgtcaacttgctaaaacccaagagtctttatactgtagggatgaagccactcttgtactcccaattggatgccaacacccgcaatattggctggaggagagaaggaaatgaaatcaagtactacaagaacaacacggatgatgggcagcagcccttctactgtctcacgtggaccattcagtttccatatgaccaggacacttgcttctttgcacacttctacccatatacatacactgatttgcaatgctacctcctgtcagtggcaaacaaccctatccagtctcagttctgcaagctccaaactttatgcaggagcctagcaggaaataccgtttacttgctcaccatcaccaacccatcccagacccctcaagaggcagctgcaaagaaagctgtggtcttgagtgccagagttcaccctggagaaagtaatggctcctgggttatgaaaggctttttggacttcatccttagcaactccccagatgcccagctcctcagagatatttttgtcttcaaggtgcttcccatgttaaatccagatggtgtgattgtggggaattatcggtgttccttggccggaagggatttgaacaggcattataaaaccattctgaaggagtctttcccttgtatttggtacaccaggaacatgatcaaaagacttcttgaagaaagagaggttctgttgtattgtgatttccatggccacagtcgtaagaataatatcttcctgtatggctgtaataacaacaatcgcaaatactggcttcatgaacgagtctttcctttaatgttatgcaaaaatgcaccagataagttctcttttcacagttgtaattttaaggtccaaaaatgcaaagaaggaacaggacgagttgttatgtggcggatgggaatcctaaacagctacaccatggagtctacctttggcgggtccaccctgggtaataaaagagacacccactttaccatcgaagatctgaagtccttaggttatcatgtctgtgacacccttctggacttttgtgatcctgaccaaatgaagttcactcagtgtctagcagagcttaaggagcttttacgacaggaaatccacaagaaattccatgaacttggacaagatgtagatttagaaggaagttggagtgacatctctttgtctgacattgaatccagcaccagtggctctgacagttctctctcagatggtcttcctgttcacctagcaaacatagcagatgagctgactcagaaaaagaagatgtttaagaagaaaaaaaagaagtcacttcagactaggaaacagcgaaatgagcagtatcagaaaaaaaatttgatgcagaagttaaagttaacagaagatacctcagaaaaggcaggatttgcttctactctgcaaaagcagccaacctttttcaaaaactcagagaattccagttttttaccaatgaaaaatgaaaacccaaggttaaatgagacaaatttaaatagaagagacaaagacacccccctggacccatcaatggccaccctgattctgcctaagaataaagggagaatgcagaataagaagccaggctttacagtatcatgctctccaaagagaaccataaactccagccaagagccagctccaggtatgaagccaaactggcctaggagcagatatcctgccacaaagagaggctgtgctgccatggcggcatacccatccttgcacatatacacatacccgtaggtgagcctgggctgtgccacacaagcacttcatcgggggttttgagattagacacattttataatgggggagatgtatgactgggaactgcatttacttgtggtatactgtgttgtgcactcatgcactgaccttacactttgtacttacactgtgggcatgtggtcaagatgcatacctcatgaattcaactattttttcataaaatgaaattttattatgatgtgtaaaaatgctttatcagaaactgaagtgtgttctcatggcacacttcatggcagcacagatatacctcattttaaccaatagatattctctctaaaattatgtgcaaatcaatttttaaaaatcaaaatctatgttaaacacattttggcagtgtgctataataaaaaaaagtgttgtgtcaaagctttctagtgacggtcagtcctactgctgtatgtcaggtttgctcacaatgaggtattcccacatagaaataacaatgcatgtattacccagaatttaatgttgcgtaccttatgttcaatgaggttttgtaatttttttaggctgatgattaaaattctttctctctaa

SEQ ID NO: 8854 - protein, 902 aa, Homo sapiens; identical to SEQ ID NO: 1348

SEQ ID NO: 8855 - DNA, 2634 bp, Homo sapiens
agactacccgggccctcacagaaggcggtggcgggcgggtgcagcgagtttgtccccttgcccgcacactgcttggcctctgtacttaagtgcggtggccgcctgcctcgctggagcttctctgccgcagccatccgtgctgcttgggacgggccggggcgcgaaggcggtcgcatccatcgctctgccctcctgggaagtttctgctctccttccccgctcctacccttaggaaaccccctcaccacctgccccagaccaggttcctctgaaccctaaattcaatctttagggcccactttcccaaccccctgacctttttccatcggcacctaccgagacgacttcgtcgcgtgctcccatacccatttctttcactttcctgtggcgagcatctcctttctcagggaaagggaagcatggggccagcaccttgggaagaagaagcgggaagatacgctgccctccctgtctcagatgcacctctggcctcggcgtgaccaccttgtttagctgaggagaagctgggttggcagggttttctgaagtcaagagggagctggggggcgcccggggaggtattggcagttttttcacttgtcctcttgtggctttgtagcttctcttgtgtaatcagctgcctatttggaaattgggcagggtttgcgactggatgctaatgtcactgactagttttcagcctaccatccagaagtaacatgttcccagctttggaaacgcacctaaagcagactattcctgatccttatgaagactttatgtaccgtcacctccaatattatggctactttaaagctcagagaggcagtttaccaaactctgctacgcatcagcatgttcggaagaataaccctcaatgcctgttgaatggctctcttggggaaaaagatgatttgataccagacaccctgcaaaaggagaagcttctatattcacatatgctgagtttaccacatcttaggagcagacagcttctttatgatgagttggatgaagtaaacccacgtcttcgagaaccccaagagctcttttccattttgtctaccaagaggccactgcaggctccaagatggccaattgaatgtgaggtcatcaaggaaaacatccatcatattgagtgggctccacctcaaccagaatatttctatcagcctaaaggaaatgaaaaggtaccagagattgtaggagagaaaaaaggaacagttgtctatcaattagattcagtgcctatagaaggttcctattttaccagttccagagtgggaggcaaacgaggaattgtcaaggaacttgctgtcacgttgcaaggaccagaagataatactctactgtttgaatcaaggtttgagagtgggaatctgcaaaaagctgtcagagtagacacctatgagtatgaactcaccttgcgaactgacctctacactaacaaacacactcagtggttttattttcgtgttcagaacaccagaaaagatgctacctatcgcttcaccattgtcaacttgctaaaacccaagagtctttatactgtagggatgaagccactcttgtactcccaattggatgccaacacccgcaatattggctggaggagagaaggaaatgaaatcaagtactacaagaacaacacggatgatgggcagcagcccttctactgtctcacgtggaccattcagtttccatatgaccaggacacttgcttctttgcacacttctacccatatacatacactgatttgcaatgctacctcctgtcagtggcaaacaaccctatccagtctcagttctgcaagctccaaactttatgcaggagcctagcaggaaataccgtttacttgctcaccatcaccaacccatcccagacccctcaagaggcagctgcaaagaaagctgtggtcttgagtgccagagttcaccctggagaaagtaatggctcctgggttatgaaaggctttttggacttcatccttagcaactccccagatgcccagctcctcagagatatttttgtcttcaaggtgcttcccatgttaaatccagatggtgtgattgtggggaattatcggtgttccttggccggaagggatttgaacaggcattataaaaccattctgaaggagtctttcccttgtatttggtacaccaggaacatgatcaaaagacttcttgaagaaagagaggttctgttgtattgtgatttccatggccacagtcgtaagaataatatcttcctgtatggctgtaataacaacaatcgcaaatactggcttcatgaacgagtctttcctttaatgttatgcaaaaatgcaccagataagttctcttttcacagttgtaattttaaggtccaaaaatgcaaagaaggaacaggacgagttgttatgtggcggatgggaatcctaaacagctacaccatggagtctacctttggcgggtccaccctgggtaataaaagagacacccactttaccatcgaagatctgaagtccttaggttatcatgtctgtgacacccttctggacttttgtgatcctgaccaaatgaagcaccagtggctctgacagttctctctcagatggtcttcctgttcacctagcaaacatagcagatgag

SEQ ID NO: 8856 - protein, 620 aa, Homo sapiens
MFPALETHLKQTIPDPYEDFMYRHLQYYGYFKAQRGSLPNSATHQHVRKNNPQCLLNGSLGEKDDLIPDTLQKEKLLYSHMLSLPHLRSRQLLYDELDEVNPRLREPQELFSILSTKRPLQAPRWPIECEVIKENIHHIEWAPPQPEYFYQPKGNEKVPEIVGEKKGTVVYQLDSVPIEGSYFTSSRVGGKRGIVKELAVTLQGPEDNTLLFESRFESGNLQKAVRVDTYEYELTLRTDLYTNKHTQWFYFRVQNTRKDATYRFTIVNLLKPKSLYTVGMKPLLYSQLDANTRNIGWRREGNEIKYYKNNTDDGQQPFYCLTWTIQFPYDQDTCFFAHFYPYTYTDLQCYLLSVANNPIQSQFCKLQTLCRSLAGNTVYLLTITNPSQTPQEAAAKKAVVLSARVHPGESNGSWVMKGFLDFILSNSPDAQLLRDIFVFKVLPMLNPDGVIVGNYRCSLAGRDLNRHYKTILKESFPCIWYTRNMIKRLLEEREVLLYCDFHGHSRKNNIFLYGCNNNNRKYWLHERVFPLMLCKNAPDKFSFHSCNFKVQKCKEGTGRVVMWRMGILNSYTMESTFGGSTLGNKRDTHFTIEDLKSLGYHVCDTLLDFCDPDQMKHQWL

SEQ ID NO: 8857 - DNA, 833 bp, Homo sapiens
agactacccgggccctcacagaaggcggtggcgggcgggtgcagcgagtttgtccccttgcccgcacactgcttggcctctgtacttaagtgcggtggccgcctgcctcgctggagcttctctgccgcagccatccgtgctgcttgggacgggccggggcgcgaaggcggtcgcatccatcgctctgccctcctgggaagtttctgctctccttccccgctcctacccttaggaaaccccctcaccacctgccccagaccagcttctcttgtgtaatcagctgcctatttggaaattgggcagggtttgcgactggatgctaatgtcactgactagttttcagcctaccatccagaagtaacatgttcccagctttggaaacgcacctaaagcagactattcctgatccttatgaagactttatgtaccgtcacctccaatattatggctactttaaagctcagagaggcagtttaccaaactctgctacgcatcagcatgttcggaagaataaccctcaatgcctgttgaatggctctcttggggaaaaagatgatttgataccagacaccctgcaaaaggagaagcttctatggcctatcagtttatcttcagctgtgcacagacagatagaagccatcaacagagattcacatatgctgagtttaccacatcttaggagcagacagcttctttatgatgagttggatgaagtaaacccacgtcttcgagaaccccaagagctcttttccattttgtctaccaagaggccactgcaggctccaagatggccaattgaatgtgaggtcatcaaggaaaacatccatcatatt

SEQ ID NO: 8858 - protein, 156 aa, Homo sapiens
MFPALETHLKQTIPDPYEDFMYRHLQYYGYFKAQRGSLPNSATHQHVRKNNPQCLLNGSLGEKDDLIPDTLQKEKLLWPISLSSAVHRQIEAINRDSHMLSLPHLRSRQLLYDELDEVNPRLREPQELFSILSTKRPLQAPRWPIECEVIKENIHH

SEQ ID NO: 8859 - DNA, 1458 bp, Homo sapiens
agactacccgggccctcacagaaggcggtggcgggcgggtgcagcgagtttgtccccttgcccgcacactgcttggcctctgtacttaagtgcggtggccgcctgcctcgctggagcttctctgccgcagccatccgtgctgcttgggacgggccggggcgcgaaggcggtcgcatccatcgctctgccctcctgggaagtttctgctctccttccccgctcctacccttaggaaaccccctcaccacctgccccagaccaggttcctctgaaccctaaattcaatctttagggcccactttcccaaccccctgacctttttccatcggcacctaccgagacgacttcgtcgcgtgctcccatacccatttctttcactttcctgtggcgagcatctcctttctcagggaaagggaagcatggggccagcaccttgggaagaagaagcgggaagatacgctgccctccctgtctcagatgcacctctggcctcggcgtgaccaccttgtttagctgaggagaagctggcttctcttgtgtaatcagctgcctatttggaaattgggcagggtttgcgactggatgctaatgtcactgactagttttcagcctaccatccagaagtaacatgttcccagctttggaaacgcacctaaagcagactattcctgatccttatgaagactttatgtaccgtcacctccaatattatggctactttaaagctcagagaggcagtttaccaaactctgctacgcatcagcatgttcggaagaataaccctcaatgcctgttgaatggctctcttggggaaaaagatgatttgataccagacaccctgcaaaaggagaagcttctatggcctatcagtttatcttcagctgtgcacagacagatagaagccatcaacagaggtatttcatgtccttccagaccagaagattcaagctccttttttggactatgtcttcatcacctgctgttcccaccagacctaagaattaccagacaggaatgggattcatgcctgatgagcactgaaggaccctcagcctttagttccccctttcatttccatttttttcttttttcctcattccctttcttctttttctttttcttttttttttttttttgacacagactttcactcttgcctgggctggatgcagtggcgcggcctcagctcactgcaacctccacctcccagattcaaggattctcctgcctcagctttccgagtagctgggattacaggcatgtgccaccacgcccagctaatttttatgtttttagtagagacaggatttcaccacgttggccaggctggtctcgaactcctgaactcagatgatcagcccgcctcagcctcccaaagttctgggattacaggcttgagccaccacgcctggcccctcctttcttttttatcttcctgaaagcctttcttttcttccc

SEQ ID NO: 8860 - protein, 169 aa, Homo sapiens
MFPALETHLKQTIPDPYEDFMYRHLQYYGYFKAQRGSLPNSATHQHVRKNNPQCLLNGSLGEKDDLIPDTLQKEKLLWPISLSSAVHRQIEAINRGISCPSRPEDSSSFFGLCLHHLLFPPDLRITRQEWDSCLMSTEGPSAFSSPFHFHFFLFSSFPFFFFFFFFFFF

SEQ ID NO: 8861 - DNA, 554 bp, Homo sapiens
gcagggtttgcgactggatgctaatgtcactgactagttttcagcctaccatccagaagtaacatgttcccagctttggaaacgcacctaaagcagactattcctgatccttatgaagactttatgtaccgtcacctccaatattatggctactttaaaggatctcgctctgtcactcaggctggagggcagtggcctccacatcccaggctcaagcaaccctcccagcctttggctatcattttctgagttccaacacagcccttgtagcttcagaatctttctgcctgccaagtcctttctcactccactacaccaggctgcttctcaagtctcctcttcacatccatttcctcagctgtaagctcagagaggcagtttaccaaactctgctacgcatcagcatgttcggaagaataaccctcaatgcctgttgaatggctctcttggggaaaaagatgatttgataccagacaccctgcaaaaggagaagcttctatggcctatcagtttatcttcagctgtgcacagacagatagaagccatcaacagag

SEQ ID NO: 8862 - protein, 83 aa, Homo sapiens
MKTLCTVTSNIMATLKDLALSLRLEGSGLHIPGSSNPPSLWLSFSEFQHSPCSFRIFLPAKSFLTPLHQAASQVSSSHPFPQL

SEQ ID NO: 8863 - DNA, 803 bp, Homo sapiens
agtggcatggcagagagaaatgctaattttgaagcccttcctgaggattggagagcaaggctgaagagaaggaaaatggctccaaacacatagtttttaagtttttaaaacttttttgtattattgtttgttttgtgttcagttcaaagtcttaaccagttttattgtcaaataaactataaatgttatgggggagatcttataaatttcctgggcaagagtgtatgcatacaaagttttcacttttgtgaaatgtaatttttctgtttttgcaaagggatgaggtgattggaattgtgtctgaagctttttctggcctcttttctctagtcggccacccctgaagtgctgaggtctaagtggtttacctcgtgctgatagatggccacactctttagagtagttctcataagttctagaactggtagctcggtcgtttcgcacactaggtggcatacaggcagcagcaggtgttcatatccttgattttgagaatttcccctcaagtatgtggcagtaaatacaacaagacactctatgtattaatgtctccattgtcttaaccctgttccaaaacaaaattcacctcctttctttatgtgaatgtattctccataaaattccagtatttaaaaagcagtttactgttctgtactttctgttgtatcacaatcaggtaaaagtcactttaaactgaggaaacggcaaattgtgttttaaagctctttgtatttctccagtttctgaccttgtaaatttgtatatatgcactaataaagctttttttataatcctgatgggtt

SEQ ID NO: 8864 - protein, 34 aa, Homo sapiens
MATLFRVVLISSRTGSSVVSHTRWHTGSSRCSYP

SEQ ID NO: 8865 - DNA, 1919 bp, Homo sapiens
agctcactaaaaaataaagtatgtgtaataattactgcaggtgcacattattcactcactccttcacttttgaaatagactccagactattaccttttatttgtgtatgttgaagcttgtgagtgtttgaaatcaaaaacttcaaactacagattcagatgactgcatttctcgttgagttgatgtaatattcttctactcatccataaatatggacccgaaggacaagtataatacagatggggaaggtgctatgaagttcataaatttatctttccgtggaagtcatttctgaactgagttgttcaatattttagcgatatcagtatagaatagatgcctgtgggccaaatttttttcaaggaaggagccattccctgctgtttgacaccacattctgtattgttttgtacactgtgctaggttcctataaatgattatcttactgaccagttgaacatttctatgaatataagccagggagtttttttcttgctttttccctgactcttacctgttttcataggttctctttgtaaagaatccttttctggtcaagtttcttcttcatcactcatgccacttactccattctggaccctccttcagtcaaatgttcctgtgcttcaacctccattacccttggaaatgccaccacccccacctccacctccagaatcacctccaccccctcctccaccaccaccagctcccaaaatgccaccacctgaaaagacaaaaaaaggaaggaaagacaaggcaaagaagagtaagaccaaaatgccatctttggtaaaaaagtggcagagtatccagcgtgagttagatgaagaggacaattctagttccagtgaagaggatcgggaatcaactgcacagaagcgaattgaagagtggaaacagcagcagctggttagtggcatggcagagagaaatgctaattttgaagcccttcctgaggattggagagcaaggctgaagagaaggaaaatggctccaaacacatagtttttaagtttttaaaacttttttgtattattgtttgttttgtgttcagttcaaagtcttaaccagttttattgtcaaataaactataaatgttatgggggagatcttataaatttcctgggcaagagtgtatgcatacaaagttttcacttttgtgaaatgtaatttttctgtttttgcaaagggatgaggtgattggaattgctttgaccatgctgcctttattctcaaactggcaaacttagcatgttaggtgtattaacctcatcagtcttgaagaacatgtggctcatgagtataacacttctgtagaggactccctgacaaaagtgaagaattaacttctcctccagaacaagtgcaattcagaaggcagctctgcattctaccttgcttgactggaattgtctgaagctttttctggcctcttttctctagtcggccacccctgaagtgctgaggtctaagtggtttacctcgtgctgatagatggccacactctttagagtagttctcataagttctagaactggtagctcggtcgtttcgcacactaggtggcatacaggcagcagcaggtgttcatatccttgattttgagaatttcccctcaagtatgtggcagtaaatacaacaagacactctatgtattaatgtctccattgtcttaaccctgttccaaaacaaaattcacctcctttctttatgtgaatgtattctccataaaattccagtatttaaaaagcagtttactgttctgtactttctgttgtatcacaatcaggtaaaagtcactttaaactgaggaaacggcaaattgtgttttaaagctctttgtatttctccagtttctgaccttgtaaatttgtatatatgcactaataaagctttttttataatcctgatgggtt

SEQ ID NO: 8866 - protein, 143 aa, Homo sapiens
MPLTPFWTLLQSNVPVLQPPLPLEMPPPPPPPPESPPPPPPPPPAPKMPPPEKTKKGRKDKAKKSKTKMPSLVKKWQSIQRELDEEDNSSSSEEDRESTAQKRIEEWKQQQLVSGMAERNANFEALPEDWRARLKRRKMAPNT

SEQ ID NO: 8867 - DNA, 4160 bp, Homo sapiens
gaagagccgaagggtccgaggcgcttgcgcaagcgcgtgctccgctggttgaaagcggatccgggctggaggcggtgtcacggtgtatgaatattgattacgcgtcgcagcgcccagggcccagcgcccagcctccagtgcccgcccctctcggccgcccgacgctctctgctcgcgcttgggctcgcgatggggaagaagtcccgggcggtacccggccgtaggcccatcctgcaactctctccgccgggtcctcggggcagcacgccgggccgggacccggagccggaacccgacactgagccggactcaaccgcggcggtccccagccagcccgccccgtcggcggcgacgaccaccaccaccgcggtgactgccgccgcggcctcggacgactcgccttcagaaggcaaggatgaacaggaagcggtgcaggaggttcctagagttgttcagaatcctccaaaaccagtcatgaccactagacccacagctgttaaagcaacaggcggtctatgcttgcttggtgcttatgctgacagtgatgacgatgacaatgatgtttccgaaaaactagcacaatccaaagagacaaatggaaaccagtcaactgatattgatagtacattggccaacttcctagcggagatcgatgccataacagctcctcagcctgcagctcctgtaggagcttctgctccacctccaactccacctcgaccagagccaaaggaagcagcaacatctaccctttcttcttctacttcaaatggaacagactccacccaaacatctggttggcaatatgatactcagtgttcactggcaggagtcggaattgagatgggcgattggcaggaagtctgggatgagaacacgggatgttattattattggaatacacaaacaaatgaagtgacttgggagttaccccaatatcttgccacacaggtacagggattacagcattaccagcccagttctgtgccaggtgctgaaactagttttgtggtaaatacagacatatattctaaggagaaaacgatttctgtttccagtagtaaaagtggaccagtcatagccaagcgagaagttaaaaaggaagtaaatgaaggaattcaggctctctcaaatagtgaggaggagaagaaaggggtggcagcatcgctgcttgctcctttattgcctgagggaataaaagaagaagaagagagatggagaagaaaagtaatttgtaaagaggagccagtttcagaagtaaaagaaacaagtacaacagtagaagaagcaacaacaatagtaaagccacaggaaattatgttggacaatatagaagacccttctcaggaggatctttgcagtgttgtccaatctggagaaagtgaggaggaagaggaacaagatacccttgaactggagctagttttggaaaggaaaaaagcagagttgcgagccttggaggaaggagatggtagtgtgtcagggtctagtccacgttctgatatcagccagccagcatctcaagatggaatgcgtaggcttatgtctaaaagaggaaaatggaagatgtttgttcgagctaccagtccagaatctaccagtaggagttctagtaaaactggacgagatactccagaaaatggagaaactgcaattggtgctgaaaattcagaaaaaatagatgagaattcagataaagagatggaagtagaagaatctccagagaaaataaaagtacagacaacaccaaaagtagaagaagaacaggatttgaaatttcagattggagaactggcaaataccctgacaagtaaattcgagtttctaggcattaatagacaatccatctccaactttcatgtgctgctcttacagactgagactcgaattgcagactggcgggaaggggctcttaatggaaactaccttaaacgaaaacttcaggatgcagcagaacaactaaaacagtatgaaataaacgccactcctaaaggctggtcctgccactgggacagggatcatagacggtatttctatgtaaacgaacagtcgggcgagtctcagtgggagtttccagatggtgaagaggaagaagaagaaagccaagcacaagaaaatagagatgagactcttgccaaacagaccttgaaagacaaaactggcactgattcaaattcaacagaatcctctgaaacttccacaggttctctttgtaaagaatccttttctggtcaagtttcttcttcatcactcatgccacttactccattctggaccctccttcagtcaaatgttcctgtgcttcaacctccattacccttggaaatgccaccacccccacctccacctccagaatcacctccaccccctcctccaccacctcctcctgcggaagatggtgagatccaggaggtagagatggaggatgagggaagtgaggagccccctgccccaggaacagaggaagatacccctttgaaaccttcagcacaaaccacagttgtaactagccagagttcagttgattccaccatctctagttcttcttccactaaaggaataaagaggaaagctacagaaattagcactgcagtggttcagaggtcagctaccattggcagttctccagttctctatagccagtcagctatagctacaggtcaccaggcagcagggattggaaaccaggcaacaggaattggacatcagacaataccagttagccttccagcagcaggaatgggtcatcaggccagaggaatgagcctgcagtcaaattaccttggactagcggcagcacctgcaattatgagttatgcagaatgttctgtcccaattggagtgactgctccctcattgcagccagttcaggcccgaggtgctgtgcctaccgctaccattatagaaccaccaccaccacctcctcctcctcctcctccaccaccaccagctcccaaaatgccaccacctgaaaagacaaaaaaaggaaggaaagacaaggcaaagaagagtaagaccaaaatgccatctttggtaaaaaagtggcagagtatccagcgtgagttagatgaagaggacaattctagttccagtgaagaggatcgggaatcaactgcacagaagcgaattgaagagtggaaacagcagcagctggttagtggcatggcagagagaaatgctaattttgaagcccttcctgaggattggagagcaaggctgaagagaaggaaaatggctccaaacacatagtttttaagtttttaaaacttttttgtattattgtttgttttgtgttcagttcaaagtcttaaccagttttattgtcaaataaactataaatgttatgggggagatcttataaatttcctgggcaagagtgtatgcatacaaagttttcacttttgtgaaatgtaatttttctgtttttgcaaagggatgaggtgattggaattgctttgaccatgctgcctttattctcaaactggcaaacttagcatgttaggtgtattaacctcatcagtcttgaagaacatgtggctcatgagtataacacttctgtagaggactccctgacaaaagtgaagaattaacttctcctccagaacaagtgcaattcagaaggcagctctgcattctaccttgcttgactggaattgtctgaagctttttctggcctcttttctctagtcggccacccctgaagtgctgaggtctaagtggtttacctcgtgctgatagatggccacactctttagagtagttctcataagttctagaactggtagctcggtcgtttcgcacactaggtggcatacaggcagcagcaggtgttcatatccttgattttgagaatttcccctcaagtatgtggcagtaaatacaacaagacactctatgtattaatgtctccattgtcttaaccctgttccaaaacaaaattcacctcctttctttatgtgaatgtattctccataaaattccagtatttaaaaagcagtttactgttctgtactttctgttgtatcacaatcaggtaaaagtcactttaaactgaggaaacggcaaattgtgttttaaagctctttgtatttctccagtttctgaccttgtaaatttgtatatatgcactaataaagctttttttataatcctgatgggtt

SEQ ID NO: 8868 - protein, 1019 aa, Homo sapiens
MGKKSRAVPGRRPILQLSPPGPRGSTPGRDPEPEPDTEPDSTAAVPSQPAPSAATTTTTAVTAAAASDDSPSEGKDEQEAVQEVPRVVQNPPKPVMTTRPTAVKATGGLCLLGAYADSDDDDNDVSEKLAQSKETNGNQSTDIDSTLANFLAEIDAITAPQPAAPVGASAPPPTPPRPEPKEAATSTLSSSTSNGTDSTQTSGWQYDTQCSLAGVGIEMGDWQEVWDENTGCYYYWNTQTNEVTWELPQYLATQVQGLQHYQPSSVPGAETSFVVNTDIYSKEKTISVSSSKSGPVIAKREVKKEVNEGIQALSNSEEEKKGVAASLLAPLLPEGIKEEEERWRRKVICKEEPVSEVKETSTTVEEATTIVKPQEIMLDNIEDPSQEDLCSVVQSGESEEEEEQDTLELELVLERKKAELRALEEGDGSVSGSSPRSDISQPASQDGMRRLMSKRGKWKMFVRATSPESTSRSSSKTGRDTPENGETAIGAENSEKIDENSDKEMEVEESPEKIKVQTTPKVEEEQDLKFQIGELANTLTSKFEFLGINRQSISNFHVLLLQTETRIADWREGALNGNYLKRKLQDAAEQLKQYEINATPKGWSCHWDRDHRRYFYVNEQSGESQWEFPDGEEEEEESQAQENRDETLAKQTLKDKTGTDSNSTESSETSTGSLCKESFSGQVSSSSLMPLTPFWTLLQSNVPVLQPPLPLEMPPPPPPPPESPPPPPPPPPPAEDGEIQEVEMEDEGSEEPPAPGTEEDTPLKPSAQTTVVTSQSSVDSTISSSSSTKGIKRKATEISTAVVQRSATIGSSPVLYSQSAIATGHQAAGIGNQATGIGHQTIPVSLPAAGMGHQARGMSLQSNYLGLAAAPAIMSYAECSVPIGVTAPSLQPVQARGAVPTATIIEPPPPPPPPPPPPPPAPKMPPPEKTKKGRKDKAKKSKTKMPSLVKKWQSIQRELDEEDNSSSSEEDRESTAQKRIEEWKQQQLVSGMAERNANFEALPEDWRARLKRRKMAPNT

SEQ ID NO: 8869 - DNA, 639 bp, Homo sapiens
gaaaccaggcaacaggaattggacatcagacaataccagttagccttccagcagcaggaatgggtcatcaggccagaggaatgagcctgcagtcaaattaccttggactagcggcagcacctgcaattatgagttatgcagaatgttctgtcccaattggagtgactgctccctcattgcagccagttcaggcccgaggtgctgtgcctaccgctaccattatagaaccaccaccaccacctcctcctcctcctcctccaccaccaccagctcggtcgtttcgcacactaggtggcatacaggcagcagcaggtgttcatatccttgattttgagaatttcccctcaagtatgtggcagtaaatacaacaagacactctatgtattaatgtctccattgtcttaaccctgttccaaaacaaaattcacctcctttctttatgtgaatgtattctccataaaattccagtatttaaaaagcagtttactgttctgtactttctgttgtatcacaatcaggtaaaagtcactttaaactgaggaaacggcaaattgtgttttaaagctctttgtatttctccagtttctgaccttgtaaatttgtatatatgcactaataaagctttttttataatcctga

SEQ ID NO: 8870 - protein, 100 aa, Homo sapiens
MGHQARGMSLQSNYLGLAAAPAIMSYAECSVPIGVTAPSLQPVQARGAVPTATIIEPPPPPPPPPPPPPPARSFRTLGGIQAAAGVHILDFENFPSSMWQ

SEQ ID NO: 8871 - DNA, 3653 bp, Homo sapiens
tggagtatttttattatttattttcatgtgagatgggtaatgtgctgacctcataacaaagtttgagggagacacattgtatgtgagaatttgaagtgcttatgaagtacaaaagcagaggccaggtgctcacatctgtaatcccagcactttgggaggccaaggcacacagatcacttgaggtcaggagtttgagaccagcctggccaacatggcgaaaacccctctcttactaaaaatacaaaaattagctggatgtggtggtgtgggcctgtaatcccagctactcgcgaggctgaggcaggagaatcgcttgaacctggcaggcagaggttgcggtgagccaagattgcgtcactgcactccggcgtggacaagagagtgagactccgtcacaaaaaaaaaaaaaaaagaagaaaagtattggattcacatattctaaaaatgctcgtcatttgtggctaattttatcaagtctagtttaatctcatatttacagagtttagttaattctaattagctttgttggaggtcataaaccacattattaaccttgaaccgactctgtgtttacttgagttcctctgcataatagcatgtcaccaccatcataaacatgttggtattgcattatgcttctagaggagacatccaccaatatttgaaaatctggctggtccgagtgcagtggtgtttacaactaattaatcacaaccagttacagactttgtttcttctccagtcctgctgcttcacttgactagccttttaaaaaaaagaaagaaaatagagaaaatcttaacttatatttacttactgtatgttgtgattagtttaatagaagggagtttaatccttaataattaagttagtcctcaacgtttattgacttagttctgatgtagtccttgtgtactattgtataatgtagactacttggccatacttgattttgtctaaaagttaatgcataaattaatattaaatatggccaaatataaaagtttaatgagtcatttgaggtcatttagccagaaaactgcatttatgttcctggtgaatttttttcaatgtccttttccaaaagtggcagtaagcagctgtcttaaaataaggagacagtgggaatgatgttgttaaagtcttttatacaatgtattgtctgtctgttccataaaaagtaaaactactctattcgtgaccagcttgggcaacatagtgagactgtctctttaaaaaaaaaaaaaaaaaaaaaattaaaaattagcaggtgtggtgatgcacacctgtagtcctagcaattcgggaagctgaggtaggaagatcgcttgagccaagtgtttgaggttagaatgagctatgatcgcaccacctacactccagcctgggcaacagagcaagacccaaatggctcatggttgctttgtttgttttaccttgttgagtgccagtgtgtattttgagcaaagcagtgtaaatggccttcttgccctagagtctttcataattgagccttatttaatctaccacttttgaccatgaaatttaacaggtgacttcttctgggtatctactccaggtgaagtgatattttttttgactgagatgtctaaagctcttggattcctggtatctcaccaggacatcttagtaaaacagcaagtatcagatgaggaatcagacttgagttctagctctggtctggccactaacattgatatgatcttgggcaagttagttcctgcctgggtttcattacctttaactgaggaggttgaaatagatgatttctcatgtctcttctactcctaaattctatgattttagggagaaaatccccttcaacattcctgggatatatatctaatagtcccatatattgtgaaacttccctattgacgataaagagggctggggaaggctacaagtaagtatatcctattttctctaatctttaaaggttttcccagcagagaaaagacagtaatcaatgatggcttttacaaagtttgaggaaagctgatcctgcaacttttcagctgcaatttcgtaatgtagacttcagcaacagcaatttcaaaaccactgcagttttaaaaaatctgagttatatactttgaagatttatcttcctaaatttctcttttatcgcaaaagtaaaaattgccatccctaacttgtgtctctgtgatatcacaaatgaatgtaatgtatgcaagggtgtgaaggaatgatatagttgacagtagcaccttgcaaatggattttttaaatttagtaacccaaattaaacacaatgggtagaactttcccgagtattttgaatgaatattctgggttgtctttactcactttgtctagctcactaaaaaataaagtatgtgtaataattactgcaggtgcacattattcactcactccttcacttttgaaatagactccagactattaccttttatttgtgtatgttgaagcttgtgagtgtttgaaatcaaaaacttcaaactacagattcagatgactgcatttctcgttgagttgatgtaatattcttctactcatccataaatatggacccgaaggacaagtataatacagatggggaaggtgctatgaagttcataaatttatctttccgtggaagtcatttctgaactgagttgttcaatattttagcgatatcagtatagaatagatgcctgtgggccaaatttttttcaaggaaggagccattccctgctgtttgacaccacattctgtattgttttgtacactgtgctaggttcctataaatgattatcttactgaccagttgaacatttctatgaatataagccagggagtttttttcttgctttttccctgactcttacctgttttcataggttctctttgtaaagaatccttttctggtcaagtttcttcttcatcactcatgccacttactccattctggaccctccttcagtcaaatgttcctgtgcttcaacctccattacccttggaaatgccaccacccccacctccacctccagaatcacctccaccccctcctccaccacctcctcctgcggaagatggtgagatccaggaggtagagatggaggatgagggaagtgaggagccccctgccccaggaacagaggaagatacccctttgaaaccttcagcacaaaccacagttgtaactagccagagttcagttgattccaccatctctagttcttcttccactaaaggaataaagaggaaagctacagaaattagcactgcagtggttcagaggtcagctaccattggcagttctccagttctctatagccagtcagctatagctacaggtcaccaggcagcagggattggaaaccaggcaacaggaattggacatcagacaataccagttagccttccagcagcaggaatgggtcatcaggccagaggaatgagcctgcagtcaaattaccttggactagcggcagcacctgcaattatgagttatgcagaatgttctgtcccaattggagtgactgctccctcattgcagccagttcaggcccgaggtgctgtgcctaccgctaccattatagaaccaccaccaccacctcctcctcctcctcctccaccaccaccagctcccaaaatgccaccacctg

SEQ ID NO: 8872 - protein, 238 aa, Homo sapiens
MPLTPFWTLLQSNVPVLQPPLPLEMPPPPPPPPESPPPPPPPPPPAEDGEIQEVEMEDEGSEEPPAPGTEEDTPLKPSAQTTVVTSQSSVDSTISSSSSTKGIKRKATEISTAVVQRSATIGSSPVLYSQSAIATGHQAAGIGNQATGIGHQTIPVSLPAAGMGHQARGMSLQSNYLGLAAAPAIMSYAECSVPIGVTAPSLQPVQARGAVPTATIIEPPPPPPPPPPPPPPAPKMPP

SEQ ID NO: 8873 - DNA, 2777 bp, Homo sapiens
gacgctctctgctcgcgcttgggctcgcgatggggaagaagtcccgggcggtacccggccgtaggcccatcctgcaactctctccgccgggtcctcggggcagcacgccgggccgggacccggagccggaacccgacactgagccggactcaaccgcggcggtccccagccagcccgccccgtcggcggcgacgaccaccaccaccgcggtgactgccgccgcggcctcggacgactcgccttcagaaggcaaggatgaacaggaagcggtgcaggaggttcctagagttgttcagaatcctccaaaaccagtcatgaccactagacccacagctgttaaagcaacaggagatcgatgccataacagctcctcagcctgcagctcctgtaggagcttctgctccacctccaactccacctcgaccagagccaaaggaagcagcaacatctaccctttcttcttctacttcaaatggaacagactccacccaaacatctggttggcaatatgatactcagtgttcactggcaggagtcggaattgagatgggcgattggcaggaagtctgggatgagaacacgggatgttattattattggaatacacaaacaaatgaagtgacttgggagttaccccaatatcttgccacacaggtacagggattacagcattaccagcccagttctgtgccaggtgctgaaactagttttgtggtaaatacagacatatattctaaggagaaaacgatttctgtttccagtagtaaaagtggaccagtcatagccaagcgagaagttaaaaaggaagtaaatgaaggaattcaggctctctcaaatagtgaggaggagaagaaaggggtggcagcatcgctgcttgctcctttattgcctgagggaataaaagaagaagaagagagatggagaagaaaagtaatttgtaaagaggagccagtttcagaagtaaaagaaacaagtacaacagtagaagaagcaacaacaatagtaaagccacaggaaattatgttggacaatatagaagacccttctcaggaggatctttgcagtgttgtccaatctggagaaagtgaggaggaagaggaacaagatacccttgaactggagctagttttggaaaggaaaaaagcagagttgcgagccttggaggaaggagatggtagtgtgtcagggtctagtccacgttctgatatcagccagccagcatctcaagatggaatgcgtaggcttatgtctaaaagaggaaaatggaagatgtttgttcgagctaccagtccagaatctaccagtaggagttctagtaaaactggacgagatactccagaaaatggagaaactgcaattggtgctgaaaattcagaaaaaatagatgagaattcagataaagagatggaagtagaagaatctccagagaaaataaaagtacagacaacaccaaaagtagaagaagaacaggatttgaaatttcagattggagaactggcaaataccctgacaagtaaattcgagtttctaggcattaatagacaatccatctccaactttcatgtgctgctcttacagactgagactcgaattgcagactggcgggaaggggctcttaatggaaactaccttaaacgaaaacttcaggatgcagcagaacaactaaaacagtatgaaataaacgccactcctaaaggctggtcctgccactgggacaggacctctggaagcaactactcctgattaacctcggtgaagttaaggaaaacttcgtggctgaagatgtgaatgaagaacaagattactatcctctgccagcagggatcatagacggtatttctatgtaaacgaacagtcgggcgagtctcagtgggagtttccagatggtgaagaggaagaagaagaaagccaagcacaagaaaatagagatgagactcttgccaaacagaccttgaaagacaaaactggcactgattcaaattcaacagaatcctctgaaacttccacaggttctctttgtaaagaatccttttctggtcaagtttcttcttcatcactcatgccacttactccattctggaccctccttcagtcaaatgttcctgtgcttcaacctccattacccttggaaatgccaccacccccacctccacctccagaatcacctccaccccctcctccaccacctcctcctgcggaagatggtgagatccaggaggtagagatggaggatgagggaagtgaggagccccctgccccaggaacagaggaagatacccctttgaaaccttcagcacaaaccacagttgtaactagccagagttcagttgattccaccatctctagttcttcttccactaaaggaataaagaggaaagctacagaaattagcactgcagtggttcagaggtcagctaccattggcagttctccagttctctatagccagtcagctatagctacaggtcaccaggcagcagggattggaaaccaggcaacaggaattggacatcagacaataccagttagccttccagcagcaggaatgggtcatcaggccagaggaatgagcctgcagtcaaattaccttggactagcggcagcacctgcaattatgagttatgcagaatgttctgtcccaattggagtgactgctccctcattgcagccagttcaggcccgaggtgctgtgcctaccgctaccattatagaaccaccaccaccacctcctcctcctcctcctccaccaccaccagctcccaaaatgccaccacctg

SEQ ID NO: 8874 - protein, 398 aa, Homo sapiens
MGDWQEVWDENTGCYYYWNTQTNEVTWELPQYLATQVQGLQHYQPSSVPGAETSFVVNTDIYSKEKTISVSSSKSGPVIAKREVKKEVNEGIQALSNSEEEKKGVAASLLAPLLPEGIKEEEERWRRKVICKEEPVSEVKETSTTVEEATTIVKPQEIMLDNIEDPSQEDLCSVVQSGESEEEEEQDTLELELVLERKKAELRALEEGDGSVSGSSPRSDISQPASQDGMRRLMSKRGKWKMFVRATSPESTSRSSSKTGRDTPENGETAIGAENSEKIDENSDKEMEVEESPEKIKVQTTPKVEEEQDLKFQIGELANTLTSKFEFLGINRQSISNFHVLLLQTETRIADWREGALNGNYLKRKLQDAAEQLKQYEINATPKGWSCHWDRTSGSNYS

SEQ ID NO: 8875 - DNA, 3447 bp, Homo sapiens
gcaagcacaaagtttggccagccacacattggagaaacaaaagcaatgtttaaagtgttccatgtaacggattttttcccaagatatggacaaagctggtttttactctccagagtgttgcacggagtagggcgggcttgggggttaagcgcatgcgagagctctgtgcgctttacaggacctctggaagcaactactcctgattaacctcggtgaagttaaggaaaacttcgtggctgaagatgtgaatgaagaacaagattactatcctctgccagcagctcccagatcctctccctctctttagctttcactgtgtttgatatcaagaatatgaaatgtgaattccacggtccaagaggggaagagtcacctttcacaaacttcgttgttctcttctttggaagggaaattagtgttctaggcgattgagtcccttcattaatgaaacttgaaaccctgttatgcattggcaaatcacaaaaaaagagaaaagtgttttctaagtctcatctgttggagtgagagggttcagggctgtattcacagagttgctggcagtgcaaatagctttgaattatccttggttctccattctcaattgtcaaagctctttgttgcctttgtgaatagcagtccattaagaggttcgtccctgtgaaagcagactgctgtcctgggacaggaccaaatggaagtgtctttgtaggagaacgggttttaaaacatgtgttttctttcttgtaatttagggatcatagacggtatttctatgtaaacgaacagtcgggcgagtctcagtgggagtttccagatggtgaagaggaagaagaagaaagccaagcacaagaaaatagagatgagactcttgccaaacagaccttgaaagacaaaactggcactgattcaaattcaacagaatcctctgaaacttccacaggtgagacaatttaccttgtactaattcagccaaaatgactttagaggaaaaatcttattaatttacattattaaaagattttatgtcataataatataagcttctgattgagaatagtggtgtgaactaaaacaaggaatgcatgagttattatggttggaaatcagcatactattgttatcacgtgtaaaactgtgccccaaagtgaaaagataggctaacagattttgattttaaaaaattgttttataaccattctatcatgccactgactaagctgtgggtctccaaaaataggaatgcttgtgctgaggaactagatagttgaactgtcaatatatgtggcatgctgagatttgttatacatttctatacaacacttagtctgttcatattgcaacctcatttctcacctccactaatcttacaaaaagcgtggttggtacaaatcaaaatgatatgaagaaatgccattagtacttgtttcagagaagcaaaataattgatcatgaaaaatcaccagcaatcttctggtctaaaacaattggcaataggatgtctcattccatttttaaggtactcttggaagaatttagtttagttacatacattttttaaaagataggctttcatgctcctcagttcctttagtttttaaaaagtttccaatgtgtaaagaaacttccacctgttaatcttaagaattggtagctatttgttaaactgatggcatatgaaggcaagagtctatgagtcgtttctaaagtaatagatctttgaaaattttaaaaagtgaaatttgtcaataacagagttaagagctgaattcttttgtctaaaacttatcgaaattgatgcttgtactctactggctccctgatgatagtagaaaagcactagtaatgtaccaaatgaaactggttgtgtaccagatgattttgttaacttcttaaatagcctagaaatcgtcagcaggtcacatacaactgcagtgataatttcagaacatagcaaaaggctgattttattctacttcacattttagaagtgcattttctcaagttacagggcatttcacttcccttttacatgaagagattttcttttgaatatttttcctctcttttggtagcagtgatagacatgactaataatatattggttctttttgtttgctttttagcagttaatgaactgaagaggcttgatcgtagttctggataggtggctccactcctgaccactgtcaacatcccttatatgttccaaagttgaaaattccactgttaccaattctgaatgttctgtgaacactttagatgagtattaagctgttttctccctttatgacacacatagttgatactgtctggtaaaaggaggctcttgagccattcctatttaattaaaacagaactagttgtagtgtaggaaaaagccactgataaaacaggttatattcttaagcctctctttattgagaacccctagaattgcaggataaacttgatcgaagtaaaatccaaatcttaaactaagttctgtgagatttaagagcaataatcaacagttctaagcctaataaagagagctcttaatcagctcagtggtggttaaaaccagctatcttttaaagaagagaaaaaacaaaacacagcaatgccctgtctcttcagaaaattgttttaaaaagttagccaggcatagttagtggcccacgcctgtagtccgagctgtttgggaggttgaggtgggaagattggttgagcccaagattttgaggctgcagtaagccataattgtaccactgcactccagcctgagcgacagagaacaagaccctgtctcaaaaataaagtgggggaaggggtgcaaaattacactgtgagaagccaagaagtttcaaagttctatttatttttctaagtcatttttaatcattatttgttgtttcagtgtttgaatttaacattatgtttttaaagatggagtggattctaaagatgagttgggttcaagatatccaacatatcttttatattgggcttatgtcacttaggtgaagttgagctcctttttctttttaatctccatggaacaatttgtataatttcttgatttaaattgctaaactgagctcttcattcaaaatactaaacaataatttctctttggggggaaaattaaggaaggctttctatacatagaaataaagatgcctaggccgggtgcagtggctcatgcctgtaatcccaatactttggggggctgaggcgggtggatcacctgaggtcaagagttcaagaccagcctgggcaacatggtgaaaccctgcctctactaaaagtacaaaaattagctgggcgtggtggcagctgcctgtaatcccagctactcggaggctgaggcacgagaatcacttgaacctgggaggcgaaggttgcagtgaaccaagatcatgccattgcactccagcctgggcgacagagcaaaactctttatctaaa

SEQ ID NO: 8876 - protein, 53 aa, Homo sapiens [sequence omitted]

SEQ ID NO: 8877 - DNA, 1800 bp, Homo sapiens
cggccgcccgacgctctctgctcgcgcttgggctcgcgatggggaagaagtcccgggcggtacccggccgtaggcccatcctgcaactctctccgccgggtcctcggggcagcacgccgggccgggacccggagccggaacccgacactgagccggactcaaccgcggcggtccccagccagcccgccccgtcggcggcgacgaccaccaccaccgcggtgactgccgccgcggcctcggacgactcgccttcagaaggcaaggatgaacaggaagcggtgcaggaggttcctagagttgttcagaatcctccaaaaccagtcatgaccactagacccacagctgttaaagcaacaggcggtctatgcttgcttggtgcttatgctgacagtgatgacgatgacaatgatgtttccgaaaaactagcacaatccaaagagacaaatggaaaccagtcaactgatattgatagtacattggccaacttcctagcggagatcgatgccataacagctcctcagcctgcagctcctgtaggagcttctgctccacctccaactccacctcgaccagagccaaaggaagcagcaacatctaccctttcttcttctacttcaaatggaacagactccacccaaacatctggttggcaatatgatactcagtgttcactggcaggaggaagtaaatgaaggaattcaggctctctcaaatagtgaggaggagaagaaaggggtggcagcatcgctgcttgctcctttattgcctgagggaataaaagaagaagaagagagatggagaagaaaagtaatttgtaaagaggagccagtttcagaagtaaaagaaacaagtacaacagtagaagaagcaacaacaatagtaaagccacaggaaattatgttggacaatatagaagacccttctcaggaggatctttgcagtgttgtccaatctggagaaagtgaggaggaagaggaacaagatacccttgaactggagctagttttggaaaggaaaaaagtaagcttttgaaagttacttgtagaatgttttttcctcagtactactctacagggatcattgtgcttgacttacaaccattattgggattttgtttttcttatcccatcatctaggtatgttgaagcttatgcagcaaaaactttaaactacagaggtgtaggttttttggtccttgatgatacttttggtagttatcgggggaactcacccccaatatttcaacctaggttctttctattttccataagtgtcggccagctgagaaatagaaagagtataatgagaggaattttacagctgggccgccgggggtgacatcacatatcggtaggactatgatgcccacccgagcctcaaaccagcaagttttttattaagggtttcaaaaggggaggaggtgtaagaacagggagtagatcatgtgcttcaaagggcaaaaaggtactgataagggtctatgttcagcggtgcacatgttgtcttgataaacatcttaaacaacagaaaacagggttcaagagcagagaatcagtctgaccacagacttaccagggccgggtttttccccaccctaataagcctgagggtacttcaggagaccagggcgtatctcagtccttatctcaaccgcataggacagacattcccagagcggcagtttatagacctacccccaggaatgcattccttccccaggatattaatattaatattccttgctaggaaaagaatttagcgatatcttccctacttgcatgtccatttatgggctctatg

SEQ ID NO: 8878 - protein, 217 aa, Homo sapiens
MGKKSRAVPGRRPILQLSPPGPRGSTPGRDPEPEPDTEPDSTAAVPSQPAPSAATTTTTAVTAAAASDDSPSEGKDEQEAVQEVPRVVQNPPKPVMTTRPTAVKATGGLCLLGAYADSDDDDNDVSEKLAQSKETNGNQSTDIDSTLANFLAEIDAITAPQPAAPVGASAPPPTPPRPEPKEAATSTLSSSTSNGTDSTQTSGWQYDTQCSLAGGSK

SEQ ID NO: 8879 - DNA, 5457 bp, Homo sapiens
actggaaggttcccgcagatagagtctgcctcccctgcccccttctcttctggattcctcgctgcccaccctcattctcccggtggaagcctcgcaacgaagggccggagccgcctttctgctcccggaatgcttcacctgtccgcagctccgcccgccccacccccggaagtgacggcgaccgcgcggccctgcctttgttccgttgggcgtcgcggcgacggcgggaagatggcggcggcgggagccctggaacggagcttcgtggagctaagcggagctgagcgcgaaaggccgaggcactttcgggaattcacagtctgcagcattgggactgcaaatgccgtggctggcgccgtaaaatacagtgaaagcgcgggaggcttttactacgtggagagtggcaagttgttctccgtaaccagaaacaggttcattcattggaagacctctggagatacattggagctgatggaggagtcactggacataaatctgttgaataatgccattcgcctaaaattccaaaattgcagtgttttacctggaggggtttatgtctctgagactcagaatcgtgtgataatcttgatgttaaccaatcaaacagtgcacaggttacttttaccacacccctcccggatgtataggagtgagttggtagttgacagtcagatgcagtcaatattcactgacattggaaaagttgatttcacagatccttgcaactatcagttaattccagcagtacctggaatatctcctaattccaccgcctctacagcctggctcagcagtgatggggaggccctgtttgccttaccatgtgcttctgggggaatctttgttcttaagctacctccttatgacatacctggtatggtgtcagtcgtggaactgaaacagagttcagtaatgcaacgattgcttacaggctggatgccaacagctatcaggggtgaccagtcgccttcagatcgtcccctcagtcttgctgttcattgtgtggagcatgatgccttcatctttgctttgtgtcaggatcataaactacgaatgtggtcttacaaggagcaaatgtgcctaatggtagctgacatgctggagtatgtccctgtgaagaaagaccttcggcttactgctggaactggacacaaattacggcttgcttattcccccaccatgggactctacctggggatatacatgcatgcaccaaaacgaggacagttctgcattttccagttggtgagcactgagagtaatcgctatagtctcgatcatatttcttcactgttcacttctcaggagacactgattgactttgccttaacttccacggatatctgggccctgtggcatgatgctgagaaccaaacagtagtgaaatacatcaactttgaacataatgttgcaggtcagtggaatccagtttttatgcagcctctgccagaggaagagattgtcatcagagatgatcaagaccccagagagatgtatctgcaaagtctttttacaccaggacaattcacaaatgaagctttatgtaaggctttacagattttctgccgaggaactgagaggaatttggatctttcctggagtgaactgaagaaagaagttactttagctgttgaaaatgagcttcaaggaagtgtaacagagtatgaattctcccaggaggagtttcgaaatttacaacaagaattctggtgcaagttctatgcctgttgtcttcagtatcaagaagccctctctcaccctcttgccctacatttgaatccacacacaaacatggtgtgcctgctgaaaaaagggtacctgtctttccttattccctcatccttagtggatcatttgtatctcctgccttatgagaaccttttgacagaagatgagacaaccatatctgatgatgtggacatcgctcgggatgtcatatgtcttataaaatgcctccggctgattgaagagtcagtaactgtggatatgtcagttataatggaaatgagttgttataacctacagtctccggaaaaggctgcagagcagattctggaagatatgatcactattgatgtagaaaatgtgatggaggatatttgtagtaaactgcaagagattaggaacccaatccatgcaattggactacttatacgggaaatggattatgaaacagaagtggaaatggaaaagggattcaatccagctcagcctttgaatattcgaatgaatcttacccagctctatggtagtaacacagcagggtatattgtgtgcagaggggtgcataaaatcgccagtactcgtttcctgatctgcagagatcttttgatcttacagcagctgttaatgaggcttggagatgctgtgatttggggaactggtcagctctttcaagctcagcaagacctactacatcgaacagctcccctactcttatcttattacctcattaaatggggaagtgagtgcttggcaactgatgttccacttgacacactggagtctaatctccaacacttatcagtactggaattaacagactctggtgctttaatggcaaataggtttgtatctagtcctcagactattgtggagttattcttccaagaagttgcaagaaaacacattatatctcacctcttctctcagccaaaggcacctctgagccaaactggattgaattggcctgaaatgattactgcaattaccagttatttattgcagcttttatggcctagcaatcctggttgtctctttctagaatgtttgatgggaaattgccaatatgtacaattgcaggattatattcaactgctacatccctggtgtcaagtcaatgttggttcctgtcgatttatgctgggaaggtgttacctagttacaggagaaggacagaaggctctggaatgtttttgtcaggcagcatctgaagtaggcaaagaggaattcttggatcgcttgattcgctcagaggatggggagatcgtgtctacccccaggctgcagtattatgacaaggttttacgactactagatgtcattggtttgcctgaactggttattcagttggctacatcagccataactgaagcaggtgatgactggaaaagtcaggctactctaaggacatgtattttcaaacatcatttggatttgggtcacaatagccaagcatatgaagccttaacccaaattcctgattccagcaggcaattagattgtttacggcagttggtggtagttctttgtgaacgctcacagctacaggatcttgtagagtttccctatgtgaatctgcataatgaggttgtgggaataattgagtcacgtgctagagctgtggaccttatgactcacaattactatgaacttctgtatgcctttcacatctatcgccacaattaccgcaaggctggcacagtgatgtttgagtatggaatgcggcttggcagagaagttcgaactctccggggacttgagaaacaaggcaactgttatctggctgctctcaattgtttacgacttattcgtccagaatatgcgtggattgtgcagccagtgtctggtgcagtgtatgatcgccctggagcatcccctaagaggaatcatgatggagaatgcacagctgcccccacaaatcgacaaattgaaatcctggaactggaagatctggagaaagagtgttccttggctcgcatccgcctcactttggctcagcatgatccatcagcggttgcagttgctggaagttcatcagcagaggaaatggtcactctcttggttcaggcgggcctctttgacactgccatatcactctgtcagacttttaagcttcccttaacgccagtctttgaagggcttgccttcaaatgcatcaaattgcaatttggaggagaggcagcacaagcagaagcctgggcctggctagcagccaatcagctctcatctgtcatcactactaaggagtctagtgctacagatgaagcatggcgactattatccacttacctggagaggtacaaagtccagaataacttgtatcaccactgtgtaatcaacaagctcttgtctcatggagtgcctctgcctaattggcttataaacagttacaagaaggttgatgctgctgaattgcttcgtttatacttaaactatgaccttttagaagaagctgtggatttggtgtcagaatatgtggatgctgtattgggaaaaggacatcaatacttcggaattgagtttccactgtccgcaacagccccaatggtgtggcttccatactcctctattgatcagcttctccaagctctgggagagaacagtgccaacagtcacaacatcgcactgtcccagaaaatacttgacaaattggaggactaccagcaaaaagttgataaggcaacacgggatttattatatcgtcggaccttgtgatttggattgtcacctagcctttgtaaccgcttggtgcctcttaggacttaagactaccctacaggaaccctgtactcaaggccgatttttgtaactgtaaatgatgtgtacaacattcaagtctgcattctgcacaagataggagggcggaagagtcagaggaccctgtgcttgctggtggtgctaacacaatttctggtgttcaaccttggtctcaaatagctgcttttgtatatgattcacgagcttttttagagtttatatttttttaaactaccgaagacattcattatctgcaaattaagactcaccttcactttccaaaatagctgagggttgttggcttgttgtagctgaccaccaaaagcagtcactgcaaatcttttaattcttccctatcaccttttgtattttaatgcaattattttggtccagaactgacctgtattttctgtattgtacacaaaagctaataattttgtgtactttttatttattttggaggttttatatgatcttcaattgagtattaaataatttgcctagattaagcctaaaatgatgaccagctaattaaagaagatattttgaatctggttctgagctaaagttgagtaaattcttagctaagaaaaaattggaaatccatcatctatattagcaacagattctcagagtaaattgttaacttctatgatttatgataatcaagctggacttgatcatacaagttagtctcataatgtattggaccaaaatgtaaacttcattggtcagatttagaagcattcatgctcacaagttttgggaaagtgaaaaataataaaatcatcttggattttattctgtatattaaaatttatcttttaaggaaacaatctgtatactacttgcttgtatagccttttgacccttcttgagtttttcagaagcctttaatttttatactttcaataccatatttacattatatactttaattaacaatgtgagtttctctgtggtactgttgttgat

SEQ ID NO: 8880 - protein, 1436 aa, Homo sapiens; identical to SEQ ID NO: 1352

SEQ ID NO: 8881 - DNA, 5182 bp, Homo sapiens
actggaaggttcccgcagatagagtctgcctcccctgcccccttctcttctggattcctcgctgcccaccctcattctcccggtggaagcctcgcaacgaagggccggagccgcctttctgctcccggaatgcttcacctgtccgcagctccgcccgccccacccccggaagtgacggcgaccgcgcggccctgcctttgttccgttgggcgtcgcggcgacggcgggaagatggcggcggcgggagccctggaacggagcttcgtggagctaagcggagctgagcgcgaaaggccgaggcactttcgggaattcacagtctgcagcattgggactgcaaatgccgtggctggcgccgtaaaatacagtgaaagcgcgggaggcttttactacgtggagagtggcaagttgttctccgtaaccagaaacaggttcattcattggaagacctctggagatacattggagctgatggaggagtcactggacataaatctgttgaataatgccattcgcctaaaattccaaaattgcagtgttttacctggaggggtttatgtctctgagactcagaatcgtgtgataatcttgatgttaaccaatcaaacagtgcacaggttacttttaccacacccctcccggatgtataggagtgagttggtagttgacagtcagatgcagtcaatattcactgacattggaaaagttgatttcacagatccttgcaactatcagttaattccagcagtacctggaatatctcctaattccaccgcctctacagcctggctcagcagtgatggggaggccctgtttgccttaccatgtgcttctgggggaatctttgttcttaagctacctccttatgacatacctggtatggtgtcagtcgtggaactgaaacagagttcagtaatgcaacgattgcttacaggctggatgccaacagctatcaggggtgaccagtcgccttcagatcgtcccctcagtcttgctgttcattgtgtggagcatgatgccttcatctttgctttgtgtcaggatcataaactacgaatgtggtcttacaaggagcaaatgtgcctaatggtagctgacatgctggagtatgtccctgtgaagaaagaccttcggcttactgctggaactggacacaaattacggcttgcttattcccccaccatgggactctacctggggatatacatgcatgcaccaaaacgaggacagttctgcattttccagttggtgagcactgagagtaatcgctatagtctcgatcatatttcttcactgttcacttctcaggagacactgattgactttgccttaacttccacggatatctgggccctgtggcatgatgctgagaaccaaacagtagtgaaatacatcaactttgaacataatgttgcaggtcagtggaatccagtttttatgcagcctctgccagaggaagagattgtcatcagagatgatcaagaccccagagagatgtatctgcaaagtctttttacaccaggacaattcacaaatgaagctttatgtaaggctttacagattttctgccgaggaactgagaggaatttggatctttcctggagtgaactgaagaaagaagttactttagctgttgaaaatgagcttcaaggaagtgtaacagagtatgaattctcccaggaggagtttcgaaatttacaacaagaattctggtgcaagttctatgcctgttgtcttcagtatcaagaagccctctctcaccctcttgccctacatttgaatccacacacaaacatggtgtgcctgctgaaaaaagggtacctgtctttccttattccctcatccttagtggatcatttgtatctcctgccttatgagaaccttttgacagaagatgagacaaccatatctgatgatgtggacatcgctcgggatgtcatatgtcttataaaatgcctccggctgattgaagagtcagtaactgtggatatgtcagttataatggaaatgagttgttataacctacagtctccggaaaaggctgcagagcagattctggaagatatgatcactattgatgtagaaaatgtgatggaggatatttgtagtaaactgcaagagattaggaacccaatccatgcaattggactacttatacgggaaatggattatgaaacagaagtggaaatggaaaagggattcaatccagctcagcctttgaatattcgaatgaatcttacccagctctatggtagtaacacagcagggtatattgtgtgcagaggggtgcataaaatcgccagtactcgtttcctgatctgcagagatcttttgatcttacagcagctgttaatgaggcttggagatgctgtgatttggggaactggtcagctctttcaagctcagcaagacctactacatcgaacagctcccctactcttatcttattacctcattaaatggggaagtgagtgcttggcaactgatgttccacttgacacactggagtctaatctccaacacttatcagtactggaattaacagactctggtgctttaatggcaaataggtttgtatctagtcctcagactattgtggagttattcttccaagaagttgcaagaaaacacattatatctcacctcttctctcagccaaaggcacctctgagccaaactggattgaattggcctgaaatgattactgcaattaccagttatttattgcagcttttatggcctagcaatcctggttgtctctttctagaatgtttgatgggaaattgccaatatgtacaattgcaggattatattcaactgctacatccctggtgtcaagtcaatgttggttcctgtcgatttatgctgggaaggtgttacctagttacaggagaaggacagaaggctctggaatgtttttgtcaggcagcatctgaagtaggcaaagaggaattcttggatcgcttgattcgctcagaggatggggagatcgtgtctacccccaggctgcagtattatgacaaggttttacgactactagatgtcattggtttgcctgaactggttattcagttggctacatcagccataactgaagcaggtgatgactggaaaagtcaggctactctaaggacatgtattttcaaacatcatttggatttgggtcacaatagccaagcatatgaagccttaacccaaattcctgattccagcaggcaattagattgtttacggcagttggtggtagttctttgtgaacgctcacagctacaggatcttgtagagtttccctatgtgaatctgcataatgaggttgtgggaataattgagtcacgtgctagagctgtggaccttatgactcacaattactatgaacttctgtatgcctttcacatctatcgccacaattaccgcaaggctggcacagtgatgtttgagtatggaatgcggcttggcagagaagttcgaactctccggggacttgagaaacaaggcaactgttatctggctgctctcaattgtttacgacttattcgtccagaatatgcgtggattgtgcagccagtgtctggtgcagtgtatgatcgccctggagcatcccctaagaggaatcatgatggagaatgcacagctgcccccacaaatcgacaaattgaaatcctggaactggaagatctggagaaagagtgttccttggctcgcatccgcctcactttggctcagcatgatccatcagcggttgcagttgctggaagttcatcagcagaggaaatggtcactctcttggttcaggcgggcctctttgacactgccatatcactctgtcagacttttaagcttcccttaacgccagtctttgaagggcttgccttcaaatgcatcaaattgcaatttggaggagaggcagcacaagcagaagcctgggcctggctagcagccaatcagctctcatctgtcatcactactaaggagtctagtgctacagatgaagcatggcgactattatccacttacctggagaggtacaaagtccagaataacttgtatcaccactgtgtaatcaacaagctcttgtctcatggagtgcctctgcctaattggcttataaacagttacaaggactaccagcaaaaagttgataaggcaacacgggatttattatatcgtcggaccttgtgatttggattgtcacctagcctttgtaaccgcttggtgcctcttaggacttaagactaccctacaggaaccctgtactcaaggccgatttttgtaactgtaaatgatgtgtacaacattcaagtctgcattctgcacaagataggagggcggaagagtcagaggaccctgtgcttgctggtggtgctaacacaatttctggtgttcaaccttggtctcaaatagctgcttttgtatatgattcacgagcttttttagagtttatatttttttaaactaccgaagacattcattatctgcaaattaagactcaccttcactttccaaaatagctgagggttgttggcttgttgtagctgaccaccaaaagcagtcactgcaaatcttttaattcttccctatcaccttttgtattttaatgcaattattttggtccagaactgacctgtattttctgtattgtacacaaaagctaataattttgtgtactttttatttattttggaggttttatatgatcttcaattgagtattaaataatttgcctagattaagcctaaaatgatgaccagctaattaaagaagatattttgaatctggttctgagctaaagttgagtaaattcttagctaagaaaaaattggaaatccatcatctatattagcaacagattctcagagtaaattgttaacttctatgatttatgataatcaagctggacttgatcatacaagttagtctcataatgtattggaccaaaatgtaaacttcattggtcagatttagaagcattcatgctcacaagttttgggaaagtgaaaaataataaaatcatcttggattttattctgtatattaaaatttatcttttaaggaaacaatctgtatactacttgcttgtatagccttttgacccttcttgagtttttcagaagcctttaatttttatactttcaataccatatttacattatatactttaattaacaatgtgagtttctctgtg

SEQ ID NO: 8882 - protein, 1349 aa, Homo sapiens
MLHLSAAPPAPPPEVTATARPCLCSVGRRGDGGKMAAAGALERSFVELSGAERERPRHFREFTVCSIGTANAVAGAVKYSESAGGFYYVESGKLFSVTRNRFIHWKTSGDTLELMEESLDINLLNNAIRLKFQNCSVLPGGVYVSETQNRVIILMLTNQTVHRLLLPHPSRMYRSELVVDSQMQSIFTDIGKVDFTDPCNYQLIPAVPGISPNSTASTAWLSSDGEALFALPCASGGIFVLKLPPYDIPGMVSVVELKQSSVMQRLLTGWMPTAIRGDQSPSDRPLSLAVHCVEHDAFIFALCQDHKLRMWSYKEQMCLMVADMLEYVPVKKDLRLTAGTGHKLRLAYSPTMGLYLGIYMHAPKRGQFCIFQLVSTESNRYSLDHISSLFTSQETLIDFALTSTDIWALWHDAENQTVVKYINFEHNVAGQWNPVFMQPLPEEEIVIRDDQDPREMYLQSLFTPGQFTNEALCKALQIFCRGTERNLDLSWSELKKEVTLAVENELQGSVTEYEFSQEEFRNLQQEFWCKFYACCLQYQEALSHPLALHLNPHTNMVCLLKKGYLSFLIPSSLVDHLYLLPYENLLTEDETTISDDVDIARDVICLIKCLRLIEESVTVDMSVIMEMSCYNLQSPEKAAEQILEDMITIDVENVMEDICSKLQEIRNPIHAIGLLIREMDYETEVEMEKGFNPAQPLNIRMNLTQLYGSNTAGYIVCRGVHKIASTRFLICRDLLILQQLLMRLGDAVIWGTGQLFQAQQDLLHRTAPLLLSYYLIKWGSECLATDVPLDTLESNLQHLSVLELTDSGALMANRFVSSPQTIVELFFQEVARKHIISHLFSQPKAPLSQTGLNWPEMITAITSYLLQLLWPSNPGCLFLECLMGNCQYVQLQDYIQLLHPWCQVNVGSCRFMLGRCYLVTGEGQKALECFCQAASEVGKEEFLDRLIRSEDGEIVSTPRLQYYDKVLRLLDVIGLPELVIQLATSAITEAGDDWKSQATLRTCIFKHHLDLGHNSQAYEALTQIPDSSRQLDCLRQLVVVLCERSQLQDLVEFPYVNLHNEVVGIIESRARAVDLMTHNYYELLYAFHIYRHNYRKAGTVMFEYGMRLGREVRTLRGLEKQGNCYLAALNCLRLIRPEYAWIVQPVSGAVYDRPGASPKRNHDGECTAAPTNRQIEILELEDLEKECSLARIRLTLAQHDPSAVAVAGSSSAEEMVTLLVQAGLFDTAISLCQTFKLPLTPVFEGLAFKCIKLQFGGEAAQAEAWAWLAANQLSSVITTKESSATDEAWRLLSTYLERYKVQNNLYHHCVINKLLSHGVPLPNWLINSYKDYQQKVDKATRDLLYRRTL

SEQ ID NO: 8883 - DNA, 5051 bp, Homo sapiens
actggaaggttcccgcagatagagtctgcctcccctgcccccttctcttctggattcctcgctgcccaccctcattctcccggtggaagcctcgcaacgaagggccggagccgcctttctgctcccggaatgcttcacctgtccgcagctccgcccgccccacccccggaagtgacggcgaccgcgcggccctgcctttgttccgttgggcgtcgcggcgacggcgggaagatggcggcggcgggagccctggaacggagcttcgtggagctaagcggagctgagcgcgaaaggccgaggcactttcgggaattcacagtctgcagcattgggactgcaaatgccgtggctggcgccgtaaaatacagtgaaagcgcgggaggcttttactacgtggagagtggcaagttgttctccgtaaccagaaacaggttcattcattggaagacctctggagatacattggagctgatggaggagtcactggacataaatctgttgaataatgccattcgcctaaaattccaaaattgcagtgttttacctggaggggtttatgtctctgagactcagaatcgtgtgataatcttgatgttaaccaatcaaacagtgcacaggttacttttaccacacccctcccggatgtataggagtgagttggtagttgacagtcagatgcagtcaatattcactgacattggaaaagttgatttcacagatccttgcaactatcagttaattccagcagtacctggaatatctcctaattccaccgcctctacagcctggctcagcagtgatggggaggccctgtttgccttaccatgtgcttctgggggaatctttgttcttaagctacctccttatgacatacctggtatggtgtcagtcgtggaactgaaacagagttcagtaatgcaacgattgcttacaggctggatgccaacagctatcaggggtgaccagtcgccttcagatcgtcccctcagtcttgctgttcattgtgtggagcatgatgccttcatctttgctttgtgtcaggatcataaactacgaatgtggtcttacaaggagcaaatgtgcctaatggtagctgacatgctggagtatgtccctgtgaagaaagaccttcggcttactgctggaactggacacaaattacggcttgcttattcccccaccatgggactctacctggggatatacatgcatgcaccaaaacgaggacagttctgcattttccagttggtgagcactgagagtaatcgctatagtctcgatcatatttcttcactgttcacttctcaggagacactgattgactttgccttaacttccacggatatctgggccctgtggcatgatgctgagaaccaaacagtagtgaaatacatcaactttgaacataatgttgcaggtcagtggaatccagtttttatgcagcctctgccagaggaagagattgtcatcagagatgatcaagaccccagagagatgtatctgcaaagtctttttacaccaggacaattcacaaatgaagctttatgtaaggctttacagattttctgccgaggaactgagaggaatttggatctttcctggagtgaactgaagaaagaagttactttagctgttgaaaatgagcttcaaggaagtgtaacagagtatgaattctcccaggaggagtttcgaaatttacaacaagaattctggtgcaagttctatgcctgttgtcttcagtatcaagaagccctctctcaccctcttgccctacatttgaatccacacacaaacatggtgtgcctgctgaaaaaagggtacctgtctttccttattccctcatccttagtggatcatttgtatctcctgccttatgagaaccttttgacagaagatgagacaaccatatctgatgatgtggacatcgctcgggatgtcatatgtcttataaaatgcctccggctgattgaagagtcagtaactgtggatatgtcagttataatggaaatgagttgttataacctacagtctccggaaaaggctgcagagcagattctggaagatatgatcactattgatgtagaaaatgtgatggaggatatttgtagtaaactgcaagagattaggaacccaatccatgcaattggactacttatacgggaaatggattatgaaacagaagtggaaatggaaaagggattcaatccagctcagcctttgaatattcgaatgaatcttacccagctctatggtagtaacacagcagggtatattgtgtgcagaggggtgcataaaatcgccagtactcgtttcctgatctgcagagatcttttgatcttacagcagctgttaatgaggcttggagatgctgtgatttggggaactggtcagctctttcaagctcagcaagacctactacatcgaacagctcccctactcttatcttattacctcattaaatggggaagtgagtgcttggcaactgatgttccacttgacacactggagtctaatctccaacacttatcagtactggaattaacagactctggtgctttaatggcaaataggtttgtatctagtcctcagactattgtggagttattcttccaagaagttgcaagaaaacacattatatctcacctcttctctcagccaaaggcacctctgagccaaactggattgaattggcctgaaatgattactgcaattaccagttatttattgcagcttttatggcctagcaatcctggttgtctctttctagaatgtttgatgggaaattgccaatatgtacaattgcaggattatattcaactgctacatccctggtgtcaagtcaatgttggttcctgtcgatttatgctgggaaggtgttacctagttacaggagaaggacagaaggctctggaatgtttttgtcaggcagcatctgaagtaggcaaagaggaattcttggatcgcttgattcgctcagaggatggggagatcgtgtctacccccaggctgcagtattatgacaaggttttacgactactagatgtcattggtttgcctgaactggttattcagttggctacatcagccataactgaagcaggtgatgactggaaaagtcaggctactctaaggacatgtattttcaaacatcatttggatttgggtcacaatagccaagcatatgaagccttaacccaaattcctgattccagcaggcaattagattgtttacggcagttggtggtagttctttgtgaacgctcacagctacaggatcttgtagagtttccctatgtgaatctgcataatgaggttgtgggaataattgagtcacgtgctagagctgtggaccttatgactcacaattactatgaacttctgtatgcctttcacatctatcgccacaattaccgcaaggctggcacagtgatgtttgagtatggaatgcggcttggcagagaagttcgaactctccggggacttgagaaacaaggcaactgttatctggctgctctcaattgtttacgacttattcgtccagaatatgcgtggattgtgcagccagtgtctggtgcagtgtatgatcgccctggagcatcccctaagaggaatcatgatggagaatgcacagctgcccccacaaatcgacaaattgaaatcctggaactggaagatctggagaaagagtgttccttggctcgcatccgcctcactttggctcagcatgatccatcagcggttgcagttgctggaagttcatcagcagaggaaatggtcactctcttggttcaggcgggcctctttgacactgccatatcactctgtcagacttttaagcttcccttaacgccagtctttgaagggcttgccttcaaatgcatcaaattgcaatttggaggagaggcagcacaagcagaagcctgggcctggctagcagccaatcagctctcatctgtcatcactactaaggagtctagtgctacagatgaagcatggcgactattatccacttacctggagaggtacaaagtccagaataacttgtatcaccactgtgtaatcaacaagctcttgtctcatggagtgcctctgcctaattggcttataaacagttacaaggactaccagcaaaaagttgataaggcaacacgggatttattatatcgtcggaccttgtgatttggattgtcacctagcctttgtaaccgcttggtgcctcttaggacttaagactaccctacaggaaccctgtactcaaggccgatttttgtaactgtaaatgatgtgtacaacattcaagtctgcattctgcacaagataggagggcggaagagtcagaggaccctgtgcttgctggtggtgctaacacaatttctggtgttcaaccttggtctcaaatagctgcttttgtatatgattcacgagcttttttagagtttatatttttttaaactaccgaagacattcattatctgcaaattaagactcaccttcactttccaaaatagctgagggttgttggcttgttgtagctgaccaccaaaagcagtcactgcaaatcttttaattcttccctatcaccttttgtattttaatgcaattattttggtccagaactgacctgtattttctgtattgtacacaaaagctaataattttgtgtactttttatttattttggaggttttatatgatcttcaattgagtattaaataatttgcctagattaagcctaaaatgatgaccagctaattaaagaagatattttgaatctggttctgagctaaagttgagtaaattcttagctaagaaaaaattggaaatccatcatctatattagcaacagattctcagagtaaattgttaacttctatgatttatgataatcaagctggacttgatcatacaagttagtctcataatgtattggaccaaaatgtaaacttcattggtcagatttagaagcattcatgctcacaagttttgggaaagtgaaaaataataaaatcatcttggattttattctgtatattaaaatttatcttttaagg

SEQ ID NO: 8884 - protein, 1349 aa, Homo sapiens; identical to SEQ ID NO: 8882

SEQ ID NO: 8885 - DNA, 634 bp, Homo sapiens
cgaggaactgagaggaatttggatctttcctggagtgaactgaagaaagaagttactttagctgttgaaaatgagcttcaaggaagtgtaacagagtatgaattctcccaggaggagtttcgaaatttacaacaagaattctggtgcaagttctatgcctgttgtcttcagtatcaagaagccctctctcaccctcttgccctacatttgaatccacacacaaacatggtgtgcctgctgaaaaaagtaagtgagctaaagcatagagaagaccttcttgagacagttcagtggctgttataacaaaatgccttcagaaaacaaaaagttcagtggctcttgccgaatgttagtctggtgaatgttgcggttagcatttaggactttgcatttgtattttttcccctaaaattgtgattcattcatttaaatagttttctgtgttattctctatactttttttgtattttattgtatttatttctttttctttttttctctttttttgagttggagtcttgctctgtcacccaggctggagtgcagtggtgtgatctcagctcactgcaacctccgcctctgggattcaagcaattctcctgagtacctgggactacaggtgtacaccatcaca

SEQ ID NO: 8886 - protein, 37 aa, Homo sapiens
MNSPRRSFEIYNKNSGASSMPVVFSIKKPSLTLLPYI

SEQ ID NO: 8887 - DNA, 410 bp, Homo sapiens
aaacttgacagttttttactttaaaaacttttttagcaatagagaggaactgagcaaaattctggttattttgatttaatagatttttctttttaattactcaacaggagttggtagttgacagtcagatgcagtcaatattcactgacattggaaaagttgatttcacagatccttgcaactatcagttaattccagcagtacctggaatatctcctaattccaccgcctctacagcctggctcagcagtgatggggaggccctgtttgccttaccatgtgcttctgggggaatctttgttcttaagctacctccttatgacatacctggtatggtgtcagtcgtggaactgaaacagagttcagtaatgcaacgattgcttacaggctggatgccaacagctatcagg

SEQ ID NO: 8888 - protein, 93 aa, Homo sapiens
MQSIFTDIGKVDFTDPCNYQLIPAVPGISPNSTASTAWLSSDGEALFALPCASGGIFVLKLPPYDIPGMVSVVELKQSSVMQRLLTGWMPTAI

SEQ ID NO: 8889 - DNA, 1523 bp, Homo sapiens
ggcgggaagatggcggcggcgggagccctggaacggagcttcgtggagctaagcggagctgagcgcgaaaggccgaggcactttcgggaattcacagtctgcagcattgggactgcaaatgccgtggctggcgccgtaaaatacagtgaaagcgcgggaggcttttactacgtggagagtggcaagttgttctccgtaaccagaaacaggttcattcattgagatggggttttgccttgttgtccagactggtcttgaactgccagactcaagcagtgccccgttctcggcctcccaacttgctaggattacaggcgtaagccaccgtgtccagcctgattttttaaaataagccaggcggagtagcgtgtgcctttcatcttaactactcaggaggctgaggtgggaggatccgatcatgccactgcactccaggaagacctctggagatacattggagctgatggaggagtcactggacataaatctgttgaataatgccattcgcctaaaattccaaaattgcagtgttttacctggaggggtttatgtctctgagactcagaatcgtgtgataatcttgatgttaaccaatcaaacagtgcacaggttacttttaccacacccctcccggatgtataggagtgtaagttggctaagtgcaatatcttttatttcccaaattactctgggtgtcacaaatgtagtgctggagcgatgtcttttggaattgaaggaaatttggattctcgttatccctcaccaagcatactttgatagctaccgcttaaaatgatcaggcatacattttaagttgagaattagttttcattaagaagaatagctttcttaaacttgacagttttttactttaaaaacttttttagcaatagagaggaactgagcaaaattctggttattttgatttaatagatttttctttttaattactcaacaggagttggtagttgacagtcagatgcagtcaatattcactgacattggaaaagttgatttcacagatccttgcaactatcagttaattccagcagtacctggaatatctcctaattccaccgcctctacagcctggctcagcagtgatggggaggccctgtttgccttaccatgtgcttctgggggaatctttgttcttaagctacctccttatgacatacctggtaagaatgggaactgagcatggatttaactttaaacaaggaatgttaacattgaaacagttcaacctcgtcatccaatgcagggattgcatctctactgccccggaactggtcattcattattgcttgcctaatgagtccctaatgctttacttttatacagtggataaggaactataaagcatattggagcacggaaaaacaaatagacaagtataagacagcctattctaaatcttgtagtagagatgggttgcctaattgtctgccctgagatggaggcattataacattataattaaattaattgaaacaaagacattaaataccctgcaccaagtt

SEQ ID NO: 8890 - protein, 125 aa, Homo sapiens
MPLHSRKTSGDTLELMEESLDINLLNNAIRLKFQNCSVLPGGVYVSETQNRVIILMLTNQTVHRLLLPHPSRMYRSVSWLSAISFISQITLGVTNVVLERCLLELKEIWILVIPHQAYFDSYRLK

SEQ ID NO: 8891 - DNA, 1528 bp, Homo sapiens
ggaaggttcccgcagatagagtctgcctcccctgcccccttctcttctggattcctcgctgcccaccctcattctcccggtggaagcctcgcaacgaagggccggagccgcctttctgctcccggaatgcttcacctgtccgcagctccgcccgccccacccccggaagtgacggcgaccgcgcggccctgcctttgttccgttgggcgtcgcggcgacggcgggaagatggcggcggcgggagccctggaacggagcttcgtggagctaagcggagctgagcgcgaaaggccgaggcactttcgggaattcacagtctgcagcattgggactgcaaatgccgtggctggcgccgtaaaatacagtgaaagcgcgggaggcttttactacgtggagagtggcaagttgttctccgtaaccagaaacaggttcattcattggaagacctctggagatacattggagctgatggaggagtcactggacataaatctgttgaataatgccattcgcctaaaattccaaaattgcagtgttttacctggaggggtttatgtctctgagactcagaatcgtgtgataatcttgatgttaaccaatcaaacagtgcacaggttacttttaccacacccctcccggatgtataggagtgtaagttggctaagtgcaatatcttttatttcccaaattactctgggtgtcacaaatgtagtgctggagcgatgtcttttggaattgaaggaaatttggattctcgttatccctcaccaagcatactttgatagctaccgcttaaaatgatcaggcatacattttaagttgagaattagttttcattaagaagaatagctttcttaaacttgacagttttttactttaaaaacttttttagcaatagagaggaactgagcaaaattctggttattttgatttaatagatttttctttttaattactcaacaggagttggtagttgacagtcagatgcagtcaatattcactgacattggaaaagttgatttcacagatccttgcaactatcagttaattccagcagtacctggaatatctcctaattccaccgcctctacagcctggctcagcagtgatggggaggccctgtttgccttaccatgtgcttctgggggaatctttgttcttaagctacctccttatgacatacctggtaagaatgggaactgagcatggatttaactttaaacaaggaatgttaacattgaaacagttcaacctcgtcatccaatgcagggattgcatctctactgccccggaactggtcattcattattgcttgcctaatgagtccctaatgctttacttttatacagtggataaggaactataaagcatattggagcacggaaaaacaaatagacaagtataagacagcctattctaaatcttgtagtagagatgggttgcctaattgtctgccctgagatggaggcattataacattataattaaattaattgaaacaaagacattaaataccctgcaccaagtt

SEQ ID NO: 8892 - protein, 224 aa, Homo sapiens
MLHLSAAPPAPPPEVTATARPCLCSVGRRGDGGKMAAAGALERSFVELSGAERERPRHFREFTVCSIGTANAVAGAVKYSESAGGFYYVESGKLFSVTRNRFIHWKTSGDTLELMEESLDINLLNNAIRLKFQNCSVLPGGVYVSETQNRVIILMLTNQTVHRLLLPHPSRMYRSVSWLSAISFISQITLGVTNVVLERCLLELKEIWILVIPHQAYFDSYRLK

SEQ ID NO: 8893 - DNA, 2700 bp, Homo sapiens
atgggaccttcctgtgtcgctgccaccagggctatgagctgcatcgggatggcttctcctgcagtggtgagagctccatccctgctgtgtactcctctgtggacccccaggccctagctatgccgtgcctcctgccacacagttctccatttgaggcctccgcctcctgtcactgtgcacccagctgcctcctgggtactcgaccccggctggctgtggagcactcccaggctagtgggggaggcacaaggagaggcagctacgtccttactgaagcctactggtgagactgaggatgtgggtgccacctgtcccacatatcaggctcacctgcatttacctgcatttgaattttgcactaggacaagtcactcctctctgagcctgtttcttcttctataaaatgggttgtcttgaggattaggtgagagtgtgatagatgggctccagcaagtctcaagctgcagtgctttaaagtgaatgaactgccacttaatgagaacctgccctcgtagtgtattccctgacacacttggcctccttcctctcaagaatcctaggaggtatgattttctccttcctctacaaaatgaggacattcatatctccctccacgtttgttgggaggattacataaaaataatcacaaagtcctgggtaaatggtgactttcatgattcagctaagagaggttaagtgacccgcccaagctcatacagccaggatgagatggggccagggctggatcccagacttcttacaccctgtaaactggcatgtaccccctatgttatgctttgctgcgggatgaggcctcactgctacctggcagcatgaggggaacaagagaaaggaaatgttctgcctgtgaagctcacagttagttggaggtgaccactgggtgctcaggttgactgtgggttgcaggaattgggcgttacagcacaagccagacccataagactcatctagtctaacacactcattttactgattgggaaaatgagattcccctagatcagctggtgggattcacacccaagcctctagattcccagtaacttatttagtgtttcttccagttctgggcagagagaagtctgtgagctgcggcagcctgggcaaactttctttgaaccctccatctcccggctgaacttgtggcttgtctcatccccctctgtcttcctacattcagtctaacatggggctgggccttcttgggaaatgtttgtgggactgaatggtgaggaatgcccttgacccggggtccccatccccatgcttcctcagatattgatgagtgtagctactccagctacctctgtcagtaccgctgcatcaacgagccaggccgtttctcctgccactgcccacagggttaccagctgctggccacacgcctctgccaagacattgatgagtgtgagtctggtgcgcaccagtgctccgaggcccaaacctgtgtcaacttccatgggggctaccgctgcgtggacaccaaccgctgcgtggagccctacatccaggtctctgagaaccgctgtctctgcccggcctccaaccctctatgtcgagagcagccttcatccattgtgcaccgctacatgaccatcacctcggagcggagcgtgcccgctgacgtgttccagatccaggcgacctccgtctaccccggtgcctacaatgcctttcagatccgtgctggaaactcgcagggggacttttacattaggcaaatcaacaacgtcagcgccatgctggtcctcgcccggccggtgacgggcccccgggagtacgtgctggacctggagatggtcaccatgaattccctcatgagctaccgggccagctctgtactgaggctcaccgtctttgtaggggcctacaccttctgaggagcaggagggagccaccctccctgcagctaccctagctgaggagcctgttgtgaggggcagaatgagaaaggcaataaagggagaaagaaagtcctggtggctgaggcccaggggcccccattgacaggagctgggagctctgcaccacgagcttcagtcaccccgagaggagaggaggtaacgaggagggcggactccaggccccggcccagagatttggacttggctggcttgcaggggtcctaagaaactccactctggacagcgccaggaggccctgggttccattcctaactctgcctcaaactgtacatttggataagccctagtagttccctgggcctgtttttctataaaacgaggcaactggactgttagtggttttcaatcttttcttttaggaagttttatttatttttattatttttattttcccaatgagccctctgcactcctaaggaaattttatttgatgaggaccaactggtgacataaaatagattccaagctgcaatgccccactgactccatctccctgaccagggaattccaggtgctaagcagctttgtttaaaaaccactggaccagatggtatccctggttcctgcgtatttcacaaggtccccagggctaggcatcttctacatgacacatatggctgcaaacacttagattctaattgtaccccaaaagatgttgttaaaaggctggctagcctgggttgggggacagacgggggctgggggctgtttcacggcataagctcaggtcaaggggccgtagctgcagtagagctgg

SEQ ID NO: 8894 - protein, 214 aa, Homo sapiens
MPLTRGPHPHASSDIDECSYSSYLCQYRCINEPGRFSCHCPQGYQLLATRLCQDIDECESGAHQCSEAQTCVNFHGGYRCVDTNRCVEPYIQVSENRCLCPASNPLCREQPSSIVHRYMTITSERSVPADVFQIQATSVYPGAYNAFQIRAGNSQGDFYIRQINNVSAMLVLARPVTGPREYVLDLEMVTMNSLMSYRASSVLRLTVFVGAYTF

SEQ ID NO: 8895 - DNA, 3074 bp, Homo sapiens
tccaggaatgcacagatggctatgagtgggacccagacagccagcactgccggggtgtgtgtgcctgggggaccaaacacccccaggaacccggaaagggattgatagctgctttccaagggacagccccacctccaagaactgccgtgggagcccagcagcccgttctatgcccagctctgctacacagaggccagctctggctctctggaggccagttgagctaggggtggcctcatcctctcccagaaacccaggaaaccttgtccctacccctcagaggagctggatcctgtacgccttctctgaaccactctcctgtcccagctctttgtctcatcacaacctgggagggtagcgtccccaggggtgggtaaggaggccccccatcttgggctgagctagggctagggccgtggggagggatagagacccacttgcaggccgagaatgagggcaacagtgggaacagctgccccatctccagccttggccaaccctggggaggggtcctgagcaggcagacttagcttgttgagcagagtgggaaggctttgctggggccacacatctcagagaaggccgagctgggttcctgcctccgctccctccagggccagcccaggagactggctgtgcccagcaggcccctctctgcagatgtcaacgagtgtctgaccatccctgaggcctgcaagggggaaatgaagtgcatcaaccactacgggggctacttgtgcctgccccgctccgctgccgtcatcaacgacctacacggcgagggacccccgccaccagtgcctcccgctcaacaccccaacccctgcccaccaggctatgagcccgacgatcaggacagctgtgtgggtgagtggggactgctctggtgcctggcttccagtcctctcaccaggcgtcttaaactcagacctcatgttcctccccagctcaaaagggccactggtgatgtccacaccctcatccagacactcatgttgtttaggacctgccgcaggtggccccagcttgtgtgccactgctccagccagctccgggcccctcccctcggttgctgcagagacactgcaggaagtctgccttccagtgtctgtcccctgggagccacaggccttggaggaaggacagtccaggaatcagtgttgctggggatgtttggacaggaccttatttcctgtgcaacccccaacatgtggttttagaggttaggggtgcctttcctgatggctccaggctggtgaactcttacgcgtgctgttgagagaaccgaatacaagtgttggaactatctgtcatgttgggtggtgtgcgggatcccaggcaggggctgagtggtgtctctcgcagatgtggacgagtgtgcccaggccctgcacgactgtcgccccagccaggactgccataacttgcctggctcctatcagtgcacctgccctgatggttaccgcaagatcgggcccgagtgtgtggacatagacgagtgccgctaccgctactgccagcaccgctgcgtgaacctgcctggctccttccgctgccagtgcgagccgggcttccagctggggcctaacaaccgctcctgtgttgatgtgaacgagtgtgacatgggggccccatgcgagcagcgctgcttcaactcctatgggaccttcctgtgtcgctgccaccagggctatgagctgcatcgggatggcttctcctgcagtgatattgatgagtgtagctactccagctacctctgtcagtaccgctgcatcaacgagccaggccgtttctcctgccactgcccacagggttaccagctgctggccacacgcctctgccaagacattgatgagtgtgagtctggtgcgcaccagtgctccgaggcccaaacctgtgtcaacttccatgggggctaccgctgcgtggacaccaaccgctgcgtggagccctacatccaggtctctgagaaccgctgtctctgcccggcctccaaccctctatgtcgagagcagccttcatccattgtgcaccgctacatgaccatcacctcggagcggagcgtgcccgctgacgtgttccagatccaggcgacctccgtctaccccggtgcctacaatgcctttcagatccgctggtcctcgcccggccggtgacgggcccccgggagtacgtgctggacctggagatggtcaccatgaattccctcatgagctaccgggccagctctgtactgaggctcaccgtctttgtaggggcctacaccttctgaggagcaggagggagccaccctccctgcagctaccctagctgaggagcctgttgtgaggggcagaatgagaaaggcaataaagggagaaagaaagtcctggtggctgaggcccaggggcccccattgacaggagctgggagctctgcaccacgagcttcagtcaccccgagaggagaggaggtaacgaggagggcggactccaggccccggcccagagatttggacttggctggcttgcaggggtcctaagaaactccactctggacagcgccaggaggccctgggttccattcctaactctgcctcaaactgtacatttggataagccctagtagttccctgggcctgtttttctataaaacgaggcaactggactgttagtggttttcaatcttttcttttaggaagttttatttatttttattatttttattttcccaatgagccctctgcactcctaaggaaattttatttgatgaggaccaactggtgacataaaatagattccaagctgcaatgccccactgactccatctccctgaccagggaattccaggtgctaagcagctttgtttaaaaaccactggaccagatggtatccctggttcctgcgtatttcacaaggtccccagggctaggcatcttctacatgacacatatggctgcaaacacttagattctaattgtaccccaaaagatgttgttaaaaggctggctagcctgggttgggggacagacgggggctgggggctgtttcacggcataagctcaggtcaaggggccgtagctgcagtagagctgg

SEQ ID NO: 8896 - protein, 177 aa, Homo sapiens
MGAPCEQRCFNSYGTFLCRCHQGYELHRDGFSCSDIDECSYSSYLCQYRCINEPGRFSCHCPQGYQLLATRLCQDIDECESGAHQCSEAQTCVNFHGGYRCVDTNRCVEPYIQVSENRCLCPASNPLCREQPSSIVHRYMTITSERSVPADVFQIQATSVYPGAYNAFQIRWSSPGR

SEQ ID NO: 8897 - DNA, 2278 bp, Homo sapiens
cagccctgccctccttctcaggggcttccattcattttgtgccaaaagggaacttccgcccgtccgtctgcccgcaggcattgcccgagccagccgagccgccagagccgcgggccgcgggggtgtcgcgggcccaaccccaggatgctcccctgcgcctcctgcctacccgggtctctactgctctgggcgctgctactgttgctcttgggatcagcttctcctcaggattctgaagagcccgacagctacacggaatgcacagatggctatgagtgggacccagacagccagcactgccgggatgtcaacgagtgtctgaccatccctgaggcctgcaagggggaaatgaagtgcatcaaccactacgggggctacttgtgcctgccccgctccgctgccgtcatcaacgacctacacggcgagggacccccgccaccagtgcctcccgctcaacaccccaacccctgcccaccaggctatgagcccgacgatcaggacagctgtgtggatgtggacgagtgtgcccaggccctgcacgactgtcgccccagccaggactgccataacttgcctggctcctatcagtgcacctgccctgatggttaccgcaagatcgggcccgagtgtgtggacatagacgagtgccgctaccgctactgccagcaccgctgcgtgaacctgcctggctccttccgctgccagtgcgagccgggcttccagctggggcctaacaaccgctcctgtgttgatgtgaacgagtgtgacatgggggccccatgcgagcagcgctgcttcaactcctatgggaccttcctgtgtcgctgccaccagggctatgagctgcatcgggatggcttctcctgcagtgatattgatgagtgtagctactccagctacctctgtcagtaccgctgcatcaacgagccaggccgtttctcctgccactgcccacagggttaccagctgctggccacacgcctctgccaagacattgatgagtgtgagtctggtgcgcaccagtgctccgaggcccaaacctgtgtcaacttccatgggggctaccgctgcgtggacaccaaccgctgcgtggagccctacatccaggtctctgagaaccgctgtctctgcccggcctccaaccctctatgtcgagagcagccttcatccattgtgcaccgctacatgaccatcacctcggagcggagcgtgcccgctgacgtgttccagatccaggcgacctccgtctaccccggtgcctacaatgcctttcagatccgtgctggaaactcgcagggggacttttacattaggcaaatcaacaacgtcagcgccatgctggtcctcgcccggccggtgacgggcccccgggagtacgtgctggacctggagatggtcaccatgaattccctcatgagctaccgggccagctctgtactgaggctcaccgtctttgtaggggcctacaccttctgaggagcaggagggagccaccctccctgcagctaccctagctgaggagcctgttgtgaggggcagaatgagaaaggcaataaagggagaaagaaagtcctggtggctgaggcccaggggcccccattgacaggagctgggagctctgcaccacgagcttcagtcaccccgagaggagaggaggtaacgaggagggcggactccaggccccggcccagagatttggacttggctggcttgcaggggtcctaagaaactccactctggacagcgccaggaggccctgggttccattcctaactctgcctcaaactgtacatttggataagccctagtagttccctgggcctgtttttctataaaacgaggcaactggactgttagtggttttcaatcttttcttttaggaagttttatttatttttattatttttattttcccaatgagccctctgcactcctaaggaaattttatttgatgaggaccaactggtgacataaaatagattccaagctgcaatgccccactgactccatctccctgaccagggaattccaggtgctaagcagctttgtttaaaaaccactggaccagatggtatccctggttcctgcgtatttcacaaggtccccagggctaggcatcttctacatgacacatatggctgcaaacacttagattctaattgtaccccaaaagatgttgttaaaaggctggctagcctgggttgggggacagacgggggctgggggctgtttcacggcataagctcaggtcaaggggccgtagctgcagtagagctgg

SEQ ID NO: 8898 - protein, 443 aa, Homo sapiens; identical to SEQ ID NO: 1354

SEQ ID NO: 8899 - DNA, 2277 bp, Homo sapiens
atgggaccttcctgtgtcgctgccaccagggctatgagctgcatcgggatggcttctcctgcagtggtgagagctccatccctgctgtgtactcctctgtggacccccaggccctagctatgccgtgcctcctgccacacagttctccatttgaggcctccgcctcctgtcactgtgcacccagctgcctcctgggtactcgaccccggctggctgtggagcactcccaggctagtgggggaggcacaaggagaggcagctacgtccttactgaagcctactggtgagactgaggatgtgggtgccacctgtcccacatatcaggctcacctgcatttacctgcatttgaattttgcactaggacaagtcactcctctctgagcctgtttcttcttctataaaatgggttgtcttgaggattaggtgagagtgtgatagatgggctccagcaagtctcaagctgcagtgctttaaagtgaatgaactgccacttaatgagaacctgccctcgtagtgtattccctgacacacttggcctccttcctctcaagaatcctaggaggtatgattttctccttcctctacaaaatgaggacattcatatctccctccacgtttgttgggaggattacataaaaataatcacaaagtcctgggtaaatggtgactttcatgattcagctaagagaggttaagtgacccgcccaagctcatacagccaggatgagatggggccagggctggatcccagacttcttacaccctgtaaactggcatgtaccccctatgttatgctttgctgcgggatgaggcctcactgctacctggcagcatgaggggaacaagagaaaggaaatgttctgcctgtgaagctcacagttagttggaggtgaccactgggtgctcaggttgactgtgggttgcaggaattgggcgttacagcacaagccagacccataagactcatctagtctaacacactcattttactgattgggaaaatgagattcccctagatcagctggtgggattcacacccaagcctctagattcccagtaacttatttagtgtttcttccagttctgggcagagagaagtctgtgagctgcggcagcctgggcaaactttctttgaaccctccatctcccggctgaacttgtggcttgtctcatccccctctgtcttcctacattcagtctaacatggggctgggccttcttgggaaatgtttgtgggactgaatggtgaggaatgcccttgacccggggtccccatccccatgcttcctcagatattgatgagtgtagctactccagctacctctgtcagtaccgctgcatcaacgagccaggccgtttctcctgccactgcccacagggttaccagctgctggccacacgcctctgccaagacattgatgagtgtgagtctggtgcgcaccagtgctccgaggcccaaacctgtgtcaacttccatgggggctaccgctgcgtggacaccaaccgctgcgtggagccctacatccaggtctctgagaaccgctgtctctgcccggcctccaaccctctatgtcgagagcagccttcatccattgtgcaccgctacatgaccatcacctcggagcggagcgtgcccgctgacgtgttccagatccaggcgacctccgtctaccccggtgcctacaatgcctttcagatccgtgctggaaactcgcagggggacttttacattaggcaaatcaacaacgtcagcgccatgctggtcctcgcccggccggtgacgggcccccgggagtacgtgctggacctggagatggtcaccatgaattccctcatgagctaccgggccagctctgtactgaggctcaccgtctttgtaggggcctacaccttctgaggagcaggagggagccaccctccctgcagctaccctagctgaggagcctgttgtgaggggcagaatgagaaaggcaataaagggagaaagaaagtcctggtggctgaggcccaggggcccccattgacaggagctgggagctctgcaccacgagcttcagtcaccccgagaggagaggaggtaacgaggagggcggactccaggccccggcccagagatttggacttggctggcttgcaggggtcctaagaaactccactctggacagcgccaggaggccctgggttccattcctaactctgcctcaaactgtacatttggataagccctagtagttccctgggcctgtttttctataaaacgaggcaactggactgtt

SEQ ID NO: 8900 - protein, 214 aa, Homo sapiens; identical to SEQ ID NO: 8894

SEQ ID NO: 8901 - DNA, 2651 bp, Homo sapiens
tccaggaatgcacagatggctatgagtgggacccagacagccagcactgccggggtgtgtgtgcctgggggaccaaacacccccaggaacccggaaagggattgatagctgctttccaagggacagccccacctccaagaactgccgtgggagcccagcagcccgttctatgcccagctctgctacacagaggccagctctggctctctggaggccagttgagctaggggtggcctcatcctctcccagaaacccaggaaaccttgtccctacccctcagaggagctggatcctgtacgccttctctgaaccactctcctgtcccagctctttgtctcatcacaacctgggagggtagcgtccccaggggtgggtaaggaggccccccatcttgggctgagctagggctagggccgtggggagggatagagacccacttgcaggccgagaatgagggcaacagtgggaacagctgccccatctccagccttggccaaccctggggaggggtcctgagcaggcagacttagcttgttgagcagagtgggaaggctttgctggggccacacatctcagagaaggccgagctgggttcctgcctccgctccctccagggccagcccaggagactggctgtgcccagcaggcccctctctgcagatgtcaacgagtgtctgaccatccctgaggcctgcaagggggaaatgaagtgcatcaaccactacgggggctacttgtgcctgccccgctccgctgccgtcatcaacgacctacacggcgagggacccccgccaccagtgcctcccgctcaacaccccaacccctgcccaccaggctatgagcccgacgatcaggacagctgtgtgggtgagtggggactgctctggtgcctggcttccagtcctctcaccaggcgtcttaaactcagacctcatgttcctccccagctcaaaagggccactggtgatgtccacaccctcatccagacactcatgttgtttaggacctgccgcaggtggccccagcttgtgtgccactgctccagccagctccgggcccctcccctcggttgctgcagagacactgcaggaagtctgccttccagtgtctgtcccctgggagccacaggccttggaggaaggacagtccaggaatcagtgttgctggggatgtttggacaggaccttatttcctgtgcaacccccaacatgtggttttagaggttaggggtgcctttcctgatggctccaggctggtgaactcttacgcgtgctgttgagagaaccgaatacaagtgttggaactatctgtcatgttgggtggtgtgcgggatcccaggcaggggctgagtggtgtctctcgcagatgtggacgagtgtgcccaggccctgcacgactgtcgccccagccaggactgccataacttgcctggctcctatcagtgcacctgccctgatggttaccgcaagatcgggcccgagtgtgtggacatagacgagtgccgctaccgctactgccagcaccgctgcgtgaacctgcctggctccttccgctgccagtgcgagccgggcttccagctggggcctaacaaccgctcctgtgttgatgtgaacgagtgtgacatgggggccccatgcgagcagcgctgcttcaactcctatgggaccttcctgtgtcgctgccaccagggctatgagctgcatcgggatggcttctcctgcagtgatattgatgagtgtagctactccagctacctctgtcagtaccgctgcatcaacgagccaggccgtttctcctgccactgcccacagggttaccagctgctggccacacgcctctgccaagacattgatgagtgtgagtctggtgcgcaccagtgctccgaggcccaaacctgtgtcaacttccatgggggctaccgctgcgtggacaccaaccgctgcgtggagccctacatccaggtctctgagaaccgctgtctctgcccggcctccaaccctctatgtcgagagcagccttcatccattgtgcaccgctacatgaccatcacctcggagcggagcgtgcccgctgacgtgttccagatccaggcgacctccgtctaccccggtgcctacaatgcctttcagatccgctggtcctcgcccggccggtgacgggcccccgggagtacgtgctggacctggagatggtcaccatgaattccctcatgagctaccgggccagctctgtactgaggctcaccgtctttgtaggggcctacaccttctgaggagcaggagggagccaccctccctgcagctaccctagctgaggagcctgttgtgaggggcagaatgagaaaggcaataaagggagaaagaaagtcctggtggctgaggcccaggggcccccattgacaggagctgggagctctgcaccacgagcttcagtcaccccgagaggagaggaggtaacgaggagggcggactccaggccccggcccagagatttggacttggctggcttgcaggggtcctaagaaactccactctggacagcgccaggaggccctgggttccattcctaactctgcctcaaactgtacatttggataagccctagtagttccctgggcctgtttttctataaaacgaggcaactggactgtt

SEQ ID NO: 8902 - protein, 177 aa, Homo sapiens; identical to SEQ ID NO: 8896

SEQ ID NO: 8903 - DNA, 1855 bp, Homo sapiens
cagccctgccctccttctcaggggcttccattcattttgtgccaaaagggaacttccgcccgtccgtctgcccgcaggcattgcccgagccagccgagccgccagagccgcgggccgcgggggtgtcgcgggcccaaccccaggatgctcccctgcgcctcctgcctacccgggtctctactgctctgggcgctgctactgttgctcttgggatcagcttctcctcaggattctgaagagcccgacagctacacggaatgcacagatggctatgagtgggacccagacagccagcactgccgggatgtcaacgagtgtctgaccatccctgaggcctgcaagggggaaatgaagtgcatcaaccactacgggggctacttgtgcctgccccgctccgctgccgtcatcaacgacctacacggcgagggacccccgccaccagtgcctcccgctcaacaccccaacccctgcccaccaggctatgagcccgacgatcaggacagctgtgtggatgtggacgagtgtgcccaggccctgcacgactgtcgccccagccaggactgccataacttgcctggctcctatcagtgcacctgccctgatggttaccgcaagatcgggcccgagtgtgtggacatagacgagtgccgctaccgctactgccagcaccgctgcgtgaacctgcctggctccttccgctgccagtgcgagccgggcttccagctggggcctaacaaccgctcctgtgttgatgtgaacgagtgtgacatgggggccccatgcgagcagcgctgcttcaactcctatgggaccttcctgtgtcgctgccaccagggctatgagctgcatcgggatggcttctcctgcagtgatattgatgagtgtagctactccagctacctctgtcagtaccgctgcatcaacgagccaggccgtttctcctgccactgcccacagggttaccagctgctggccacacgcctctgccaagacattgatgagtgtgagtctggtgcgcaccagtgctccgaggcccaaacctgtgtcaacttccatgggggctaccgctgcgtggacaccaaccgctgcgtggagccctacatccaggtctctgagaaccgctgtctctgcccggcctccaaccctctatgtcgagagcagccttcatccattgtgcaccgctacatgaccatcacctcggagcggagcgtgcccgctgacgtgttccagatccaggcgacctccgtctaccccggtgcctacaatgcctttcagatccgtgctggaaactcgcagggggacttttacattaggcaaatcaacaacgtcagcgccatgctggtcctcgcccggccggtgacgggcccccgggagtacgtgctggacctggagatggtcaccatgaattccctcatgagctaccgggccagctctgtactgaggctcaccgtctttgtaggggcctacaccttctgaggagcaggagggagccaccctccctgcagctaccctagctgaggagcctgttgtgaggggcagaatgagaaaggcaataaagggagaaagaaagtcctggtggctgaggcccaggggcccccattgacaggagctgggagctctgcaccacgagcttcagtcaccccgagaggagaggaggtaacgaggagggcggactccaggccccggcccagagatttggacttggctggcttgcaggggtcctaagaaactccactctggacagcgccaggaggccctgggttccattcctaactctgcctcaaactgtacatttggataagccctagtagttccctgggcctgtttttctataaaacgaggcaactggactgtt

SEQ ID NO: 8904 - protein, 443 aa, Homo sapiens; identical to SEQ ID NO: 1354

SEQ ID NO: 8905 - DNA, 2630 bp, Homo sapiens
gggacgctggtgcgaggaggtcgaggaggcgccttggcacccgactctggcatcccgcacgtccgacatcagccctgccctccttctcaggggcttccattcattttgtgccaaaagggaactgccgccctcgcccccaaacttgtagctttgtggatggagggtgtgggggaggccgtgtgtagtgaaaggaccacccggctgaagacggtcctgggggtggagggcaggagggagcgagaaggacagttctgctcctgggagcctctcgttcctgggcgagggtctggggaccctggatgaagttttaggatcttttacaatgacggtctggggcagagaataaaattttgcagggagcagattgagggtctggaggactgggttaggtgggctctaggtacccaggacgatctcgggaggcgcacaatgagaatctgggggctccaggattacggtgtgggtgcacaggatgaaattctgggggcgcagattaggtaggacctaggtgagcaggatgacatttttggtgagcgtctgggggcccccgggtgagtctgggggcctggcatcaaggtcggggccccaggatcgagcactgggggaccctggtccggcgccgggaggcggctcctggcggcgccgcgggggaccgggtaggggcctgtggctggccgggggcggagaagcggggggtcggggtccctccccctggcgctggctcaggaatccgccgaagggcgggcggaggcgccggggtgggccgcgccgcggcaggcgggcgggcggggggcgcttcctggggccgcgcgtccagggagctgtgccgtccgcccgtccgtctgcccgcaggcattgcccgagccagccgagccgccagagccgcgggccgcgggggtgtcgcgggcccaaccccaggatgctcccctgcgcctcctgcctacccgggtctctactgctctgggcgctgctactgttgctcttgggatcagcttctcctcaggattctgaagagcccgacagctacacggaatgcacagatggctatgagtgggacccagacagccagcactgccgggatgtcaacgagtgtctgaccatccctgaggcctgcaagggggaaatgaagtgcatcaaccactacgggggctacttgtgcctgccccgctccgctgccgtcatcaacgacctacacggcgagggacccccgccaccagtgcctcccgctcaacaccccaacccctgcccaccaggctatgagcccgacgatcaggacagctgtgtggatgtggacgagtgtgcccaggccctgcacgactgtcgccccagccaggactgccataacttgcctggctcctatcagtgcacctgccctgatggttaccgcaagatcgggcccgagtgtgtggacatagacgagtgccgctaccgctactgccagcaccgctgcgtgaacctgcctggctccttccgctgccagtgcgagccgggcttccagctggggcctaacaaccgctcctgtgttgatgtgaacgagtgtgacatgggggccccatgcgagcagcgctgcttcaactcctatgggaccttcctgtgtcgctgccaccagggctatgagctgcatcgggatggcttctcctgcagtgatattgatgagtgtagctactccagctacctctgtcagtaccgctgcatcaacgagccaggccgtttctcctgccactgcccacagggttaccagctgctggccacacgcctctgccaagacattgatgagtgtgagtctggtgcgcaccagtgctccgaggcccaaacctgtgtcaacttccatgggggctaccgctgcgtggacaccaaccgctgcgtggagccctacatccaggtctctgagaaccgctgtctctgcccggcctccaaccctctatgtcgagagcagccttcatccattgtgcaccgctacatgaccatcacctcggagcggagcgtgcccgctgacgtgttccagatccaggcgacctccgtctaccccggtgcctacaatgcctttcagatccgtgctggaaactcgcagggggacttttacattaggcaaatcaacaacgtcagcgccatgctggtcctcgcccggccggtgacgggcccccgggagtacgtgctggacctggagatggtcaccatgaattccctcatgagctaccgggccagctctgtactgaggctcaccgtctttgtaggggcctacaccttctgaggagcaggagggagccaccctccctgcagctaccctagctgaggagcctgttgtgaggggcagaatgagaaaggcaataaagggagaaagaaagtcctggtggctgaggcccaggggcccccattgacaggagctgggagctctgcaccacgagcttcagtcaccccgagaggagaggaggtaacgaggagggcggactccaggccccggcccagagatttggacttggctggcttgcaggggtcctaagaaactccactctggacagcgccaggaggccctgggttccattcctaactctgcctcaaactgtacatttggataagccctagtagttccctgggcctgtttttctataaaacgaggcaactggactgtt

SEQ ID NO: 8906 - protein, 577 aa, Homo sapiens
MTFLVSVWGPPGESGGLASRSGPQDRALGDPGPAPGGGSWRRRGGPGRGLWLAGGGEAGGRGPSPWRWLRNPPKGGRRRRGGPRRGRRAGGGRFLGPRVQGAVPSARPSARRHCPSQPSRQSRGPRGCRGPNPRMLPCASCLPGSLLLWALLLLLLGSASPQDSEEPDSYTECTDGYEWDPDSQHCRDVNECLTIPEACKGEMKCINHYGGYLCLPRSAAVINDLHGEGPPPPVPPAQHPNPCPPGYEPDDQDSCVDVDECAQALHDCRPSQDCHNLPGSYQCTCPDGYRKIGPECVDIDECRYRYCQHRCVNLPGSFRCQCEPGFQLGPNNRSCVDVNECDMGAPCEQRCFNSYGTFLCRCHQGYELHRDGFSCSDIDECSYSSYLCQYRCINEPGRFSCHCPQGYQLLATRLCQDIDECESGAHQCSEAQTCVNFHGGYRCVDTNRCVEPYIQVSENRCLCPASNPLCREQPSSIVHRYMTITSERSVPADVFQIQATSVYPGAYNAFQIRAGNSQGDFYIRQINNVSAMLVLARPVTGPREYVLDLEMVTMNSLMSYRASSVLRLTVFVGAYTF

SEQ ID NO: 8907 - DNA, 942 bp, Homo sapiens
ctgccctgatggttaccgcaagatcgggcccgagtgtgtgggtgagtccaggaagcagcttctgtagtcccggctttgtgtccctggtctggcccttgccctagcacctgacccccattcaagccaggcttcacccccggcccctgccacctcaccctccgtcatcagacacagaggactgtagcggggagtgtttgggaggtgtcctggctgaccctgcctaattcagctcctcggacacaggattatgggtggtgaagccttgagtcccagccggctcgagcccacctgccctctgccctctgccctccgccctccttctcctgcctctatccctagacatagacgagtgccgctaccgctactgccagcaccgctgcgtgaacctgcctggctccttccgctgccagtgcgagccgggcttccagctggggcctaacaaccgctcctgtgttgatgtgaacgagtgtgacatgggggccccatgcgagcagcgctgcttcaactcctatgggaccttcctgtgtcgctgccaccagggctatgagctgcatcgggatggcttctcctgcagtggtgagagctccatccctgctgtgtactcctctgtggacccccaggccctagctatgccgtgcctcctgccacacagttctccatttgaggcctccgcctcctgtcactgtgcacccagctgcctcctgggtactcgaccccggctggctgtggagcactcccaggctagtgggggaggcacaaggagaggcagctacgtccttactgaagcctactggtgagactgaggatgtgggtgccacctgtcccacatatcaggctcacctgcatttacctgcatttgaattttgcactaggacaagtcactcctctctgagcctgtttcttcttctataaaatgggttgtcttgaggattaggtgagagt

SEQ ID NO: 8908 - protein, 107 aa, Homo sapiens [sequence omitted]

SEQ ID NO: 8909 - DNA, 1311 bp, Homo sapiens
ccgtcctcctcgatctgcgcggcttcctgcctccatgccactccagactgcaccggcatggcactgactgcccacccctcctgcctcctggccctgttggtggcaggcctagcccaaggcatcagaggcccccttagggcccaggacctaggtccccagccgctagagctgaaagaggccttcaagttgttccagatccagttcaaccggagttacctgagcccagaagagcatgctcaccgcctggacatctttgcccacaacctggcccaggctcagaggctgcaggaggaggacttgggcacagctgagtttggggtgactccattcagtgacctcacagaggaggagtttggccagctctatggctatcggagggcagctggaggggtccccagcatgggcagagaaataaggtctgaagagccagaggagtcagtacctttcagctgtgactggcggaaggtggccagcgccatctcacccatcaaggaccagaaaaactgcaactgctgctgggccatggcagcggcaggcaacatagagaccctgtggcgcatcagtttctgggattttgtggatgtctccgtgcaggaactgctggactgtggccgctgtggggatggctgccacggtggcttcgtctgggacgcgttcataactgtcctcaacaacagcggcctggccagtgaaaaggactacccgttccagggcaaagtcagagcccacaggtgccaccccaagaagtaccagaaggtggcctggatccaggacttcatcatgctgcagaacaacgagcacagaattgcgcagtacctggccacttatggccccatcaccgtgaccatcaacatgaagccccttcagctataccggaaaggtgtgatcaaggccacacccaccacctgtgacccccagcttgtggaccactctgtcctgctggtgggttttggcagcgtcaagtcagaggaggggatatgggcagagacagtctcatcgcagtctcagcctcagcctccacaccccaccccatactggatcctgaagaactcctggggggcccaatggggagagaagggctatttccggctgcaccgagggagcaatacctgtggcatcaccaagttcccgctcactgcccgtgtgcagaaaccggatatgaagccccgagtctcctgccctccctgaacccacctggccccctcagctctgtcctgttaggccaactgcctccttgccagccccacccccaggtttttgcccatcctcccaatctcaatacagcctgaataaaccaagacaagacctctg

SEQ ID NO: 8910 - protein, 376 aa, Homo sapiens
MALTAHPSCLLALLVAGLAQGIRGPLRAQDLGPQPLELKEAFKLFQIQFNRSYLSPEEHAHRLDIFAHNLAQAQRLQEEDLGTAEFGVTPFSDLTEEEFGQLYGYRRAAGGVPSMGREIRSEEPEESVPFSCDWRKVASAISPIKDQKNCNCCWAMAAAGNIETLWRISFWDFVDVSVQELLDCGRCGDGCHGGFVWDAFITVLNNSGLASEKDYPFQGKVRAHRCHPKKYQKVAWIQDFIMLQNNEHRIAQYLATYGPITVTINMKPLQLYRKGVIKATPTTCDPQLVDHSVLLVGFGSVKSEEGIWAETVSSQSQPQPPHPTPYWILKNSWGAQWGEKGYFRLHRGSNTCGITKFPLTARVQKPDMKPRVSCPP

SEQ ID NO: 8911 - DNA, 228 bp, Homo sapiens
tcaccgcctggacatctttgcccacaacctggcccaggctcagaggctgcaggaggaggacttgggcacagctgagtttggggtgactccattcagtgacctcacagaggaggagtttggccagcttctgtcctgttaggccaactgcctccttgccagccccacccccaggtttttgcccatcctcccaatctcaatacagcctgaataaaccaagacaagacctct

SEQ ID NO: 8912 - protein, 46 aa, Homo sapiens
LHSVTSQRRSLASFCPVRPTASLPAPPPGFCPSSQSQYSLNKPRQD

SEQ ID NO: 8913 - DNA, 289 bp, Homo sapiens
gaactgctggactgtggccgctgtggggatggctgccacggtggcttcgtctgggacgcgttcataactgtcctcaacaacagcggcctggccagtgaaaaggactacccgttccagggcaaagtcagagcccacaggtgccaccccaagaagtaccagaaggtggcctggatccaggacttcatcatgctgcagaacaacgagcacagtgcgggcagggcagggacacgggcggatggcagggacagacaccggggcagaggcagacacgctgggctactgggctaga

SEQ ID NO: 8914 - protein, 33 aa, Homo sapiens
MLQNNEHSAGRAGTRADGRDRHRGRGRHAGLLG

SEQ ID NO: 8915 - DNA, 1286 bp, Homo sapiens
ggaagtggcctgaaggcggcgcgccagtcccgagcagtgctcgctcctgctcggggcgctgcggccccgggcgtcgccatgaccagtgagctggacatcttcgtggggaacacgacccttatcgacgaggacgtgtatcgcctctggctcgatggttactcggtgaccgacgcggtggccctgcgggtgcgctcgggaatcctggagcagactggcgccacggcagcggtgctgcagagcgacaccatggaccattaccgcaccttccacatgctcgagcggctgctgcatgcgccgcccaagctactgcaccagctcatcttccagattccgccctcccggcaggcactactcatcgagaggtactatgcctttgatgaggcctttgttcgggaggtgctgggcaagaagctgtccaaaggcaccaagaaagacctggatgacatcagcaccaaaacaggcatcaccctcaagagctgccggagacagggactatgcagccatcgtcttctttgctaacaaccgctttgagacagggaagaaaaaactgcagtatctgagcttcggtgactttgccttctgcgctgagctcatgatccaaaactggacccttggagccgtcgactcacagatggatgacatggacatggacttagacaaggaatttctccaggacttgaaggagctcaaggtgctagtggctgacaaggaccttctggacctgcacaagagcctggtgtgcactgctctccggggaaagctgggcgtcttctctgagatggaagccaacttcaagaacctgtcccgggggctggtgaacgtggccgccaagctgacccacaataaagatgtcagagacctgtttgtggacctcgtggagaagtttgtggaaccctgccgctccgaccactggccactcagcgacgtgcggttcttcctgaatcagtattcagcgtctgtccactccctcgatggcttccgacaccaggccctctgggaccgctacatgggcaccctccgcggctgcctcctgcgcctgtatcatgactgaggtgcctcccaacgctccgcccacgctgacaataaagttgctctgagtttggagactggtcctcgctccggggagcaagtggggggcgtgcagatgtgcctgtgtctgtctctgagcacctggtgtccgtgtacaaggatggatgtgtacagtggctccttgggaactgagacatatctcagggaatggtgtctgtgctcagcccatccaccagaagagtctgctcacaagccag

SEQ ID NO: 8916 - protein, 253 aa, Homo sapiens
MRRPSYCTSSSSRFRPPGRHYSSRGTMPLMRPLFGRCWARSCPKAPRKTWMTSAPKQASPSRAAGDRDYAAIVFFANNRFETGKKKLQYLSFGDFAFCAELMIQNWTLGAVDSQMDDMDMDLDKEFLQDLKELKVLVADKDLLDLHKSLVCTALRGKLGVFSEMEANFKNLSRGLVNVAAKLTHNKDVRDLFVDLVEKFVEPCRSDHWPLSDVRFFLNQYSASVHSLDGFRHQALWDRYMGTLRGCLLRLYHD

SEQ ID NO: 8917 - DNA, 1430 bp, Homo sapiens
ataagctgggtcccgatgccgcgagcggaatctcggcgctcccggaagtggcctgaaggcggcgcgccagtcccgagcagtgctcgctcctgctcggggcgctgcggccccgggcgtcgccatgaccagtgagctggacatcttcgtggggaacacgacccttatcgacgaggacgtgtatcgcctctggctcgatggttactcggtgaccgacgcggtggccctgcgggtgcgctcgggaatcctggagcagactggcgccacggcagcggtgctgcagagcgacaccatggaccattaccgcaccttccacatgctcgagcggctgctgcatgcgccgcccaagctactgcaccagctcatcttccagattccgccctcccggcaggcactactcatcgagaggtactatgcctttgatgaggcctttgttcgggaggtgctgggcaagaagctgtccaaaggcaccaagaaagacctggatgacatcagcaccaaaacaggcatcaccctcaagagctgccggagacagtttgacaactttaaacgggtcttcaaggtggtagaggaaatgcggggctccctggtggacaatattcagcaacacttcctcctctctgaccggttggccagggactatgcagccatcgtcttctttgctaacaaccgctttgagacagggaagaaaaaactgcagtatctgagcttcggtgactttgccttctgcgctgagctcatgatccaaaactggacccttggagccgtcgactcacagatggatgacatggacatggacttagacaaggaatttctccaggacttgaaggagctcaaggtgctagtggctgacaaggaccttctggacctgcacaagagcctggtgtgcactgctctccggggaaagctgggcgtcttctctgagatggaagccaacttcaagaacctgtcccgggggctggtgaacgtggccgccaagctgacccacaataaagatgtcagagacctgtttgtggacctcgtggagaagtttgtggaaccctgccgctccgaccactggccactcagcgacgtgcggttcttcctgaatcagtattcagcgtctgtccactccctcgatggcttccgacaccaggccctctgggaccgctacatgggcaccctccgcggctgcctcctgcgcctgtatcatgactgaggtgcctcccaacgctccgcccacgctgacaataaagttgctctgagtttggagactggtcctcgctccggggagcaagtggggggcgtgcagatgtgcctgtgtctgtctctgagcacctggtgtccgtgtacaaggatggatgtgtacagtggctccttgggaactgagacatatctcagggaatggtgtctgtgctcagcccatccaccagaagagtctgctcacaagccag

SEQ ID NO: 8918 - protein, 357 aa, Homo sapiens; identical to SEQ ID NO: 1358

SEQ ID NO: 8919 - DNA, 674 bp, Homo sapiens
ccactgacccagactcacagatggatgacatggacatggacttagacaaggaatttctccaggacttgaaggagctcaaggtgctagtggctgacaaggaccttctggacctgcacaagagcctggtgtgcactgctctccggggaaagctgggcgtcttctctgagatggaagccaacttcaagaacctgtcccgggggctggtgaacgtggccgccaagctgacccacaataaagatgtcagagacctgtttgtggacctcgtggagaagtttgtggaaccctgccgctccgaccactggccactcagcgacgtgcggttcttcctgaatcagtattcagcgtctgtccactccctcgatggcttccgacaccaggccctctgggaccgctacatgggcaccctccgcggctgcctcctgcgcctgtatcatgactgaggtgcctcccaacgctccgcccacgctgacaataaagttgctctgagtttggagactggtcctcgctccggggagcaagtggggggcgtgcagatgtgcctgtgtctgtctctgagcacctggtgtccgtgtacaaggatggatgtgtacagtggctccttgggaactgagacatatctcagggaatggtgtctgtgctcagcccatccaccagaagagtctgctcacaagcca

SEQ ID NO: 8920 - protein, 139 aa, Homo sapiens
MDDMDMDLDKEFLQDLKELKVLVADKDLLDLHKSLVCTALRGKLGVFSEMEANFKNLSRGLVNVAAKLTHNKDVRDLFVDLVEKFVEPCRSDHWPLSDVRFFLNQYSASVHSLDGFRHQALWDRYMGTLRGCLLRLYHD

SEQ ID NO: 8921 - DNA, 492 bp, Homo sapiens
ccactgacccagactcacagatggatgacatggacatggacttagacaaggaatttctccaggacttgaaggagctcaaggtgctagtggctgacaaggaccttctggacctgcacaagagcctggtgtgcactgctctccggggaaagctgggcgtcttctctgagatggaagccaacttcaagaacctgtcccgggggctggtgaacgtggccgccaagctgacccacaataaagatgtcagagacctgtttgtggacctcgtggagaagtttgtggaaccctgccgctccgaccactggccactcagcgacgtgcggttcttcctgaatcagtattcagcgtctgtccactccctcgatggcttccgacaccaggccctctgggaccgctacatgggcaccctccgcggctgcctcctgcgcctgtatcatgactgaggtgcctcccaacgctccgcccacgctgacaataaagttgctctgagtttgg

SEQ ID NO: 8922 - protein, 139 aa, Homo sapiens; identical to SEQ ID NO: 8920

SEQ ID NO: 8923 - DNA, 1103 bp, Homo sapiens
ggaagtggcctgaaggcggcgcgccagtcccgagcagtgctcgctcctgctcggggcgctgcggccccgggcgtcgccatgaccagtgagctggacatcttcgtggggaacacgacccttatcgacgaggacgtgtatcgcctctggctcgatggttactcggtgaccgacgcggtggccctgcgggtgcgctcgggaatcctggagcagactggcgccacggcagcggtgctgcagagcgacaccatggaccattaccgcaccttccacatgctcgagcggctgctgcatgcgccgcccaagctactgcaccagctcatcttccagattccgccctcccggcaggcactactcatcgagaggtactatgcctttgatgaggcctttgttcgggaggtgctgggcaagaagctgtccaaaggcaccaagaaagacctggatgacatcagcaccaaaacaggcatcaccctcaagagctgccggagacagggactatgcagccatcgtcttctttgctaacaaccgctttgagacagggaagaaaaaactgcagtatctgagcttcggtgactttgccttctgcgctgagctcatgatccaaaactggacccttggagccgtcgactcacagatggatgacatggacatggacttagacaaggaatttctccaggacttgaaggagctcaaggtgctagtggctgacaaggaccttctggacctgcacaagagcctggtgtgcactgctctccggggaaagctgggcgtcttctctgagatggaagccaacttcaagaacctgtcccgggggctggtgaacgtggccgccaagctgacccacaataaagatgtcagagacctgtttgtggacctcgtggagaagtttgtggaaccctgccgctccgaccactggccactcagcgacgtgcggttcttcctgaatcagtattcagcgtctgtccactccctcgatggcttccgacaccaggccctctgggaccgctacatgggcaccctccgcggctgcctcctgcgcctgtatcatgactgaggtgcctcccaacgctccgcccacgctgacaataaagttgctctgagtttgg

SEQ ID NO: 8924 - protein, 253 aa, Homo sapiens; identical to SEQ ID NO: 8916

SEQ ID NO: 8925 - DNA, 1247 bp, Homo sapiens
ataagctgggtcccgatgccgcgagcggaatctcggcgctcccggaagtggcctgaaggcggcgcgccagtcccgagcagtgctcgctcctgctcggggcgctgcggccccgggcgtcgccatgaccagtgagctggacatcttcgtggggaacacgacccttatcgacgaggacgtgtatcgcctctggctcgatggttactcggtgaccgacgcggtggccctgcgggtgcgctcgggaatcctggagcagactggcgccacggcagcggtgctgcagagcgacaccatggaccattaccgcaccttccacatgctcgagcggctgctgcatgcgccgcccaagctactgcaccagctcatcttccagattccgccctcccggcaggcactactcatcgagaggtactatgcctttgatgaggcctttgttcgggaggtgctgggcaagaagctgtccaaaggcaccaagaaagacctggatgacatcagcaccaaaacaggcatcaccctcaagagctgccggagacagtttgacaactttaaacgggtcttcaaggtggtagaggaaatgcggggctccctggtggacaatattcagcaacacttcctcctctctgaccggttggccagggactatgcagccatcgtcttctttgctaacaaccgctttgagacagggaagaaaaaactgcagtatctgagcttcggtgactttgccttctgcgctgagctcatgatccaaaactggacccttggagccgtcgactcacagatggatgacatggacatggacttagacaaggaatttctccaggacttgaaggagctcaaggtgctagtggctgacaaggaccttctggacctgcacaagagcctggtgtgcactgctctccggggaaagctgggcgtcttctctgagatggaagccaacttcaagaacctgtcccgggggctggtgaacgtggccgccaagctgacccacaataaagatgtcagagacctgtttgtggacctcgtggagaagtttgtggaaccctgccgctccgaccactggccactcagcgacgtgcggttcttcctgaatcagtattcagcgtctgtccactccctcgatggcttccgacaccaggccctctgggaccgctacatgggcaccctccgcggctgcctcctgcgcctgtatcatgactgaggtgcctcccaacgctccgcccacgctgacaataaagttgctctgagtttgg

SEQ ID NO: 8926 - protein, 357 aa, Homo sapiens; identical to SEQ ID NO: 1358

SEQ ID NO: 8927 - DNA, 1617 bp, Homo sapiens
cgcggtggccctgcgggtgcgctcgggaatcctggagcagactggcgccacggcagcggtgctgcagagcgacaccatggaccattaccgcaccttccacatgctcgagcggctgctgcatgcgccgcccaagctactgcaccagctcatcttccagattccgccctcccggcaggcactactcatcgagaggtgctcaccctctgggatggtggagacatcaaccagtctgactgtatacccattttgccggctgaaacaggcccagggagggatgggatttacccagccatcagaaagttgagagtggaaggggtcagacctaggccctgctaggccccgccagactccctttcctgtcttttatggagggtcaatggtgttctctgactccacaaggtactatgcctttgatgaggcctttgttcgggaggtgctgggcaagaagctgtccaaaggcaccaagaaagacctggatgacatcagcaccaaaacaggcatcaccctcaagagctgccggagacagtttgacaactttaaacgggtcttcaaggtggtagaggaaatgcggggctccctggtggacaatattcagcaacacttcctcctctctgaccggttggccagggactatgcagccatcgtcttctttgctaacaaccgctttgagacagggaagaaaaaactgcagtatctgagcttcggtgactttgccttctgcgctgagctcatgatccaaaactggacccttggagccgtcggtgaggcccccactgacccaggtgcctggacgcctccccatcctcaggacctgattccccaccagtagtttctcccacaggccctcagttcctggcatccgctcctgttcatggcccccacccaggctccccctgcccatagaatgttttccccacacacaccttgtctgcagacaaagggcccattgcctctctgtggcctggggcatgtcactccatctctctgacactccatttcctcttttgtccccaggggggaaataaggtggtgggtgaggaaaggcttaggctatcacaggaggggtttttatcacccacccccacccccttcatggcctcacagactcacagatggatgacatggacatggacttagacaaggaatttctccaggacttgaaggagctcaaggtgctagtggctgacaaggaccttctggacctgcacaagaggtgaccttgtaggggcccatggggcggggcctgcagtaggggcccaggtggctataggcgtgaccctgtctctctgcagcctggtgtgcactgctctccggggaaagctgggcgtcttctctgagatggaagccaacttcaaggtctgtggtcccatccagcctctgacccttggcatcttcagcctccagttcgccacccctaccgggcagctctgcccctgccagggattggccggcaggtggcactgctgctccctctggtggccgctgacgggagcagctcataaacaatggggacttggttgatggagggaggtggatggatctggggaggggcctgctcctcctcccccagcttctgtgctcagctgccaacttctggggcagaaagcagagctccaa

SEQ ID NO: 8928 - protein, 150 aa, Homo sapiens
MVFSDSTRYYAFDEAFVREVLGKKLSKGTKKDLDDISTKTGITLKSCRRQFDNFKRVFKVVEEMRGSLVDNIQQHFLLSDRLARDYAAIVFFANNRFETGKKKLQYLSFGDFAFCAELMIQNWTLGAVGEAPTDPGAWTPPHPQDLIPHQ

SEQ ID NO: 8929 - DNA, 1280 bp, Homo sapiens
ataagctgggtcccgatgccgcgagcggaatctcggcgctcccggaagtggcctgaaggcggcgcgccagtcccgagcagtgctcgctcctgctcggggcgctgcggccccgggcgtcgccatgaccagtgagctggacatcttcgtggggaacacgacccttatcgacgaggacgtgtatcgcctctggctcgatggttactcggtgaccgacgcggtggccctgcgggtgcgctcgggaatcctggagcagactggcgccacggcagcggtgctgcagagcgacaccatggaccattaccgcaccttccacatgctcgagcggctgctgcatgcgccgcccaagctactgcaccagctcatcttccagattccgccctcccggcaggcactactcatcgagaggtactatgcctttgatgaggcctttgttcgggaggtgctgggcaagaagctgtccaaaggcaccaagaaagacctggatgacatcagcaccaaaacaggcatcaccctcaagagctgccggagacagtttgacaactttaaacgggtcttcaaggtggtagaggaaatgcggggctccctggtggacaatattcagcaacacttcctcctctctgaccggttggccagggactatgcagccatcgtcttctttgctaacaaccgctttgagacagggaagaaaaaactgcagtatctgagcttcggtgactttgccttctgcgctgagctcatgatccaaaactggacccttggagccgtcgactcacagatggatgacatggacatggacttagacaaggaatttctccaggacttgaaggagctcaaggtgctagtggctgacaaggaccttctggacctgcacaagaggtgaccttgtaggggcccatggggcggggcctgcagtaggggcccaggtggctataggcgtgaccctgtctctctgcagcctggtgtgcactgctctccggggaaagctgggcgtcttctctgagatggaagccaacttcaaggtctgtggtcccatccagcctctgacccttggcatcttcagcctccagttcgccacccctaccgggcagctctgcccctgccagggattggccggcaggtggcactgctgctccctctggtggccgctgacgggagcagctcataaacaatggggacttggttgatggagggaggtggatggatctggggaggggcctgctcctcctcccccagcttctgtgctcagctgccaacttctggggcagaaagcagagctccaa

SEQ ID NO: 8930 - protein, 252 aa, Homo sapiens
MTSELDIFVGNTTLIDEDVYRLWLDGYSVTDAVALRVRSGILEQTGATAAVLQSDTMDHYRTFHMLERLLHAPPKLLHQLIFQIPPSRQALLIERYYAFDEAFVREVLGKKLSKGTKKDLDDISTKTGITLKSCRRQFDNFKRVFKVVEEMRGSLVDNIQQHFLLSDRLARDYAAIVFFANNRFETGKKKLQYLSFGDFAFCAELMIQNWTLGAVDSQMDDMDMDLDKEFLQDLKELKVLVADKDLLDLHKR

SEQ ID NO: 8931 - DNA, 740 bp, Homo sapiens
gaagtggcctgaaggcggcgcgccagtcccgagcagtgctcgctcctgctcggggcgctgcggccccgggcgtcgccatgaccagtgagctggacatcttcgtggggaacacgacccttatcgacgaggacgtgtatcgcctctggctcgatggttactcggtgaccgacgcggtggccctgcgggtgcgctcgggaatcctggagcagactggcgccacggcagcggtgctgcagagcgacaccatggaccattaccgcaccttccacatgctcgagcggctgctgcatgcgccgcccaagctactgcaccagctcatcttccagattccgccctcccggcaggcactactcatcgagaggtactatgcctttgatgaggcctttgttcgggaggtgctgggcaagaagctgtccaaaggcaccaagaaagacctggatgacatcagcaccaaaacaggcatcaccctcaagagctgccggagacaggtatgcactgcatccacacggacacagcatcccatctacacttcactccctccctttggccactggcccagttccagcctctgattgtggcagcagcttcatacctagtcttctcctcccttcccctttcccctcctttttttttttttttttcgagatggagtcttgctctgtggcccaagctggagtgcagtggcgcgacctcagctcactgcaacctccgcctcctgggttcaggtaattcttgtgcct

SEQ ID NO: 8932 - protein, 164 aa, Homo sapiens
MTSELDIFVGNTTLIDEDVYRLWLDGYSVTDAVALRVRSGILEQTGATAAVLQSDTMDHYRTFHMLERLLHAPPKLLHQLIFQIPPSRQALLIERYYAFDEAFVREVLGKKLSKGTKKDLDDISTKTGITLKSCRRQVCTASTRTQHPIYTSLPPFGHWPSSSL

SEQ ID NO: 8933 - DNA, 678 bp, Homo sapiens
agtgctcgctcctgctcggggcgctgcggccccgggcgtcgccatgaccagtgagctggacatcttcgtggggaacacgacccttatcgacgaggacgtgtatcgcctctggctcgatggttactcggtgaccgacgcggtggccctgcgggtgcgctcgggaatcctggagcagactggcgccacggcagcggtgctgcagagcgacaccatggaccattaccgcaccttccacatgctcgagcggctgctgcatgcgccgcccaagctactgcaccagctcatcttccagattccgccctcccggcaggcactactcatcgagaggtgctcaccctctgggatggtggagacatcaaccagtctgactgtatacccattttgccggctgaaacaggcccagggagggatgggatttacccagccatcagaaagttgagagtggaaggggtcagacctaggccctgctaggccccgccagactccctttcctgtcttttatggagggtcaatggtgttctctgactccacaaggtactatgcctttgatgaggcctttgttcgggaggtgctgggcaagaagctgtccaaaggcaccaagaaagacctggatgacatcagcaccaaaacaggcatcaccctcaagagctgccggagacaggtatgcactgcatccac

SEQ ID NO: 8934 - protein, 131 aa, Homo sapiens
MTSELDIFVGNTTLIDEDVYRLWLDGYSVTDAVALRVRSGILEQTGATAAVLQSDTMDHYRTFHMLERLLHAPPKLLHQLIFQIPPSRQALLIERCSPSGMVETSTSLTVYPFCRLKQAQGGMGFTQPSES

SEQ ID NO: 8935 - DNA, 1587 bp, Homo sapiens
gacagactgcgacctccttgaggatggaatcggtattttggttaaatttatttctgcatgggccttgcacataaaaaacgtttattgaacaaacgaatcctgtatgttcctccccccaggcaggaaacgctccctgggagggagggtagtctattggtgagctaggacgtttggactcagggttccgaggaaccaggagcgatccttagtgggccgagacttccgaatttgatcaaaggtaaagagggactggagagcggtccatctgacttctgtgggggatgggcaggagtcaggggcggacgcctgaatcttgtttctcagaagagccgagaggcctaggctcaagcttggggcgatccggtacttggaggttcgaagctcctagtttcgggttgagaccgatgtggagggcgatgacgcgcgggttccttgacatcgaggatcagtaacacccggagtgggtggggaacgaggggggcggcccctgagctcaggccccgcccctttccggggacgtttcaccggattggctgtccttccataacgacatgcggccccgccccggcgcgcgccccgccgcgtgcccagcccgggtagctgctgcagcctacgctgcctcggccactgcctgccgcgtgcggagccggagcccgagcctgagtggcgccgggcccgacgtggggctcctgggccgcggcggcgggcgggcgatgctccagaggcctgaccagccatggaggccgaggcaggcggcctggaggagctgacggacgaggagatggcggcgctaggcaaggaagagctagtgcggcgcctgcggcgggaggaggcggcgcgcctggcggcactggtgcagcgcggccgcctcatgcaggaggtgaatcggcagctgcagggccacctgggcgagatccgcgagctcaagcagctcaaccggcgtctgcaggcagagaaccgtgagctgcgcgacctctgctgcttcctggactcggagcgccagcgcgggcggcgcgccgcacgccagtggcagctcttcgggacccaagcatcccgggccgtgcgcgaggacctgggcggctgttggcagaagctggccgagctggagggccgccaggaggagctgctgcgggagaacctagcgcttaaggagctctgcctggcgctgggcgaagaatggggcccccgcggcggccccagcggcgccgggggatcaggagccgggccagcacccgagcttgccttgcccccgtgcgggccccgcgacctaggcgatggaagctccagcactggcagcgtgggcagtccggatcagttgcccctggcctgttcccccgatgattgaaggcactgcttcctccacgccgacgcccgcccggattgctccccgagccccgggaccgctgtggacctcgggacctggacgccgtcctggctgcgcaggaggggccgctggcatggactaagaaatcctgacaccaagaagggcccctcgctcttgctggcagggcagcagggggactgaaggctggagcggagggacttgctgggggttggattgggggtaataaacccggacggaagcgg

SEQ ID NO: 8936 - protein, 202 aa, Homo sapiens; identical to SEQ ID NO: 1362

SEQ ID NO: 8937 - DNA, 948 bp, Homo sapiens
cgatccggtacttggaggttcgaagctcctagtttcgggttgagaccgatgtggagggcgatgacgcgcgggttccttgacatcgaggatcagtaacacccggagtgggtggggaacgaggggggcggcccctgagctcaggccccgcccctttccggggacgtttcaccggattggctgtccttccataacgacatgcggccccgccccggcgcgcgccccgccgcgtgcccagcccgggtagctgctgcagcctacgctgcctcggccactgcctgccgcgtgcggagccggagcccgagcctgagtggcgccgggcccgacgtggggctcctgggccgcggcggcgggcgggcgatgctccagaggcctgaccagccatggaggccgaggcaggcggcctggaggagctgacggacgaggagatggcggcgctaggcaaggaagagctagtgcggcgcctgcggcgggaggagctgctgcgggagaacctagcgcttaaggagctctgcctggcgctgggcgaagaatggggcccccgcggcggccccagcggcgccgggggatcaggagccgggccagcacccgagcttgccttgcccccgtgcgggccccgcgacctaggcgatggaagctccagcactggcagcgtgggcagtccggatcagttgcccctggcctgttcccccgatgattgaaggcactgcttcctccacgccgacgcccgcccggattgctccccgagccccgggaccgctgtggacctcgggacctggacgccgtcctggctgcgcaggaggggccgctggcatggactaagaaatcctgacaccaagaagggcccctcgctcttgctggcagggcagcagggggactgaaggctggagcggagggacttgctgggggttggattgggggtaataaacccggacggaagcggagcccacg

SEQ ID NO: 8938 - protein, 105 aa, Homo sapiens
MEAEAGGLEELTDEEMAALGKEELVRRLRREELLRENLALKELCLALGEEWGPRGGPSGAGGSGAGPAPELALPPCGPRDLGDGSSSTGSVGSPDQLPLACSPDD

SEQ ID NO: 8939 - DNA, 1305 bp, Homo sapiens
cgatccggtacttggaggttcgaagctcctagtttcgggttgagaccgatgtggagggcgatgacgcgcgggttccttgacatcgaggatcagtaacacccggagtgggtggggaacgaggggggcggcccctgagctcaggccccgcccctttccggggacgtttcaccggattggctgtccttccataacgacatgcggccccgccccggcgcgcgccccgccgcgtgcccagcccgggtagctgctgcagcctacgctgcctcggccactgcctgccgcgtgcggagccggagcccgagcctgagtggcgccgggcccgacgtggggctcctgggccgcggcggcgggcgggcgatgctccagaggcctgaccagccatggaggccgaggcaggcggcctggaggagctgacggacgaggagatggcggcgctaggcaaggaagagctagtgcggcgcctgcggcgggaggagctgctgcgggagaacctagcgcttaaggagctctgcctggcgctgggcgaagaatggggcccccgcggcggccccagcggcgccgggggatcaggagccgggccagcacccgagcttgccttgcccccgtgcgggccccgcgacctaggcgatggaagctccagcactggcagcgtgggcagtccggatcagttgcccctggcctgttcccccgatgattgaaggcactgcttcctccacgccgacgcccgcccggattgctccccgagccccgggaccgctgtggacctcgggacctggacgccgtcctggctgcgcaggaggggccgctggcatggactaagaaatcctgacaccaagaagggcccctcgctcttgctggcagggcagcagggggactgaaggctggagcggagggacttgctgggggttggattgggggtaataaacccggacggaagcggagcccacggcctgggcagcgtctgtttggtactcgccggggttggggcgagggtggggtgctgatacagggtacaattcccatccagaaggactgcagaactaatgattcccccattacttcgagcctggggtgggatgcggggcagtggtaaaccagacttcccccatcgggcgccgggaccggccttaatccagcccctgaagtggctccagctcccttcccggctccttcctgtccaagacaatggggcaggaagcaggtgctgggggcctagaaccactcggccgcctcctctgaggctggaagggggcataacagcgcccctccgtggcacacgcagcagcactgtgggcccccacgggg

SEQ ID NO: 8940 - protein, 105 aa, Homo sapiens; identical to SEQ ID NO: 8938

SEQ ID NO: 8941 - DNA, 814 bp, Homo sapiens
gctgcctcggccactgcctgccgcgtgcggagccggagcccgagcctgagtggcgccgggcccgacgtggggctcctgggccgcggcggcgggcgggcgatgctccagaggcctgaccagccatggaggccgaggcaggcggcctggaggagctgacggacgaggagatggcggcgctaggcaaggaagagctagtgcggcgcctgcggcgggaggaggcggcgcgcctggcggcactggtgcagcgcggccgcctcatgcaggaggtgaatcggcagctgcagggccacctgggcgagatccgcgagctcaagcagctcaaccggcgtctgcaggcagagaaccgtgagctgcgcgacctctgctgcttcctggactcggagcgccagcgcgggcggcgcgccgcacgccagtggcagctcttcgggacccaagcatcccgggccgtgcgcgaggacctgggcggctgttggcagaagctggccgagctggagggccgccaggaggagctgctgcgggagaacctagcgcttaaggagctctgcctggcgctgggcgaagaatggggcccccgcggcggccccagcggcgccgggggatcaggagccgggccagcacccgagcttgccttgcccccgtgcgggccccgcgacctaggcgatggaagctccagcactggcagccatggactaagaaatcctgacaccaagaagggcccctcgctcttgctggcagggcagcagggggactgaaggctggagcggagggacttgctgggggttggattgggggtaataaacccggacggaagcgg

SEQ ID NO: 8942 - protein, 209 aa, Homo sapiens
MEAEAGGLEELTDEEMAALGKEELVRRLRREEAARLAALVQRGRLMQEVNRQLQGHLGEIRELKQLNRRLQAENRELRDLCCFLDSERQRGRRAARQWQLFGTQASRAVREDLGGCWQKLAELEGRQEELLRENLALKELCLALGEEWGPRGGPSGAGGSGAGPAPELALPPCGPRDLGDGSSSTGSHGLRNPDTKKGPSLLLAGQQGD

SEQ ID NO: 8943 - DNA, 698 bp, Homo sapiens
tccgcttccgtccgggtttattacccccaatccaacccccagcaagtccctccgctaggtcgcggggcccgcacgggggcaaggcaagctcgggtgctggcccggctcctgatcccccggcgccgctggggccgccgcgggggccccattcttcgcccagcgccaggcagagctccttaagcgctaggttctcccgcagcagctcctcctggcggccctccagctcggccagcttctgccaacagccgcccaggtcctcgcgcacggcccgggatgcttgggtcccgaagagctgccactggcgtgcggcgcgccgcccgcgctggcgctccgagtccaggaagcagcagaggtcgcgcagctcacggttctctgcctgcagacgccggttgagctgcttgagctcgcggatctcgcccaggtggccctgcagctgccgattcacctcctgcatgaggcggccgcgctgcaccagtgccgccaggcgcgccgcctcctcccgccgcaggcgccgcactagctcttccttgcctagcgccgccatctcctcgtccgtcagctcctccaggccgcctgcctcggcctccatggctggtcaggcctctggagcatcgcccgcccgccgccgcggcccaggagccccacgtcgggcccggcgccactcaggctcgggctccggctccgcacgcggcaggcag

SEQ ID NO: 8944 - protein, 81 aa, Homo sapiens
MRRPRCTSAARRAASSRRRRRTSSSLPSAAISSSVSSSRPPASASMAGQASGASPARRRGPGAPRRARRHSGSGSGSARGR

SEQ ID NO: 8945 - DNA, 898 bp, Homo sapiens
gtatcagcaccccaccctcgccccaaccccggcgagtaccaaacagacgctgcccaggccgtgggctccgcttccgtccgggtttattacccccaatccaacccccagcaagtccctccgctccagccttcagtccccctgctgccctgccagcaagagcgaggggcccttcttggtgtcaggatttcttagtccatgccagcggcccctcctgcgcagccaggacggcgtccaggtcccgaggtccacagcggtcccggggctcggggagcaatccgggcgggcgtcggcgtggaggaagcagtgccttcaatcatcgggggaacaggccaggggcaactgatccggactgcccacgctgccagtgctggagcttccatcgcctaggttctcccgcagcagctcctcctggcggccctccagctcggccagcttctgccaacagccgcccaggtcctcgcgcacggcccgggatgcttgggtcccgaagagctgccactggcgtgcggcgcgccgcccgcgctggcgctccgagtccaggaagcagcagaggtcgcgcagctcacggttctctgcctgcagacgccggttgagctgcttgagctcgcggatctcgcccaggtggccctgcagctgccgattcacctcctgcatgaggcggccgcgctgcaccagtgccgccaggcgcgccgcctcctcccgccgcaggcgccgcactagctcttccttgcctagcgccgccatctcctcgtccgtcagctcctccaggccgcctgcctcggcctccatggctggtcaggcctctggagcatcgcccgcccgccgccgcggcccaggagccccacgtcgggcccggcgccactcaggctcgggctccggctccgcacgcggcaggcag

SEQ ID NO: 8946 - protein, 81 aa, Homo sapiens; identical to SEQ ID NO: 8944

SEQ ID NO: 8947 - DNA, 2101 bp, Homo sapiens
ctggaagatgagaaatctgggctgcagcgagagattgaggagctgcagaagcagaaggagcgcctagagctggtgctggaagcccaccgacccatctgcaaaatcccggaaggagccaaggagggggacacaggcagtaccagtggcaccagcagcccaccagccccctgccgccctgtaccttgtatctccctttccccagggcctgtgcttgaacctgaggcactgcacacccccacactcatgaccacaccctccctaactcctttcacccccagcctggtcttcacctaccccagcactcctgagccttgtgcctcagctcatcgcaagagtagcagcagcagcggagacccatcctctgaccccctgaaccgcacagctcaggaggcgcccttggcttctgtgatgagctgatctgcggatctcagctttgagaagccttcagctccagggaatccaagcctccacagcgagggcagctgctatttattttcctaaagagagtatttttatacaaacctaccaaaatggaataaaaggcttgaagctgtggcctgagtgcctcactggacccagaggccaatgggagagtatttggagccctaggtcccagccttagctctacagactcactgcatgaccttggacaaattctttgatatttttggactttgtcttatctgacaagtggggctacatccgctcggcctcatctccgggactgaggggagacagtcctctggggtaaaagcgaagaggcttaccgcccctctccccgtgggggcccacagtgctgctgcgtgtgccacggaggggcgctgttatgcccccttccagcctcagaggaggcggccgagtggttctaggcccccagcacctgcttcctgccccattgtcttggacaggaaggagccgggaagggagctggagccacttcaggggctggattaaggccggtcccggcgcccgatgggggaagtctggtttaccactgccccgcatcccaccccaggctcgaagtaatgggggaatcattagttctgcagtccttctggatgggaattgtaccctgtatcagcaccccaccctcgccccaaccccggcgagtaccaaacagacgctgcccaggccgtgggctccgcttccgtccgggtttattacccccaatccaacccccagcaagtccctccgctccagccttcagtccccctgctgccctgccagcaagagcgaggggcccttcttggtgtcaggatttcttagtccatgccagcggcccctcctgcgcagccaggacggcgtccaggtcccgaggtccacagcggtcccggggctcggggagcaatccgggcgggcgtcggcgtggaggaagcagtgccttcaatcatcgggggaacaggccaggggcaactgatccggactgcccacgctgccagtgctggagcttccatcgcctaggtcgcggggcccgcacgggggcaaggcaagctcgggtgctggcccggctcctgatcccccggcgccgctggggccgccgcgggggccccattcttcgcccagcgccaggcagagctccttaagcgctaggttctcccgcagcagctcctcctggcggccctccagctcggccagcttctgccaacagccgcccaggtcctcgcgcacggcccgggatgcttgggtcccgaagagctgccactggcgtgcggcgcgccgcccgcgctggcgctccgagtccaggaagcagcagaggtcgcgcagctcacggttctctgcctgcagacgccggttgagctgcttgagctcgcggatctcgcccaggtggccctgcagctgccgattcacctcctgcatgaggcggccgcgctgcaccagtgccgccaggcgcgccgcctcctcccgccgcaggcgccgcactagctcttccttgcctagcgccgccatctcctcgtccgtcagctcctccaggccgcctgcctcggcctccatggctggtcaggcctctggagcatcgcccgcccgccgccgcggcccaggagccccacgtcgggcccggcgccactcaggctcgggctccggctccgcacgcggcaggcag

SEQ ID NO: 8948 - protein, 57 aa, Homo sapiens
MTTPSLTPFTPSLVFTYPSTPEPCASAHRKSSSSSGDPSSDPLNRTAQEAPLASVMS

SEQ ID NO: 8949 - DNA, 2999 bp, Homo sapiens
ataaaaagaaaagactccgcacggcgcgggtgagtcagaacccagcagccgtgtaccccgcagagccgccagccccgggcatgttccgagacttcggggaacccggcccgagctccgggaacggcggcgggtacggcggccccgcgcagcccccggccgcagcgcaggcagcccagcagaagttccacctggtgccaagcatcaacaccatgagtggcagtcaggagctgcagtggatggtacagcctcatttcctggggcccagcagttaccccaggcctctgacctaccctcagtacagccccccacaaccccggccaggagtcatccgggccctggggccgcctccaggggtacgtcgaaggccttgtgaacaggagactgacaaactggaagatgagaaatctgggctgcagcgagagattgaggagctgcagaagcagaaggagcgcctagagctggtgctggaagcccaccgacccatctgcaaaatcccggaaggagccaaggagggggacacaggcagtaccagtggcaccagcagcccaccagccccctgccgccctgtaccttgtatctccctttccccagggcctgtgcttgaacctgaggcactgcacacccccacactcatgaccacaccctccctaactcctttcacccccagcctggtcttcacctaccccagcactcctgagccttgtgcctcagctcatcgcaagagtagcagcagcagcggagacccatcctctgacccccttggctctccaaccctcctcgctttgtgaggcgcctgagccctactccctgcagatgccaccctagccaatgtctcctccccttcccccaccggtccagctggcctggacagtatcccacatccaactccagcaacttcttctccatccctctaatgagactgaccatattgtgcttcacagtagagccagcttggggccaccaaagctgcccactgtttctcttgagctggcctctctagcacaatttgcactaaatcagagacaaaatatttcccatttgtgccagaggaatcctggcagcccagagactttgtagatccttagaggtcctctggagccctaaccccttccagatcactgccacactctccatcaccctcttcctgtgatccacccaaccctatctcctgacagaaggtgccactttacccacctagaacactaactcaccagccccactgccagcagcagcaggtgattggaccaggccattctgccgccccctcctgaaccgcacagctcaggaggcgcccttggcttctgtgatgagctgatctgcggatctcagctttgagaagccttcagctccagggaatccaagcctccacagcgagggcagctgctatttattttcctaaagagagtatttttatacaaacctaccaaaatggaataaaaggcttgaagctgtggcctgagtgcctcactggacccagaggccaatgggagagtatttggagccctaggtcccagccttagctctacagactcactgcatgaccttggacaaattctttgatatttttggactttgtcttatctgacaagtggggctacatccgctcggcctcatctccgggactgaggggagacagtcctctggggtaaaagcgaagaggcttaccgcccctctccccgtgggggcccacagtgctgctgcgtgtgccacggaggggcgctgttatgcccccttccagcctcagaggaggcggccgagtggttctaggcccccagcacctgcttcctgccccattgtcttggacaggaaggagccgggaagggagctggagccacttcaggggctggattaaggccggtcccggcgcccgatgggggaagtctggtttaccactgccccgcatcccaccccaggctcgaagtaatgggggaatcattagttctgcagtccttctggatgggaattgtaccctgtatcagcaccccaccctcgccccaaccccggcgagtaccaaacagacgctgcccaggccgtgggctccgcttccgtccgggtttattacccccaatccaacccccagcaagtccctccgctccagccttcagtccccctgctgccctgccagcaagagcgaggggcccttcttggtgtcaggatttcttagtccatgccagcggcccctcctgcgcagccaggacggcgtccaggtcccgaggtccacagcggtcccggggctcggggagcaatccgggcgggcgtcggcgtggaggaagcagtgccttcaatcatcgggggaacaggccaggggcaactgatccggactgcccacgctgccagtgctggagcttccatcgcctaggtcgcggggcccgcacgggggcaaggcaagctcgggtgctggcccggctcctgatcccccggcgccgctggggccgccgcgggggccccattcttcgcccagcgccaggcagagctccttaagcgctaggttctcccgcagcagctcctcctggcggccctccagctcggccagcttctgccaacagccgcccaggtcctcgcgcacggcccgggatgcttgggtcccgaagagctgccactggcgtgcggcgcgccgcccgcgctggcgctccgagtccaggaagcagcagaggtcgcgcagctcacggttctctgcctgcagacgccggttgagctgcttgagctcgcggatctcgcccaggtggccctgcagctgccgattcacctcctgcatgaggcggccgcgctgcaccagtgccgccaggcgcgccgcctcctcccgccgcaggcgccgcactagctcttccttgcctagcgccgccatctcctcgtccgtcagctcctccaggccgcctgcctcggcctccatggctggtcaggcctctggagcatcgcccgcccgccgccgcggcccaggagccccacgtcgggcccggcgccactcaggctcgggctccggctccgcacgcggcaggcag

SEQ ID NO: 8950 - protein, 235 aa, Homo sapiens
MFRDFGEPGPSSGNGGGYGGPAQPPAAAQAAQQKFHLVPSINTMSGSQELQWMVQPHFLGPSSYPRPLTYPQYSPPQPRPGVIRALGPPPGVRRRPCEQETDKLEDEKSGLQREIEELQKQKERLELVLEAHRPICKIPEGAKEGDTGSTSGTSSPPAPCRPVPCISLSPGPVLEPEALHTPTLMTTPSLTPFTPSLVFTYPSTPEPCASAHRKSSSSSGDPSSDPLGSPTLLAL

SEQ ID NO: 8951 - DNA, 2909 bp, Homo sapiens
ataaaaagaaaagactccgcacggcgcgggtgagtcagaacccagcagccgtgtaccccgcagagccgccagccccgggcatgttccgagacttcggggaacccggcccgagctccgggaacggcggcgggtacggcggccccgcgcagcccccggccgcagcgcaggcagcccagcagatcagcccggaggaagaggagcgccgccgagtaaggcgcgagcggaacaagctggctgcggccaagtgcaggaaccggaggaaggaactgaccgacttcctgcaggcggagactgacaaactggaagatgagaaatctgggctgcagcgagagattgaggagctgcagaagcagaaggagcgcctagagctggtgctggaagcccaccgacccatctgcaaaatcccggaaggagccaaggagggggacacaggcagtaccagtggcaccagcagcccaccagccccctgccgccctgtaccttgtatctccctttccccagggcctgtgcttgaacctgaggcactgcacacccccacactcatgaccacaccctccctaactcctttcacccccagcctggtcttcacctaccccagcactcctgagccttgtgcctcagctcatcgcaagagtagcagcagcagcggagacccatcctctgacccccttggctctccaaccctcctcgctttgtgaggcgcctgagccctactccctgcagatgccaccctagccaatgtctcctccccttcccccaccggtccagctggcctggacagtatcccacatccaactccagcaacttcttctccatccctctaatgagactgaccatattgtgcttcacagtagagccagcttggggccaccaaagctgcccactgtttctcttgagctggcctctctagcacaatttgcactaaatcagagacaaaatatttcccatttgtgccagaggaatcctggcagcccagagactttgtagatccttagaggtcctctggagccctaaccccttccagatcactgccacactctccatcaccctcttcctgtgatccacccaaccctatctcctgacagaaggtgccactttacccacctagaacactaactcaccagccccactgccagcagcagcaggtgattggaccaggccattctgccgccccctcctgaaccgcacagctcaggaggcgcccttggcttctgtgatgagctgatctgcggatctcagctttgagaagccttcagctccagggaatccaagcctccacagcgagggcagctgctatttattttcctaaagagagtatttttatacaaacctaccaaaatggaataaaaggcttgaagctgtggcctgagtgcctcactggacccagaggccaatgggagagtatttggagccctaggtcccagccttagctctacagactcactgcatgaccttggacaaattctttgatatttttggactttgtcttatctgacaagtggggctacatccgctcggcctcatctccgggactgaggggagacagtcctctggggtaaaagcgaagaggcttaccgcccctctccccgtgggggcccacagtgctgctgcgtgtgccacggaggggcgctgttatgcccccttccagcctcagaggaggcggccgagtggttctaggcccccagcacctgcttcctgccccattgtcttggacaggaaggagccgggaagggagctggagccacttcaggggctggattaaggccggtcccggcgcccgatgggggaagtctggtttaccactgccccgcatcccaccccaggctcgaagtaatgggggaatcattagttctgcagtccttctggatgggaattgtaccctgtatcagcaccccaccctcgccccaaccccggcgagtaccaaacagacgctgcccaggccgtgggctccgcttccgtccgggtttattacccccaatccaacccccagcaagtccctccgctccagccttcagtccccctgctgccctgccagcaagagcgaggggcccttcttggtgtcaggatttcttagtccatgccagcggcccctcctgcgcagccaggacggcgtccaggtcccgaggtccacagcggtcccggggctcggggagcaatccgggcgggcgtcggcgtggaggaagcagtgccttcaatcatcgggggaacaggccaggggcaactgatccggactgcccacgctgccagtgctggagcttccatcgcctaggtcgcggggcccgcacgggggcaaggcaagctcgggtgctggcccggctcctgatcccccggcgccgctggggccgccgcgggggccccattcttcgcccagcgccaggcagagctccttaagcgctaggttctcccgcagcagctcctcctggcggccctccagctcggccagcttctgccaacagccgcccaggtcctcgcgcacggcccgggatgcttgggtcccgaagagctgccactggcgtgcggcgcgccgcccgcgctggcgctccgagtccaggaagcagcagaggtcgcgcagctcacggttctctgcctgcagacgccggttgagctgcttgagctcgcggatctcgcccaggtggccctgcagctgccgattcacctcctgcatgaggcggccgcgctgcaccagtgccgccaggcgcgccgcctcctcccgccgcaggcgccgcactagctcttccttgcctagcgccgccatctcctcgtccgtcagctcctccaggccgcctgcctcggcctccatggctggtcaggcctctggagcatcgcccgcccgccgccgcggcccaggagccccacgtcgggcccggcgccactcaggctcgggctccggctccgcacgcggcaggcag

SEQ ID NO: 8952 - protein, 205 aa, Homo sapiens
MFRDFGEPGPSSGNGGGYGGPAQPPAAAQAAQQISPEEEERRRVRRERNKLAAAKCRNRRKELTDFLQAETDKLEDEKSGLQREIEELQKQKERLELVLEAHRPICKIPEGAKEGDTGSTSGTSSPPAPCRPVPCISLSPGPVLEPEALHTPTLMTTPSLTPFTPSLVFTYPSTPEPCASAHRKSSSSSGDPSSDPLGSPTLLAL

SEQ ID NO: 8953 - DNA, 2801 bp, Homo sapiens
ataaaaagaaaagactccgcacggcgcgggtgagtcagaacccagcagccgtgtaccccgcagagccgccagccccgggcatgttccgagacttcggggaacccggcccgagctccgggaacggcggcgggtacggcggccccgcgcagcccccggccgcagcgcaggcagcccagcaggagactgacaaactggaagatgagaaatctgggctgcagcgagagattgaggagctgcagaagcagaaggagcgcctagagctggtgctggaagcccaccgacccatctgcaaaatcccggaaggagccaaggagggggacacaggcagtaccagtggcaccagcagcccaccagccccctgccgccctgtaccttgtatctccctttccccagggcctgtgcttgaacctgaggcactgcacacccccacactcatgaccacaccctccctaactcctttcacccccagcctggtcttcacctaccccagcactcctgagccttgtgcctcagctcatcgcaagagtagcagcagcagcggagacccatcctctgacccccttggctctccaaccctcctcgctttgtgaggcgcctgagccctactccctgcagatgccaccctagccaatgtctcctccccttcccccaccggtccagctggcctggacagtatcccacatccaactccagcaacttcttctccatccctctaatgagactgaccatattgtgcttcacagtagagccagcttggggccaccaaagctgcccactgtttctcttgagctggcctctctagcacaatttgcactaaatcagagacaaaatatttcccatttgtgccagaggaatcctggcagcccagagactttgtagatccttagaggtcctctggagccctaaccccttccagatcactgccacactctccatcaccctcttcctgtgatccacccaaccctatctcctgacagaaggtgccactttacccacctagaacactaactcaccagccccactgccagcagcagcaggtgattggaccaggccattctgccgccccctcctgaaccgcacagctcaggaggcgcccttggcttctgtgatgagctgatctgcggatctcagctttgagaagccttcagctccagggaatccaagcctccacagcgagggcagctgctatttattttcctaaagagagtatttttatacaaacctaccaaaatggaataaaaggcttgaagctgtggcctgagtgcctcactggacccagaggccaatgggagagtatttggagccctaggtcccagccttagctctacagactcactgcatgaccttggacaaattctttgatatttttggactttgtcttatctgacaagtggggctacatccgctcggcctcatctccgggactgaggggagacagtcctctggggtaaaagcgaagaggcttaccgcccctctccccgtgggggcccacagtgctgctgcgtgtgccacggaggggcgctgttatgcccccttccagcctcagaggaggcggccgagtggttctaggcccccagcacctgcttcctgccccattgtcttggacaggaaggagccgggaagggagctggagccacttcaggggctggattaaggccggtcccggcgcccgatgggggaagtctggtttaccactgccccgcatcccaccccaggctcgaagtaatgggggaatcattagttctgcagtccttctggatgggaattgtaccctgtatcagcaccccaccctcgccccaaccccggcgagtaccaaacagacgctgcccaggccgtgggctccgcttccgtccgggtttattacccccaatccaacccccagcaagtccctccgctccagccttcagtccccctgctgccctgccagcaagagcgaggggcccttcttggtgtcaggatttcttagtccatgccagcggcccctcctgcgcagccaggacggcgtccaggtcccgaggtccacagcggtcccggggctcggggagcaatccgggcgggcgtcggcgtggaggaagcagtgccttcaatcatcgggggaacaggccaggggcaactgatccggactgcccacgctgccagtgctggagcttccatcgcctaggtcgcggggcccgcacgggggcaaggcaagctcgggtgctggcccggctcctgatcccccggcgccgctggggccgccgcgggggccccattcttcgcccagcgccaggcagagctccttaagcgctaggttctcccgcagcagctcctcctggcggccctccagctcggccagcttctgccaacagccgcccaggtcctcgcgcacggcccgggatgcttgggtcccgaagagctgccactggcgtgcggcgcgccgcccgcgctggcgctccgagtccaggaagcagcagaggtcgcgcagctcacggttctctgcctgcagacgccggttgagctgcttgagctcgcggatctcgcccaggtggccctgcagctgccgattcacctcctgcatgaggcggccgcgctgcaccagtgccgccaggcgcgccgcctcctcccgccgcaggcgccgcactagctcttccttgcctagcgccgccatctcctcgtccgtcagctcctccaggccgcctgcctcggcctccatggctggtcaggcctctggagcatcgcccgcccgccgccgcggcccaggagccccacgtcgggcccggcgccactcaggctcgggctccggctccgcacgcggcaggcag

SEQ ID NO: 8954 - protein, 169 aa, Homo sapiens
MFRDFGEPGPSSGNGGGYGGPAQPPAAAQAAQQETDKLEDEKSGLQREIEELQKQKERLELVLEAHRPICKIPEGAKEGDTGSTSGTSSPPAPCRPVPCISLSPGPVLEPEALHTPTLMTTPSLTPFTPSLVFTYPSTPEPCASAHRKSSSSSGDPSSDPLGSPTLLAL

SEQ ID NO: 8955 - DNA, 3214 bp, Homo sapiens
acgggccaaggcggcgcgtctcgggggtggagcctggaggtgaccgcgccgctgcaacgcccccaccccccgcggtcgcagtggttcagcccgagaacttttcattcataaaaagaaaagactccgcacggcgcgggtgagtcagaacccagcagccgtgtaccccgcagagccgccagccccgggcatgttccgagacttcggggaacccggcccgagctccgggaacggcggcgggtacggcggccccgcgcagcccccggccgcagcgcaggcagcccagcagaagttccacctggtgccaagcatcaacaccatgagtggcagtcaggagctgcagtggatggtacagcctcatttcctggggcccagcagttaccccaggcctctgacctaccctcagtacagccccccacaaccccggccaggagtcatccgggccctggggccgcctccaggggtacgtcgaaggccttgtgaacagatcagcccggaggaagaggagcgccgccgagtaaggcgcgagcggaacaagctggctgcggccaagtgcaggaaccggaggaaggaactgaccgacttcctgcaggcggagactgacaaactggaagatgagaaatctgggctgcagcgagagattgaggagctgcagaagcagaaggagcgcctagagctggtgctggaagcccaccgacccatctgcaaaatcccggaaggagccaaggagggggacacaggcagtaccagtggcaccagcagcccaccagccccctgccgccctgtaccttgtatctccctttccccagggcctgtgcttgaacctgaggcactgcacacccccacactcatgaccacaccctccctaactcctttcacccccagcctggtcttcacctaccccagcactcctgagccttgtgcctcagctcatcgcaagagtagcagcagcagcggagacccatcctctgacccccttggctctccaaccctcctcgctttgtgaggcgcctgagccctactccctgcagatgccaccctagccaatgtctcctccccttcccccaccggtccagctggcctggacagtatcccacatccaactccagcaacttcttctccatccctctaatgagactgaccatattgtgcttcacagtagagccagcttggggccaccaaagctgcccactgtttctcttgagctggcctctctagcacaatttgcactaaatcagagacaaaatatttcccatttgtgccagaggaatcctggcagcccagagactttgtagatccttagaggtcctctggagccctaaccccttccagatcactgccacactctccatcaccctcttcctgtgatccacccaaccctatctcctgacagaaggtgccactttacccacctagaacactaactcaccagccccactgccagcagcagcaggtgattggaccaggccattctgccgccccctcctgaaccgcacagctcaggaggcgcccttggcttctgtgatgagctgatctgcggatctcagctttgagaagccttcagctccagggaatccaagcctccacagcgagggcagctgctatttattttcctaaagagagtatttttatacaaacctaccaaaatggaataaaaggcttgaagctgtggcctgagtgcctcactggacccagaggccaatgggagagtatttggagccctaggtcccagccttagctctacagactcactgcatgaccttggacaaattctttgatatttttggactttgtcttatctgacaagtggggctacatccgctcggcctcatctccgggactgaggggagacagtcctctggggtaaaagcgaagaggcttaccgcccctctccccgtgggggcccacagtgctgctgcgtgtgccacggaggggcgctgttatgcccccttccagcctcagaggaggcggccgagtggttctaggcccccagcacctgcttcctgccccattgtcttggacaggaaggagccgggaagggagctggagccacttcaggggctggattaaggccggtcccggcgcccgatgggggaagtctggtttaccactgccccgcatcccaccccaggctcgaagtaatgggggaatcattagttctgcagtccttctggatgggaattgtaccctgtatcagcaccccaccctcgccccaaccccggcgagtaccaaacagacgctgcccaggccgtgggctccgcttccgtccgggtttattacccccaatccaacccccagcaagtccctccgctccagccttcagtccccctgctgccctgccagcaagagcgaggggcccttcttggtgtcaggatttcttagtccatgccagcggcccctcctgcgcagccaggacggcgtccaggtcccgaggtccacagcggtcccggggctcggggagcaatccgggcgggcgtcggcgtggaggaagcagtgccttcaatcatcgggggaacaggccaggggcaactgatccggactgcccacgctgccagtgctggagcttccatcgcctaggtcgcggggcccgcacgggggcaaggcaagctcgggtgctggcccggctcctgatcccccggcgccgctggggccgccgcgggggccccattcttcgcccagcgccaggcagagctccttaagcgctaggttctcccgcagcagctcctcctggcggccctccagctcggccagcttctgccaacagccgcccaggtcctcgcgcacggcccgggatgcttgggtcccgaagagctgccactggcgtgcggcgcgccgcccgcgctggcgctccgagtccaggaagcagcagaggtcgcgcagctcacggttctctgcctgcagacgccggttgagctgcttgagctcgcggatctcgcccaggtggccctgcagctgccgattcacctcctgcatgaggcggccgcgctgcaccagtgccgccaggcgcgccgcctcctcccgccgcaggcgccgcactagctcttccttgcctagcgccgccatctcctcgtccgtcagctcctccaggccgcctgcctcggcctccatggctggtcaggcctctggagcatcgcccgcccgccgccgcggcccaggagccccacgtcgggcccggcgccactcaggctcgggctccggctccgcacgcggcaggcag

SEQ ID NO: 8956 - protein, 271 aa, Homo sapiens; identical to SEQ ID NO: 1364

SEQ ID NO: 8957 - DNA, 1471 bp, Homo sapiens
ataaaaagaaaagactccgcacggcgcgggtgagtcagaacccagcagccgtgtaccccgcagagccgccagccccgggcatgttccgagacttcggggaacccggcccgagctccgggaacggcggcgggtacggcggccccgcgcagcccccggccgcagcgcaggcagcccagcagaagttccacctggtgccaagcatcaacaccatgagtggcagtcaggagctgcagtggatggtacagcctcatttcctggggcccagcagttaccccaggcctctgacctaccctcagtacagccccccacaaccccggccaggagtcatccgggccctggggccgcctccaggggtacgtcgaaggccttgtgaacaggagactgacaaactggaagatgagaaatctgggctgcagcgagagattgaggagctgcagaagcagaaggagcgcctagagctggtgctggaagcccaccgacccatctgcaaaatcccggaaggagccaaggagggggacacaggcagtaccagtggcaccagcagcccaccagccccctgccgccctgtaccttgtatctccctttccccagggcctgtgcttgaacctgaggcactgcacacccccacactcatgaccacaccctccctaactcctttcacccccagcctggtcttcacctaccccagcactcctgagccttgtgcctcagctcatcgcaagagtagcagcagcagcggagacccatcctctgacccccttggctctccaaccctcctcgctttgtgaggcgcctgagccctactccctgcagatgccaccctagccaatgtctcctccccttcccccaccggtccagctggcctggacagtatcccacatccaactccagcaacttcttctccatccctctaatgagactgaccatattgtgcttcacagtagagccagcttggggccaccaaagctgcccactgtttctcttgagctggcctctctagcacaatttgcactaaatcagagacaaaatatttcccatttgtgccagaggaatcctggcagcccagagactttgtagatccttagaggtcctctggagccctaaccccttccagatcactgccacactctccatcaccctcttcctgtgatccacccaaccctatctcctgacagaaggtgccactttacccacctagaacactaactcaccagccccactgccagcagcagcaggtgattggaccaggccattctgccgccccctcctgaaccgcacagctcaggaggcgcccttggcttctgtgatgagctgatctgcggatctcagctttgagaagccttcagctccagggaatccaagcctccacagcgagggcagctgctatttattttcctaaagagagtatttttatacaaacctaccaaaatggaataaaaggcttgaagctgtggcctgagtgcctcactgg

SEQ ID NO: 8958 - protein, 235 aa, Homo sapiens; identical to SEQ ID NO: 8950

SEQ ID NO: 8959 - DNA, 1381 bp, Homo sapiens
ataaaaagaaaagactccgcacggcgcgggtgagtcagaacccagcagccgtgtaccccgcagagccgccagccccgggcatgttccgagacttcggggaacccggcccgagctccgggaacggcggcgggtacggcggccccgcgcagcccccggccgcagcgcaggcagcccagcagatcagcccggaggaagaggagcgccgccgagtaaggcgcgagcggaacaagctggctgcggccaagtgcaggaaccggaggaaggaactgaccgacttcctgcaggcggagactgacaaactggaagatgagaaatctgggctgcagcgagagattgaggagctgcagaagcagaaggagcgcctagagctggtgctggaagcccaccgacccatctgcaaaatcccggaaggagccaaggagggggacacaggcagtaccagtggcaccagcagcccaccagccccctgccgccctgtaccttgtatctccctttccccagggcctgtgcttgaacctgaggcactgcacacccccacactcatgaccacaccctccctaactcctttcacccccagcctggtcttcacctaccccagcactcctgagccttgtgcctcagctcatcgcaagagtagcagcagcagcggagacccatcctctgacccccttggctctccaaccctcctcgctttgtgaggcgcctgagccctactccctgcagatgccaccctagccaatgtctcctccccttcccccaccggtccagctggcctggacagtatcccacatccaactccagcaacttcttctccatccctctaatgagactgaccatattgtgcttcacagtagagccagcttggggccaccaaagctgcccactgtttctcttgagctggcctctctagcacaatttgcactaaatcagagacaaaatatttcccatttgtgccagaggaatcctggcagcccagagactttgtagatccttagaggtcctctggagccctaaccccttccagatcactgccacactctccatcaccctcttcctgtgatccacccaaccctatctcctgacagaaggtgccactttacccacctagaacactaactcaccagccccactgccagcagcagcaggtgattggaccaggccattctgccgccccctcctgaaccgcacagctcaggaggcgcccttggcttctgtgatgagctgatctgcggatctcagctttgagaagccttcagctccagggaatccaagcctccacagcgagggcagctgctatttattttcctaaagagagtatttttatacaaacctaccaaaatggaataaaaggcttgaagctgtggcctgagtgcctcactgg

SEQ ID NO: 8960 - protein, 205 aa, Homo sapiens; identical to SEQ ID NO: 8952

SEQ ID NO: 8961 - DNA, 1273 bp, Homo sapiens
ataaaaagaaaagactccgcacggcgcgggtgagtcagaacccagcagccgtgtaccccgcagagccgccagccccgggcatgttccgagacttcggggaacccggcccgagctccgggaacggcggcgggtacggcggccccgcgcagcccccggccgcagcgcaggcagcccagcaggagactgacaaactggaagatgagaaatctgggctgcagcgagagattgaggagctgcagaagcagaaggagcgcctagagctggtgctggaagcccaccgacccatctgcaaaatcccggaaggagccaaggagggggacacaggcagtaccagtggcaccagcagcccaccagccccctgccgccctgtaccttgtatctccctttccccagggcctgtgcttgaacctgaggcactgcacacccccacactcatgaccacaccctccctaactcctttcacccccagcctggtcttcacctaccccagcactcctgagccttgtgcctcagctcatcgcaagagtagcagcagcagcggagacccatcctctgacccccttggctctccaaccctcctcgctttgtgaggcgcctgagccctactccctgcagatgccaccctagccaatgtctcctccccttcccccaccggtccagctggcctggacagtatcccacatccaactccagcaacttcttctccatccctctaatgagactgaccatattgtgcttcacagtagagccagcttggggccaccaaagctgcccactgtttctcttgagctggcctctctagcacaatttgcactaaatcagagacaaaatatttcccatttgtgccagaggaatcctggcagcccagagactttgtagatccttagaggtcctctggagccctaaccccttccagatcactgccacactctccatcaccctcttcctgtgatccacccaaccctatctcctgacagaaggtgccactttacccacctagaacactaactcaccagccccactgccagcagcagcaggtgattggaccaggccattctgccgccccctcctgaaccgcacagctcaggaggcgcccttggcttctgtgatgagctgatctgcggatctcagctttgagaagccttcagctccagggaatccaagcctccacagcgagggcagctgctatttattttcctaaagagagtatttttatacaaacctaccaaaatggaataaaaggcttgaagctgtggcctgagtgcctcactgg

SEQ ID NO: 8962 - protein, 169 aa, Homo sapiens; identical to SEQ ID NO: 8954

SEQ ID NO: 8963 - DNA, 1686 bp, Homo sapiens
acgggccaaggcggcgcgtctcgggggtggagcctggaggtgaccgcgccgctgcaacgcccccaccccccgcggtcgcagtggttcagcccgagaacttttcattcataaaaagaaaagactccgcacggcgcgggtgagtcagaacccagcagccgtgtaccccgcagagccgccagccccgggcatgttccgagacttcggggaacccggcccgagctccgggaacggcggcgggtacggcggccccgcgcagcccccggccgcagcgcaggcagcccagcagaagttccacctggtgccaagcatcaacaccatgagtggcagtcaggagctgcagtggatggtacagcctcatttcctggggcccagcagttaccccaggcctctgacctaccctcagtacagccccccacaaccccggccaggagtcatccgggccctggggccgcctccaggggtacgtcgaaggccttgtgaacagatcagcccggaggaagaggagcgccgccgagtaaggcgcgagcggaacaagctggctgcggccaagtgcaggaaccggaggaaggaactgaccgacttcctgcaggcggagactgacaaactggaagatgagaaatctgggctgcagcgagagattgaggagctgcagaagcagaaggagcgcctagagctggtgctggaagcccaccgacccatctgcaaaatcccggaaggagccaaggagggggacacaggcagtaccagtggcaccagcagcccaccagccccctgccgccctgtaccttgtatctccctttccccagggcctgtgcttgaacctgaggcactgcacacccccacactcatgaccacaccctccctaactcctttcacccccagcctggtcttcacctaccccagcactcctgagccttgtgcctcagctcatcgcaagagtagcagcagcagcggagacccatcctctgacccccttggctctccaaccctcctcgctttgtgaggcgcctgagccctactccctgcagatgccaccctagccaatgtctcctccccttcccccaccggtccagctggcctggacagtatcccacatccaactccagcaacttcttctccatccctctaatgagactgaccatattgtgcttcacagtagagccagcttggggccaccaaagctgcccactgtttctcttgagctggcctctctagcacaatttgcactaaatcagagacaaaatatttcccatttgtgccagaggaatcctggcagcccagagactttgtagatccttagaggtcctctggagccctaaccccttccagatcactgccacactctccatcaccctcttcctgtgatccacccaaccctatctcctgacagaaggtgccactttacccacctagaacactaactcaccagccccactgccagcagcagcaggtgattggaccaggccattctgccgccccctcctgaaccgcacagctcaggaggcgcccttggcttctgtgatgagctgatctgcggatctcagctttgagaagccttcagctccagggaatccaagcctccacagcgagggcagctgctatttattttcctaaagagagtatttttatacaaacctaccaaaatggaataaaaggcttgaagctgtggcctgagtgcctcactgg

SEQ ID NO: 8964 - protein, 271 aa, Homo sapiens; identical to SEQ ID NO: 1364

SEQ ID NO: 8965 - DNA, 1605 bp, Homo sapiens
cggccgctgaggcccgcggctccgccctgtggctgcgcctgtctataaagttgttgttgaggtggcgcggcgctaagatggcggcggcggcggcggcggccgtggcgggggtggggcgcggtggcggtggcgcggagccacggcaggagcggagccgggcccggggctgggccggcgtcgaacgcagcgaaggccggaggatggaaccaggtgaggagctggaagaggagggctctccaggtggccgtgaggatggcttcaccgccgagcacctggctgcagaggccatggcagctgacatggacccctggctagtgtttgatgcccgcacaacgcctgccactgagctggatgcctggctggccaagtacccaccatcccaagttacccgctatggggaccccggttcacccaactcagagcctgtgggctggattgcagtgtatgggcagggctacagccccaactccggggacgtgcagggcctgcaggcagcctgggaagctctgcagaccagtgggcggcccatcacaccgggtaccctgcgccagctcgccatcacccaccacgtgctctcgggcaagtggcttatgcatctggcaccgggcttcaagctggaccacgcctgggctggcattgcccgggccgtggttgaaggccagcttcaggtggccaaggtgagcccacgtgccaaggagggtgggcgccaggtcatctgtgtttacacggacgacttcacggaccgcttgggtgtactggaggcggattcagccatccgtgcagcgggcattaagtgcctgctcacctacaagcctgatgtctacacctacctgggcatctaccgggccaatcgctggcacctctgccccactctctatgagagccgtttccagcttgggggtagtgcccgtggctcccgagtgcttgaccgtgccaacaacgtggaactgacctaggggggccaaattggggagactgcccactcccccctccatgctggggttggatcctcctgtcttcctccttgtcctatgaaggccacaccccccagctctggggactcctaggtcacttgggaactacctgcatcttcagtccccttgaacttctgccctctgttcagggctgacacaagccccacaggctggggggctccggttccctgagggatgagccttcagcctccctttgtaatgctgctcctctccactgcccagcaccatgagttgggtgcagacacctagaaggagagacttcttggaacgctcatcccccgctatacctccccttcctcctgcatctccccttctttccttccccctcaggagagagaaaacttagtgcttccagcccttcttggagccttcatggtccaggggtaggggccccactggcctgagcatgccattttgaggggagggtagttgtgcctacttatcccctggcagaggggatgccaggaccatggacatgaggcttgcccatccctgccaacttacacagcctgtaccactgtccccccttccttggctactttgacatgtgcctgctcctggcatttcaataaaacccggcttgggtctgtgtcttgagtgttttttaaaa

SEQ ID NO: 8966 - protein, 292 aa, Homo sapiens
MAAAAAAAVAGVGRGGGGAEPRQERSRARGWAGVERSEGRRMEPGEELEEEGSPGGREDGFTAEHLAAEAMAADMDPWLVFDARTTPATELDAWLAKYPPSQVTRYGDPGSPNSEPVGWIAVYGQGYSPNSGDVQGLQAAWEALQTSGRPITPGTLRQLAITHHVLSGKWLMHLAPGFKLDHAWAGIARAVVEGQLQVAKVSPRAKEGGRQVICVYTDDFTDRLGVLEADSAIRAAGIKCLLTYKPDVYTYLGIYRANRWHLCPTLYESRFQLGGSARGSRVLDRANNVELT

SEQ ID NO: 8967 - DNA, 841 bp, Homo sapiens
ctcagcctcagtttccttttctgtaagtcaaggagaatagtaataactgcagcaacccttctggagcgctgactcctcaggcatctaattttcatagcagatctacgggacaggaacagttgttatcccattgtaaagatgaggcaactgaggcgcatcgacagtaactcttactcaaggccacagtttaatccagtgcctggcatctgtagttattgtctcagaccctgccctgactcggttccctcacagcaggatggaaccaggtgaggagctggaagaggagggctctccaggtggccgtgaggatggcttcaccgccgagcacctggctgcagaggccatggcagctgacatggacccctggctagtgtttgatgcccgcacaacgcctgccactgagctggatgcctggctggccaagtacccaccatcccaagttacccgctatggggaccccggttcacccaactcagagcctgtgggctggattgcagtgtatgggcagggctacagccccaactccggggacgtgcagggcctgcaggcagcctgggaagctctgcagaccagtgggcggcccatcacaccgggtaccctgcgccagctcgccatcacccaccacgtgctctcgggcaagtggcttatgcatctggcaccgggcttcaagctggaccacgcctgggctggcattgcccgggccgtggttgaaggccagcttcaggtggccaaggtgagcccaccctgtaccactgtccccccttccttggctactttgacatgtgcctgctcctggcatttcaataaaacccggcttgggtctgtgtcttgagtgtttttt

SEQ ID NO: 8968 - protein, 191 aa, Homo sapiens
MEPGEELEEEGSPGGREDGFTAEHLAAEAMAADMDPWLVFDARTTPATELDAWLAKYPPSQVTRYGDPGSPNSEPVGWIAVYGQGYSPNSGDVQGLQAAWEALQTSGRPITPGTLRQLAITHHVLSGKWLMHLAPGFKLDHAWAGIARAVVEGQLQVAKVSPPCTTVPPSLATLTCACSWHFNKTRLGSVS

SEQ ID NO: 8969 - DNA, 1004 bp, Homo sapiens
gggcgggagcggcggtccagactggggagggacgcgcaccggccaggaggcttcaagaggagggcactagggccctgcgagcggcgtcttaaccggcggcgctaggactccgcgggaaacggcgggggcggagcgggcggcaccaggacccaggggaaccgcgacgggcgggcggcgagcaggcccgggagccgggaggctgcgggcggcggcgctggacccgacgcggcgagagaggccccgagatgccgagcaagaagaagaagtacaacgcgcggttcccgccggcgcggatcaagaagatcatgcagacggacgaagagattgggaaggtggcggcggcggtgcctgtcatcatctcccgggcgctcgagctcttcctagagtcgctgttgaagaaggcctgccaggtgacccagtcgcggaacgcgaagaccatgaccacatcccacctgaagcagtgcatcgagctggagcagcagtttgacttcttgaaggacctggtggcatctgttcccgacatgcagggggacggggaagacaaccacatggatggggacaagggcgcccgcaggggccggaagccaggcagcggcggccggaagaacggtgggatgggaacgaaaagcaaggacaagaagctgtccgggacagactcggagcaggaggatgaatctgaggacacagatactgatggggaagaggagacatcacaacccccaccccaggccagccacccctctgcccactttcagagccccccgacacccttcctgcccttcgcctctactctgcctttgcccccagcgcccccgggcccctcagcacctgatgaagaggacgaagaagattacgactcctagcgccttctgccccccagaccatagccccttttagttggttttagttgctctggggggaggagagaaggtagagctgttcttaaatttattaaaaaaaaaaataaaagggaatctcagtgtctgttccaggctctgcgcagg

SEQ ID NO: 8970 - protein, 205 aa, Homo sapiens; identical to SEQ ID NO: 1368

SEQ ID NO: 8971 - DNA, 825 bp, Homo sapiens
gagcggcggtccagactggggagggacgcgcaccggccaggaggcttcaagaggagggcactagggccctgcgagcggcgtcttaaccggcggcgctaggactccgcgggaaacggcgggggcggagcgggcggcaccaggacccaggggaaccgcgacgggcgggcggcgagcaggcccgggagccgggaggctgcgggcggcggcgctggacccgacgcggcgagagaggccccgagatgccgagcaagaagaagaagtacaacgcgcggttcccgccggcgcggatcaagaagatcatgcagacggacgaagagattgggaaggtggcggcggcggtgcctgtcatcatctcccgggcgctcgagctcttcctagagtcgctgttgaagaaggcctgccaggtgacccagtcgcggaacgcgaagaccatgaccacatcccacctgaagcagtgcatcgagctggagcagcagtttgacttcttgaaggacctggtggcatctgttcccgacatgcagggggacggggaagacaaccacatggatggggacaagggcgcccgcaggtggggccagggcctggcatacagtggggaaggccaaggccacagggcttgggggtggccaaggagtagggagcactccgggcagatggactgtaccttcccaaaggggccggaagccaggcagcggcggccggaagaacggtgggatgggaacgaaaagcaaggacaagaagctgtccgggacagactcggagcaggaggtgagtgaggccccagcccttcgccctgcccttggtgatgggacaggcagcctcgcc

SEQ ID NO: 8972 - protein, 178 aa, Homo sapiens
MPSKKKKYNARFPPARIKKIMQTDEEIGKVAAAVPVIISRALELFLESLLKKACQVTQSRNAKTMTTSHLKQCIELEQQFDFLKDLVASVPDMQGDGEDNHMDGDKGARRWGQGLAYSGEGQGHRAWGWPRSREHSGQMDCTFPKGPEARQRRPEERWDGNEKQGQEAVRDRLGAGGE

SEQ ID NO: 8973 - DNA, 1102 bp, Homo sapiens
gagcggcggtccagactggggagggacgcgcaccggccaggaggcttcaagaggagggcactagggccctgcgagcggcgtcttaaccggcggcgctaggactccgcgggaaacggcgggggcggagcgggcggcaccaggacccaggggaaccgcgacgggcgggcggcgagcaggcccgggagccgggaggctgcgggcggcggcgctggacccgacgcggcgagagaggccccgagatgccgagcaagaagaagaagtacaacgcgcggttcccgccggcgcggatcaagaagatcatgcagacggacgaagagattgggaaggtggcggcggcggtgcctgtcatcatctcccgggcgctcgagctcttcctagagtcgctgttgaagaaggcctgccaggtgacccagtcgcggaacgcgaagaccatgaccacatcccacctgaagcagtgcatcgagctggagcagcagtttgacttcttgaaggacctggtggcatctgttcccgacatgcagggggacggggaagacaaccacatggatggggacaagggcgcccgcaggtggggccagggcctggcatacagtggggaaggccaaggccacagggcttgggggtggccaaggagtagggagcactccgggcagatggactgtaccttcccaaaggggccggaagccaggcagcggcggccggaagaacggtgggatgggaacgaaaagcaaggacaagaagctgtccgggacagactcggagcaggaggatgaatctgaggacacagatactgatggggaagaggagacatcacaacccccaccccaggccagccacccctctgcccactttcagagccccccgacacccttcctgcccttcgcctctactctgcctttgcccccagcgcccccgggcccctcagcacctgatgaagaggacgaagaagattacgactcctagcgccttctgccccccagaccatagccccttttagttggttttagttgctctggggggaggagagaaggtagagctgttcttaaatttattaaaaaaaaaaataaaagggaatctcagtgtctgttccaggctctgcgca

SEQ ID NO: 8974 - protein, 177 aa, Homo sapiens
MPSKKKKYNARFPPARIKKIMQTDEEIGKVAAAVPVIISRALELFLESLLKKACQVTQSRNAKTMTTSHLKQCIELEQQFDFLKDLVASVPDMQGDGEDNHMDGDKGARRWGQGLAYSGEGQGHRAWGWPRSREHSGQMDCTFPKGPEARQRRPEERWDGNEKQGQEAVRDRLGAGG

SEQ ID NO: 8975 - DNA, 705 bp, Homo sapiens
ggggaaccgcgacgggcgggcggcgagcaggcccgggagccgggaggctgcgggcggcggcgctggacccgacgcggcgagagaggccccgagatgccgagcaagaagaagaagtacaacgcgcggttcccgccgtcgcggaacgcgaagaccatgaccacatcccacctgaagcagtgcatcgagctggagcagcagtttgacttcttgaaggacctggtggcatctgttcccgacatgcagggggacggggaagacaaccacatggatggggacaagggcgcccgcaggggccggaagccaggcagcggcggccggaagaacggtgggatgggaacgaaaagcaaggacaagaagctgtccgggacagactcggagcaggaggatgaatctgaggacacagatactgatggggaagaggagacatcacaacccccaccccaggccagccacccctctgcccactttcagagccccccgacacccttcctgcccttcgcctctactctgcctttgcccccagcgcccccgggcccctcagcacctgatgaagaggacgaagaagattacgactcctagcgccttctgccccccagaccatagccccttttagttggttttagttgctctggggggaggagagaaggtagagctgttcttaaatttattaaaaaaaaaaataaaagggaatctcagtgtctgttc

SEQ ID NO: 8976 - protein, 161 aa, Homo sapiens
MPSKKKKYNARFPPSRNAKTMTTSHLKQCIELEQQFDFLKDLVASVPDMQGDGEDNHMDGDKGARRGRKPGSGGRKNGGMGTKSKDKKLSGTDSEQEDESEDTDTDGEEETSQPPPQASHPSAHFQSPPTPFLPFASTLPLPPAPPGPSAPDEEDEEDYDS

SEQ ID NO: 8977 - DNA, 754 bp, Homo sapiens
tggcgacggggtctgaactctgctcccccacccgcaggcgcggatcaagaagatcatgcagacggacgaagagattgggaaggtggcggcggcggtgcctgtcatcatctcccgggcgctcgagctcttcctagagtcgctgttgaagaaggcctgccaggtgacccagtcgcggaacgcgaagaccatgaccacatcccacctgaagcagtgcatcgagctggagcagcagtttgacttcttgaaggacctggtggcatctgttcccgacatgcagggggacggggaagacaaccacatggatggggacaagggcgcccgcaggggccggaagccaggcagcggcggccggaagaacggtgggatgggaacgaaaagcaaggacaagaagctgtccgggacagactcggagcaggaggatgaatctgaggacacagatactgatggggaagaggagacatcacaacccccaccccaggccagccacccctctgcccactttcagagccccccgacacccttcctgcccttcgcctctactctgcctttgcccccagcgcccccgggcccctcagcacctgatgaagaggacgaagaagattacgactcctagcgccttctgccccccagaccatagccccttttagttggttttagttgctctggggggaggagagaaggtagagctgttcttaaatttattaaaaaaaaaaataaaagggaatctcagtgtctgttccaggctctgcgcagg

SEQ ID NO: 8978 - protein, 185 aa, Homo sapiens
MQTDEEIGKVAAAVPVIISRALELFLESLLKKACQVTQSRNAKTMTTSHLKQCIELEQQFDFLKDLVASVPDMQGDGEDNHMDGDKGARRGRKPGSGGRKNGGMGTKSKDKKLSGTDSEQEDESEDTDTDGEEETSQPPPQASHPSAHFQSPPTPFLPFASTLPLPPAPPGPSAPDEEDEEDYDS

SEQ ID NO: 8979 - DNA, 764 bp, Homo sapiens
gggagaacagtctcctgccttcaagccctcctcagttattctccttccaccccacaaatctgccacaatcaacaagaccaaggggccagggagaacaagagggtatctgtgtcctcagattcatcctgtgagcaccgcagaggtcagagttgacaagaaaagacacgaacccatcactgggagtggcagggacagcagtagaccctcatagccccaatttacaaataaaccagtgagcaaacaggttgcagaaaaggatgagagctggcctcctgccagttcagcctggggcgaggctgcctgtcccatcaccaagggcagggcgaagggctggggcctcactcacctcctgctccgagtctgtcccggacagcttcttgtccttgcttttcgttcccatcccaccgttcttccggccgccgctgcctggcttccggcccctttgggaaggtacagtccatctgcccggagtgctccctactccttggccacccccaagccctgtggccttggccttccccactgtatgccaggccctggccccacctgcgggcgcccttgtccccatccatgtggttgtcttccccgtccccctgcatgtcgggaacagatgccaccaggtccttcaagaagtcaaactgctgctccagctcgatgcactgcttcctggaagagcgactctaggaagagctcgagcgcccgggctgaggagcgtcaaggagaactccggggcaggagagggcgacccgctgcctccctccccc

SEQ ID NO: 8980 - protein, 168 aa, Homo sapiens
MRAGLLPVQPGARLPVPSPRAGRRAGASLTSCSESVPDSFLSLLFVPIPPFFRPPLPGFRPLWEGTVHLPGVLPTPWPPPSPVALAFPTVCQALAPPAGALVPIHVVVFPVPLHVGNRCHQVLQEVKLLLQLDALLPGRATLGRARAPGLRSVKENSGAGEGDPLPPS

SEQ ID NO: 8981 - DNA, 215 bp, Homo sapiens
cccgggcgctcgagctcttcctagagtcgctgttgaagaaggcctgccaggtgacccagtcgcggaacgcgaagaccatgaccacatcccacctgaagcagtgcatcgagctggagcagcagtttgacttcttgaaggacctggtggcatctgttcccgacatgcagggggacggggaagacaaccacatggatggggacaagggcgcccgcagg

SEQ ID NO: 8982 - protein, 45 aa, Homo sapiens
MTTSHLKQCIELEQQFDFLKDLVASVPDMQGDGEDNHMDGDKGAR

SEQ ID NO: 8983 - DNA, 841 bp, Homo sapiens
ggtgggcggcagccgggacaccagcaaggccacagactggcagaggagaggctgggcttccaggcagagggagccacctgagtaaagcagggcaggcccgggagcggagatcggcccgggctccagcctgacatctggggccccttgctgccacccactgcgggtttgggtgtctgggcccctcttgagtgccagcccctcctcacctcttccaggaagcagtgcatcgagctggagcagcagtttgacttcttgaaggacctggtggcatctgttcccgacatgcagggggacggggaagacaaccacatggatggggacaagggcgcccgcaggtggggccagggcctggcatacagtggggaaggccaaggccacagggcttgggggtggccaaggagtagggagcactccgggcagatggactgtaccttcccaaaggggccggaagccaggcagcggcggccggaagaacggtgggatgggaacgaaaagcaaggacaagaagctgtccgggacagactcggagcaggaggatgaatctgaggacacagatactgatggggaagaggagacatcacaacccccaccccaggccagccacccctctgcccactttcagagccccccgacacccttcctgcccttcgcctctactctgcctttgcccccagcgcccccgggcccctcagcacctgatgaagaggacgaagaagattacgactcctagcgccttctgccccccagaccatagccccttttagttggttttagttgctctggggggaggagagaaggtagagctgttcttaaatttattaaaaaaaaaaataaaagggaa

SEQ ID NO: 8984 - protein, 138 aa, Homo sapiens
MGTRAPAGGARAWHTVGKAKATGLGGGQGVGSTPGRWTVPSQRGRKPGSGGRKNGGMGTKSKDKKLSGTDSEQEDESEDTDTDGEEETSQPPPQASHPSAHFQSPPTPFLPFASTLPLPPAPPGPSAPDEEDEEDYDS

SEQ ID NO: 8985 - DNA, 1726 bp, Homo sapiens
agttctacggtgcggatgggggatggggcaggatggggcaggacaccgatatgctaaatacctaccaacagttggttaggaccccgtcggtgtgaccagggcaggacgtgcggctccaggctccaggaaccagaacggggctgctcaagctgctgtcgaccgtctctcaggacaagcagggctgcctggggagtggtgatggtgtgccaaatcaagacctgcagcagaggtctcagagctcaaggcagacagcaaagaaggaccgcaagcccaggggccagagcaagaaaggacagggctctgaagagtctgaagatcacttcccgcttcttcctcggaaaccctccttccccttccagtgggcctgggagagcatcgccacagatgtccgggctgtgcttcagccaagctccccaacccctggccaccaagccctgcccatgccctcctcgttctcccagcgtcagtccaggcgcaagtccacggccaacctcccagaggcccatggctgctgctggaagacagaggcgcaaaacctgaaggcgagacagcagctgggagcctggggcggtgtctccatccctactggcaaaggggagctaggatcagagccccccagtggtctccagctgcctgggaggaggccaggatcaggatcggcgtccgacaagcaggtccagctgcaaagcctgggtgctgaggaggccgagaggggtctgagttctggggtgctgccccagcgccccaggagggggtcgatctcagaggaggagcaattttcagaggccacagaggaggctgaggagggagagcacaggactccctgcagaaggagggctggttgtcagagaaaggggcagatttctggagaggaagcctccgatgagggagaagtgcagggccagagccaggggagcagccccagcttcaacaacctccgaaggcgacaatggaggaagacaagggccaaggagctgcaggggccatgggacctggagaagctgcacaggcagctacagagagacctggactgtggcccccaaaagctgccctggaagactttgagggctgccttccaggcctccaagcggaatggaaaggcctatgcctcgggatacgatgaaactttcgtgtctgccaacctccctaatcgcaccttccacaaacgacaggaagccaccaggagcctgctgcaggcctgggagcggcagcggcaggaggagcggcagcaggccgagctgcggcgggcccggacacagcatgtacagcggcaggtggcccactgcctggcagcctacgcacccagagggagccggggccctggggcggcccagcgcaagctggaggagctgaggcgccaggagcgacagcgctttgctgagtaccaggcggagctgcaaggcatccagcacagggtgcaggcccggcccttcctgttccagcaggctatgcaggccaatgcccggctcaccgtcactcggcgcttctcccaggtgctgtcagcactggggctggatgaggagcagctgctgtctgaggcaggaaaggtggacagagagggcacccccaggaaacccaggagccacaggtcaatgggggtgagaatggagcactctcctcagaggcccccaaggacagaacccaccggcagccagcctgacaggcactacaaccccagcctggacccggagtgcagtccctgagataaaattaaaggctttatggc

SEQ ID NO: 8986 - protein, 420 aa, Homo sapiens
MPSSFSQRQSRRKSTANLPEAHGCCWKTEAQNLKARQQLGAWGGVSIPTGKGELGSEPPSGLQLPGRRPGSGSASDKQVQLQSLGAEEAERGLSSGVLPQRPRRGSISEEEQFSEATEEAEEGEHRTPCRRRAGCQRKGQISGEEASDEGEVQGQSQGSSPSFNNLRRRQWRKTRAKELQGPWDLEKLHRQLQRDLDCGPQKLPWKTLRAAFQASKRNGKAYASGYDETFVSANLPNRTFHKRQEATRSLLQAWERQRQEERQQAELRRARTQHVQRQVAHCLAAYAPRGSRGPGAAQRKLEELRRQERQRFAEYQAELQGIQHRVQARPFLFQQAMQANARLTVTRRFSQVLSALGLDEEQLLSEAGKVDREGTPRKPRSHRSMGVRMEHSPQRPPRTEPTGSQPDRHYNPSLDPECSP

SEQ ID NO: 8987 - DNA, 630 bp, Homo sapiens
cggatgggggatggggcaggatggggcaggacaccgatatgctaaatacctaccaacagttggttaggaccccgtcggtgtgaccagggcaggacgtgcggctccaggctccaggaaccagaacggggctgctcaagctgctgtcgaccgtctctcaggacaagcaggtgagggaggcccagtgaggacacttccagctgcctagagccagggctgcctggggagtggtgatggtgtgccaaatcaagacctgcagcagaggtctcagagctcaaggcagacagcaaagaaggaccgcaagcccaggggccagagcaagaaaggacagggctctgaagagtctgaagagtaagcagcagtgggatgggtcaggaggctgttgggggtcagggccctctgggggctggcgccgaccctgacccccaccctttccttcttcagtcacttcccgcttcttcctcggaaaccctccttccccttccagtgggcctgggagagcatcgccacagatgtccgggctgtgcttcagccaagctccccaacccctggccaccaagccctgcccatgccctcctcgttctcccagcgtcagtccaggcgcaagtccacggccaacctcccagaggccca

SEQ ID NO: 8988 - protein, 88 aa, Homo sapiens
MGQEAVGGQGPLGAGADPDPHPFLLQSLPASSSETLLPLPVGLGEHRHRCPGCASAKLPNPWPPSPAHALLVLPASVQAQVHGQPPRG

SEQ ID NO: 8989 - DNA, 2565 bp, Homo sapiens
aacacgacagcggctgccgagcgacccggaagtattcccattttgcgttgtctgggctcggcggcagccgggctcggagtggacgtgccactatggggtcgtccaagaagcatcgcggagagaaggaggcggccgggacgacggcggcggccggcaccgggggtgccaccgagcagccgccgcggcaccgggaacacaaaaaacacaagcaccggagtggcggcagtggcggtagcggtggcgaacgacggaagcggagccgggaacgtgggggcgagcgcgggagcgggcggcgcggggccgaagctgaggcccggagcagcacgcacgggcgggagcgcagccaggcagagccctccgagcggcgcgtgaagcgggagaagcgcgatgacggctacgaggccgctgccagctccaaaactagctcaggcgatgcctcctcactcagcatcgaggagactaacaaactccgggcaaagttggggctgaaacccttggaggttaatgccatcaagaaggaggcgggcaccaaggaggagcccgtgacagctgatgtcatcaaccctatggccttgcgacagcgagaggagctgcgggagaagctggcggctgccaaggagaagcgcctgctgaaccaaaagctggggaagataaagaccctaggagaggatgacccctggctggacgacactgcagcctggatcgagaggagccggcagctgcagaaggagaaggacctggcagagaagagggccaagttactggaggagatggaccaagagtttggtgtcagcactctggtggaggaggagttcgggcagaggcggcaggacctgtacagtgcccgggacctgcagggcctcaccgtggagcatgccattgattccttccgagaaggggagacaatgattcttaccctcaaggacaaaggcgtgctgcaggaggaggaggacgtgctggtgaacgtgaacctggtggataaggagcgggcagagaaaaatgtggagctgcggaagaagaagcctgactacctgccctatgccgaggacgagagcgtggacgacctggcgcagcaaaaacctcgctctatcctgtccaagtatgacgaagagcttgaaggggagcggccacattccttccgcttggagcagggcggcacggctgatggcctgcgggagcgggagctggaggagatccgggccaagctgcggctgcaggctcagtccctgagcacagtggggccccggctggcctccgaatacctcacgcctgaggagatggtgacctttaaaaagaccaagcggagggtgaagaaaatccgcaagaaggagaaggaggtagtagtgcgggcagatgacttgctgcctctcggggaccagactcaggatggggactttggttccagactgcggggacggggtcgccgccgagtgtccgaagtggaggaggagaaggagcctgtgcctcagcccctgccgtcggacgacacccgagtggagaacatggacatcagtgatgaggaggaaggtggagctccaccgccggggtccccgcaggtgctggaggaggacgaggcggagctggagctgcagaagcagctggagaagggacgccggctgcgacagttacagcagctacagcagctgcgagacagtggcgagaaggtggtggagattgtgaagaagctggagtctcgccagcggggctgggaggaggatgaggatcccgagcggaagggggccatcgtgttcaacgccacgtccgagttctgccgcaccttgggggagatccccacctacgggctggctggcaatcgcgaggagcaggaggagctcatggactttgaacgggatgaggagcgctcagccaacggtggctccgaatctgacggggaggagaacatcggctggagcacggtgaacctggacgaggagaagcagcagcaggatttctctgcttcctccaccaccatcctggacgaggaaccgatcgtgaatagggggctggcagctgccctgctcctgtgtcagaacaaagggctgctggagaccacagtgcagaaggtggcccgggtgaaggcccccaacaagtcgctgccctcagccgtgtactgcatcgaggataagatggccatcgatgacaagtacagccggagggaggaataccgaggcttcacacaggacttcaaggagaaggacggctacaaacccgacgttaagatcgaatacgtggatgagacgggccggaaactcacacccaaggaggctttccggcagctgtcgcaccgcttccatggcaagggctcaggcaagatgaagacagagcggcggatgaagaagctggacgaggaggcgctcctgaagaagatgagctccagcgacacgcccctgggcaccgtggccctgctccaggagaagcagaaggctcagaagaccccctacatcgtgctcagcggcagcggcaagagcatgaacgcgaacaccatcaccaagtgacagcgccctcccgccccggccctgcctcaaccttcatattaaataaagctccctccttattttttcctcc

SEQ ID NO: 8990 - protein, 800 aa, Homo sapiens; identical to SEQ ID NO: 1372

SEQ ID NO: 8991 - DNA, 3595 bp, Homo sapiens
aacacgacagcggctgccgagcgacccggaagtattcccattttgcgttgtctgggctcggcggcagccgggctcggagtggacgtgccactatggggtcgtccaagaagcatcgcggagagaaggaggcggccgggacgacggcggcggccggcaccgggggtgccaccgagcagccgccgcggcaccgggaacacaaaaaacacaagcaccggagtggcggcagtggcggtagcggtggcgaacgacggaagcggagccgggaacgtgggggcgagcgcgggagcgggcggcgcggggccgaagctgaggcccggagcagcacgcacgggcgggagcgcagccaggcagagccctccgagcggcgcgtgaagcgggagaagcgcgatgacggctacgaggccgctgccagctccaaaactagctcaggcgatgcctcctcactcagcatcgaggagactaacaaactccgggcaaagttggggctgaaacccttggaggttaatgccatcaagaaggaggcgggcaccaaggaggagcccgtgacagctgatgtcatcaaccctatggccttgcgacagcgagaggagctgcgggagaagctggcggctgccaaggagaagcgcctgctgaaccaaaagctggggaagataaagaccctaggagaggatgacccctggctggacgacactgcagcctggatcgagaggagccggcagctgcagaaggagaaggacctggcagagaagagggccaagttactggaggagatggaccaagagtttggtgtcagcactctggtggaggaggagttcgggcagaggcggcaggacctgtacagtgcccgggacctgcagggcctcaccgtggagcatgccattgattccttccgagaaggggagacaatgattcttaccctcaaggacaaaggcgtgctgcaggaggaggaggacgtgctggtgaacgtgaacctggtggataaggagcgggcagagaaaaatgtggagctgcggaagaagaagcctgactacctgccctatgccgaggacgagagcgtggacgacctggcgcagcaaaaacctcgctctatcctgtccaagtatgacgaagagcttgaaggggagcggccacattccttccgcttggagcagggcggcacggctgatggcctgcgggagcgggagctggaggagatccgggccaagctgcggctgcaggctcagtccctgagcacagtggggccccggctggcctccgaatacctcacgcctgaggagatggtgacctttaaaaagaccaagcggagggtgaagaaaatccgcaagaaggagaaggaggtagtagtgcgggcagatgacttgctgcctctcggggaccagactcaggatggggactttggttccagactgcggggacggggtcgccgccgagtgtccgaagtggaggaggagaaggagcctgtgcctcagcccctgccgtcggacgacacccgagtggagaacatggacatcagtgatgaggaggaaggtggagctccaccgccggggtccccgcaggtgctggaggaggacgaggcggagctggagctgcagaagcagctggagaagggacgccggctgcgacagttacagcagctacagcagctgcgagacagtggcgagaaggtggtggagattgtgaagaagctggagtctcgccagcggggctgggaggaggatgaggatcccgagcggaagggggccatcgtgttcaacgccacgtccgagttctgccgcaccttgggggagatccccacctacgggctggctggcaatcgcgaggagcaggaggagctcatggactttgaacgggatgaggagcgctcagccaacggtggctccgaatctgacggggaggagaacatcggctggagcacggtgaacctggacgaggagaagcagcagcaggatttctctgcttcctccaccaccatcctggacgaggaaccgatcgtgaatagggggctggcagctgccctgctcctgtgtcagaacaaagggctgctggagaccacagtgcagaaggtggcccgggtgaaggcccccaacaagtcgctgccctcagccgtgtactgcatcgaggataagatggccatcgatgacaagtacagccggagggaggaataccgaggcttcacacaggacttcaaggagaaggacggctacaaacccgacgttaagatcgaatacgtggatgagacgggccggaaactcacacccaaggaggctttccggcagctgtcgcaccgcttccatggcaagggctcaggcaagatgaagacagagcggcggatgaagaagctggacgaggaggcgctcctgaagaagatgagctccagcgacacgcccctgggcaccgtggccctgctccaggagaagcagaaggctcagaagaccccctacatcgtgctcagcggcagcggcaagagcatgaacgcgaacaccatcaccaagtgacagcgccctcccgccccggccctgcctcaaccttcatattaaataaagctccctccttattttttcctccctggtcgtggtacagattccagggttggatctttggttgggtgtggcacagagtctggctcctgctaggtgagacctggccatcaaatgacacaaacaactaaacgatggaagagagagcgagcccgggtcctctaaggctccttccttctcccctggctgtcggtcacacctctgcagggccggctctctgatagaaagtggaaggcggttttagaaactcatcaccctgctctctcctggcctcgggggctgcacaggtcactgtcctgtaatgtctcccggtcagggcagcccaggactgcccagcctggtgggctggggattgggctttgggtagggcacaggtgccaccttctgtcctggctgtcctgtgccaccctggtctgtgtctagaggagtgaaactcccagggttgggctgggagtatttggtgcacgcggtatggggagggctgagctcagtgcctcctgggagacttgtcccgtgtacagtgacccagaaagatgagattccttggcctgaactctgtgatagagtgtgactgagctgctgggggacatgtgagcctcaaatccatagaaagacaaacggccaccttgggtgcccaggatactggtgcctggccccacgtacacccacatacttctcagatggctcccacattttaagattttaaaaatgaaaccaaaaaataaattgaagaaaactgtaaactttaaagaataatcagctgggcgcagtggctcatgcttgtaatcacagcactttaggaggctgaggcaggaggactgtttgagcccaggagtttgagaccaacctgagtaaggtggcaaaaccccatctctaccaaaaatacaaagattagccaggcgtggtggtgagcgcctgtagtcccagctacttgggatgctgaggtgggaggatcacttgaacctgggagacacaggctgcagtgggccctgattgagccaccacactgcagcctaggtgacagtcagaccctgtctcaaaaaaaataaaaaaaattt

SEQ ID NO: 8992 - protein, 800 aa, Homo sapiens; identical to SEQ ID NO: 1372

SEQ ID NO: 8993 - DNA, 408 bp, Homo sapiens
ggcctggcattggggtcaatcaacacccgccctgttattatacaccttgtgggcacaggtggctccggccccacccagggccctgcatctcctctcatgccccgcgtccccaggctttccggcagctgtcgcaccgcttccatggcaagggctcaggcaagatgaagacagagcggcggatgaagaagctggacgaggaggcgctcctgaagaagatgagctccagcgacacgcccctgggcaccgtggccctgctccaggagaagcagaaggctcagaagaccccctacatcgtgctcagcggcagcggcaagagcatgaacgcgaacaccatcaccaagtgacagcgccctcccgccccggccctgcctcaaccttcatattaaataaagctccctccttattttt

SEQ ID NO: 8994 - protein, 60 aa, Homo sapiens
MKTERRMKKLDEEALLKKMSSSDTPLGTVALLQEKQKAQKTPYIVLSGSGKSMNANTITK

SEQ ID NO: 8995 - DNA, 1444 bp, Homo sapiens
ggcctggcattggggtcaatcaacacccgccctgttattatacaccttgtgggcacaggtggctccggccccacccagggccctgcatctcctctcatgccccgcgtccccaggctttccggcagctgtcgcaccgcttccatggcaagggctcaggcaagatgaagacagagcggcggatgaagaagctggacgaggaggcgctcctgaagaagatgagctccagcgacacgcccctgggcaccgtggccctgctccaggagaagcagaaggctcagaagaccccctacatcgtgctcagcggcagcggcaagagcatgaacgcgaacaccatcaccaagtgacagcgccctcccgccccggccctgcctcaaccttcatattaaataaagctccctccttattttttcctccctggtcgtggtacagattccagggttggatctttggttgggtgtggcacagagtctggctcctgctaggtgagacctggccatcaaatgacacaaacaactaaacgatggaagagagagcgagcccgggtcctctaaggctccttccttctcccctggctgtcggtcacacctctgcagggccggctctctgatagaaagtggaaggcggttttagaaactcatcaccctgctctctcctggcctcgggggctgcacaggtcactgtcctgtaatgtctcccggtcagggcagcccaggactgcccagcctggtgggctggggattgggctttgggtagggcacaggtgccaccttctgtcctggctgtcctgtgccaccctggtctgtgtctagaggagtgaaactcccagggttgggctgggagtatttggtgcacgcggtatggggagggctgagctcagtgcctcctgggagacttgtcccgtgtacagtgacccagaaagatgagattccttggcctgaactctgtgatagagtgtgactgagctgctgggggacatgtgagcctcaaatccatagaaagacaaacggccaccttgggtgcccaggatactggtgcctggccccacgtacacccacatacttctcagatggctcccacattttaagattttaaaaatgaaaccaaaaaataaattgaagaaaactgtaaactttaaagaataatcagctgggcgcagtggctcatgcttgtaatcacagcactttaggaggctgaggcaggaggactgtttgagcccaggagtttgagaccaacctgagtaaggtggcaaaaccccatctctaccaaaaatacaaagattagccaggcgtggtggtgagcgcctgtagtcccagctacttgggatgctgaggtgggaggatcacttgaacctgggagacacaggctgcagtgggccctgattgagccaccacactgcagcctaggtgacagtcagaccctgtctcaaaaaaaataaaaaaaattt

SEQ ID NO: 8996 - protein, 60 aa, Homo sapiens; identical to SEQ ID NO: 8994

SEQ ID NO: 8997 - DNA, 3283 bp, Homo sapiens
cccgcaacccctctggcctccaatcagggccctgctccgcggctggcgctcacccgcaacttcagttcccgtaacggttcctcccgccacccggccgctcctgcggatacctcaagccactagaactttcttccacttccgcttccgggtcgcttcaagagccgcctttaaaaaagaaacattccacgttgggcacttctagccagttagagctatagagttgaggcgccccggacctcgacggcgtccttagtaggcgctcctttccggtccttcgcgggaagccctgccttctaaggtctcgcttctcgcgcagttctgagggagataggcctccagggagaggacttcctttctctgctgcccggacccggaactcaaggacttaggcttgacggacctggcgtggggaagagttagaagacggacaagggaggggacgggaggcctccgagacagcgccggaagtacggttttcggagggatcagactcagactcacgtcgcactcctcgcagttggactggtgggaactgggaacactggagacctgatttctaactgacgctaccgtcgcggccgccggcaagttcctttactgtgttttcttggttcagccttgaagtgagtcgtggacgatcctctctcagcgtccagcctagacggcggtgttgctccggcagcgttcctgggagccgagggccagagactaagttgtgggacgacttcagcatgtctcaggccaccaagaggaagcatgtggtgaaggaggtgctaggggagcacatagtgccctccgaccagcagcagattgtcagggtactcaggaccccagggaacaatctgcatgaggtggagacagcccaagggcagcgcttcctggtgagcatgccctccaaataccgcaagaacatctggatcaagagaggggactttctcattgttgaccccattgaagagggagaaaaggtgaaggctgaaatctcgtttgtgctctgcaaggaccacgtgcgctctctgcagaaggaggggttttggcctgaggccttctctgaagtggctgagaaacacaacaacaggaacagacaaactcaaccagaactcccagctgagccacagttatcaggagaggagtccagctcagaagatgattctgacctgtttgttaacacaaaccgcagacagtatcatgagagtgaggaggagagtgaagaggaggaggcagcctgagactccaggacccaattctccacttgctcagggactggcccctggctcttctgggcttggacattcccagggtgctctgcacatcttcacccctgcatgaggacaaagcagggctcctctctgaactgatcttttgattcagagaattaaacccctggtgggttggtgacttgttctggtgtctgagtggctctctcgggggagggagattgtgatgaagtgaaaaactgctccctatttattagagaccttgtgggtgggtgggctgaatggggaggaaatgggaaatggctggagtctttcccaggtggtttgttctttcttattgggcacttagaaagtgccaggccgtgctctgggccttcttgcatgtgtttaacagctgggagcactcctgcttccttgcctgcttgcagttcataccaatttaagcattcaggatgacagccctaggacctaacacccacctgcctctaagagacgctcaggagcccatggtgcctcgtgctgttctccccgcctttctagtcaccctgtgtacgggagtgctcacctccagctactgtgtccatccccacatacgacctcatctctcccactctgcaccatctatcacttccagaaggtggctggcaaatctctctatccttaactttgttttgaatggtccatccatctcctgactttatttgaaacctgattattccctgaggacattgattgtcttataaccttttaaatagaggctgcttttccaccctcacccttcattcttctaaccagccctgacattctcatgagtaaccttctgccttcacttccctcttgtgtagcatcaattccgtagtccaccctacacccctctgtctccctccattctgttccgctagtaaaaccctaaccctgggtaaacccaatcattcacctctgtgcccaaacccaagtcaccatcattaggtgagaaaacagccagcctggccaccagttgtaccttacgtttatcattacaaacctcagatggacactaagcactgcccagcagatctactctgggatgtctgtttcaaaacttctgtcttatctatcaattcccccttgtggtagttaccacaacacatgcctcattaagaaacagcaaccatcagagggaatgcctgcctccctgttaccagctctgcagatgtgcacatatcttcctgtcgtaagccaatgggacttaaaccttacctcttgtgttttggagactatctttttttttttttttttttttttgagagagtgtctccctgtgttgctcaggctggagtgcagtggtgtgatctcggctcactgtaaccttcacctactgggttcaagtaactctcctgcctcagcctcccgagtagcttggactacaggcgtgcaccaccacacctggctaactttttgtatttttagtagagacggggttttgccatgttgcccgggctggtctcgaactcctgaccttaaatgagcctcctgcctcagcctcccaaactgctgggattacaggcgtgtgccaccatgcctggctaatttttatattttcagtagagacgaggttttgccatgttggccaggctggtctcgaactcctgacctcaagtggtccacccaccttggcctcctagagtgctgggattacaggtgtgagccactgtgcccggcctcttttgctttcttaaagactttggtcgggtatttgtgttgttgagtattgtgtctgggtgtgggtatttgattctttttttgttttgtgtttttggctgtcctgtctattggatgtgatatgttatggatgtgatgtgttagtgtcgagcgtgctgtagaatctcccatttctgaaacaggcgtgaaaacctgtactgattcccacgtcctccagctaccacttcatttgtctgtttctcatttactttctcttatagcgtggctttaaacatatatacatttgtatatatgtatatatgaatataatgtataaaatgtatgtagatgtatatacaaaaaataaacgagatgggttaaagata

SEQ ID NO: 8998 - protein, 165 aa, Homo sapiens; identical to SEQ ID NO: 1374

SEQ ID NO: 8999 - DNA, 3153 bp, Homo sapiens
cccgcaacccctctggcctccaatcagggccctgctccgcggctggcgctcacccgcaacttcagttcccgtaacggttcctcccgccacccggccgctcctgcggatacctcaagccactagaactttcttccacttccgcttccgggtcgcttcaagagccgcctttaaaaaagaaacattccacgttgggcacttctagccagttagagctatagagttgaggcgccccggacctcgacggcgtccttagtaggcgctcctttccggtccttcgcgggaagccctgccttctaaggtctcgcttctcgcgcagttctgagggagataggcctccagggagaggacttcctttctctgctgcccggacccggaactcaaggacttaggcttgacggacctggcgtggggaagagttagaagacggacaagggaggggacgggaggcctccgagacagcgccggaagtacggttttcggagggatcagactcagactcacgtcgcactcctcgcagttggactggtgggaactgggaacactggagacctgatttctaactgacgctaccgtcgcggccgccgtgtgggacgacttcagcatgtctcaggccaccaagaggaagcatgtggtgaaggaggtgctaggggagcacatagtgccctccgaccagcagcagattgtcagggtactcaggaccccagggaacaatctgcatgaggtggagacagcccaagggcagcgcttcctggtgagcatgccctccaaataccgcaagaacatctggatcaagagaggggactttctcattgttgaccccattgaagagggagaaaaggtgaaggctgaaatctcgtttgtgctctgcaaggaccacgtgcgctctctgcagaaggaggggttttggcctgaggccttctctgaagtggctgagaaacacaacaacaggaacagacaaactcaaccagaactcccagctgagccacagttatcaggagaggagtccagctcagaagatgattctgacctgtttgttaacacaaaccgcagacagtatcatgagagtgaggaggagagtgaagaggaggaggcagcctgagactccaggacccaattctccacttgctcagggactggcccctggctcttctgggcttggacattcccagggtgctctgcacatcttcacccctgcatgaggacaaagcagggctcctctctgaactgatcttttgattcagagaattaaacccctggtgggttggtgacttgttctggtgtctgagtggctctctcgggggagggagattgtgatgaagtgaaaaactgctccctatttattagagaccttgtgggtgggtgggctgaatggggaggaaatgggaaatggctggagtctttcccaggtggtttgttctttcttattgggcacttagaaagtgccaggccgtgctctgggccttcttgcatgtgtttaacagctgggagcactcctgcttccttgcctgcttgcagttcataccaatttaagcattcaggatgacagccctaggacctaacacccacctgcctctaagagacgctcaggagcccatggtgcctcgtgctgttctccccgcctttctagtcaccctgtgtacgggagtgctcacctccagctactgtgtccatccccacatacgacctcatctctcccactctgcaccatctatcacttccagaaggtggctggcaaatctctctatccttaactttgttttgaatggtccatccatctcctgactttatttgaaacctgattattccctgaggacattgattgtcttataaccttttaaatagaggctgcttttccaccctcacccttcattcttctaaccagccctgacattctcatgagtaaccttctgccttcacttccctcttgtgtagcatcaattccgtagtccaccctacacccctctgtctccctccattctgttccgctagtaaaaccctaaccctgggtaaacccaatcattcacctctgtgcccaaacccaagtcaccatcattaggtgagaaaacagccagcctggccaccagttgtaccttacgtttatcattacaaacctcagatggacactaagcactgcccagcagatctactctgggatgtctgtttcaaaacttctgtcttatctatcaattcccccttgtggtagttaccacaacacatgcctcattaagaaacagcaaccatcagagggaatgcctgcctccctgttaccagctctgcagatgtgcacatatcttcctgtcgtaagccaatgggacttaaaccttacctcttgtgttttggagactatctttttttttttttttttttttttgagagagtgtctccctgtgttgctcaggctggagtgcagtggtgtgatctcggctcactgtaaccttcacctactgggttcaagtaactctcctgcctcagcctcccgagtagcttggactacaggcgtgcaccaccacacctggctaactttttgtatttttagtagagacggggttttgccatgttgcccgggctggtctcgaactcctgaccttaaatgagcctcctgcctcagcctcccaaactgctgggattacaggcgtgtgccaccatgcctggctaatttttatattttcagtagagacgaggttttgccatgttggccaggctggtctcgaactcctgacctcaagtggtccacccaccttggcctcctagagtgctgggattacaggtgtgagccactgtgcccggcctcttttgctttcttaaagactttggtcgggtatttgtgttgttgagtattgtgtctgggtgtgggtatttgattctttttttgttttgtgtttttggctgtcctgtctattggatgtgatatgttatggatgtgatgtgttagtgtcgagcgtgctgtagaatctcccatttctgaaacaggcgtgaaaacctgtactgattcccacgtcctccagctaccacttcatttgtctgtttctcatttactttctcttatagcgtggctttaaacatatatacatttgtatatatgtatatatgaatataatgtataaaatgtatgtagatgtatatacaaaaaataaacgagatgggttaaagata

SEQ ID NO: 9000 - protein, 165 aa, Homo sapiens; identical to SEQ ID NO: 1374

SEQ ID NO: 9001 - DNA, 3227 bp, Homo sapiens
cccgcaacccctctggcctccaatcagggccctgctccgcggctggcgctcacccgcaacttcagttcccgtaacggttcctcccgccacccggccgctcctgcggatacctcaagccactagaactttcttccacttccgcttccgggtcgcttcaagagccgcctttaaaaaagaaacattccacgttgggcacttctagccagttagagctatagagttgaggcgccccggacctcgacggcgtccttagtaggcgctcctttccggtccttcgcgggaagccctgccttctaaggtctcgcttctcgcgcagttctgagggagataggcctccagggagaggacttcctttctctgctgcccggacccggaactcaaggacttaggcttgacggacctggcgtggggaagagttagaagacggacaagggaggggacgggaggcctccgagacagcgccggaagtacggttttcggagggatcagactcagactcacgtcgcactcctcgcagttggactggtgggaactgggaacactggagacctgatttctaactgacgctaccgtcgcggccgccggcaatcctgggttctgagcctgccatccaaggaactcaggaggaggagttgacagtctcttcgttcctaaccagtgtgggacgacttcagcatgtctcaggccaccaagaggaagcatgtggtgaaggaggtgctaggggagcacatagtgccctccgaccagcagcagattgtcagggtactcaggaccccagggaacaatctgcatgaggtggagacagcccaagggcagcgcttcctggtgagcatgccctccaaataccgcaagaacatctggatcaagagaggggactttctcattgttgaccccattgaagagggagaaaaggtgaaggctgaaatctcgtttgtgctctgcaaggaccacgtgcgctctctgcagaaggaggggttttggcctgaggccttctctgaagtggctgagaaacacaacaacaggaacagacaaactcaaccagaactcccagctgagccacagttatcaggagaggagtccagctcagaagatgattctgacctgtttgttaacacaaaccgcagacagtatcatgagagtgaggaggagagtgaagaggaggaggcagcctgagactccaggacccaattctccacttgctcagggactggcccctggctcttctgggcttggacattcccagggtgctctgcacatcttcacccctgcatgaggacaaagcagggctcctctctgaactgatcttttgattcagagaattaaacccctggtgggttggtgacttgttctggtgtctgagtggctctctcgggggagggagattgtgatgaagtgaaaaactgctccctatttattagagaccttgtgggtgggtgggctgaatggggaggaaatgggaaatggctggagtctttcccaggtggtttgttctttcttattgggcacttagaaagtgccaggccgtgctctgggccttcttgcatgtgtttaacagctgggagcactcctgcttccttgcctgcttgcagttcataccaatttaagcattcaggatgacagccctaggacctaacacccacctgcctctaagagacgctcaggagcccatggtgcctcgtgctgttctccccgcctttctagtcaccctgtgtacgggagtgctcacctccagctactgtgtccatccccacatacgacctcatctctcccactctgcaccatctatcacttccagaaggtggctggcaaatctctctatccttaactttgttttgaatggtccatccatctcctgactttatttgaaacctgattattccctgaggacattgattgtcttataaccttttaaatagaggctgcttttccaccctcacccttcattcttctaaccagccctgacattctcatgagtaaccttctgccttcacttccctcttgtgtagcatcaattccgtagtccaccctacacccctctgtctccctccattctgttccgctagtaaaaccctaaccctgggtaaacccaatcattcacctctgtgcccaaacccaagtcaccatcattaggtgagaaaacagccagcctggccaccagttgtaccttacgtttatcattacaaacctcagatggacactaagcactgcccagcagatctactctgggatgtctgtttcaaaacttctgtcttatctatcaattcccccttgtggtagttaccacaacacatgcctcattaagaaacagcaaccatcagagggaatgcctgcctccctgttaccagctctgcagatgtgcacatatcttcctgtcgtaagccaatgggacttaaaccttacctcttgtgttttggagactatctttttttttttttttttttttttgagagagtgtctccctgtgttgctcaggctggagtgcagtggtgtgatctcggctcactgtaaccttcacctactgggttcaagtaactctcctgcctcagcctcccgagtagcttggactacaggcgtgcaccaccacacctggctaactttttgtatttttagtagagacggggttttgccatgttgcccgggctggtctcgaactcctgaccttaaatgagcctcctgcctcagcctcccaaactgctgggattacaggcgtgtgccaccatgcctggctaatttttatattttcagtagagacgaggttttgccatgttggccaggctggtctcgaactcctgacctcaagtggtccacccaccttggcctcctagagtgctgggattacaggtgtgagccactgtgcccggcctcttttgctttcttaaagactttggtcgggtatttgtgttgttgagtattgtgtctgggtgtgggtatttgattctttttttgttttgtgtttttggctgtcctgtctattggatgtgatatgttatggatgtgatgtgttagtgtcgagcgtgctgtagaatctcccatttctgaaacaggcgtgaaaacctgtactgattcccacgtcctccagctaccacttcatttgtctgtttctcatttactttctcttatagcgtggctttaaacatatatacatttgtatatatgtatatatgaatataatgtataaaatgtatgtagatgtatatacaaaaaataaacgagatgggttaaagata

SEQ ID NO: 9002 - protein, 165 aa, Homo sapiens; identical to SEQ ID NO: 1374

SEQ ID NO: 9003 - DNA, 3358 bp, Homo sapiens
cccgcaacccctctggcctccaatcagggccctgctccgcggctggcgctcacccgcaacttcagttcccgtaacggttcctcccgccacccggccgctcctgcggatacctcaagccactagaactttcttccacttccgcttccgggtcgcttcaagagccgcctttaaaaaagaaacattccacgttgggcacttctagccagttagagctatagagttgaggcgccccggacctcgacggcgtccttagtaggcgctcctttccggtccttcgcgggaagccctgccttctaaggtctcgcttctcgcgcagttctgagggagataggcctccagggagaggacttcctttctctgctgcccggacccggaactcaaggacttaggcttgacggacctggcgtggggaagagttagaagacggacaagggaggggacgggaggcctccgagacagcgccggaagtacggttttcggagggatcagactcagactcacgtcgcactcctcgcagttggactggtgggaactgggaacactggagacctgatttctaactgacgctaccgtcgcggccgccggcaagttcctttactgtgttttcttggttcagccttgaagtgagtcgtggacgatcctctctcagcgtccagcctagacggcggtgttgctccggcagcgttcctgggagccgagggccagagactaagtaacagtcctgggttctgagcctgccatccaaggaactcaggaggaggagttgacagtctcttcgttcctaaccagtgtgggacgacttcagcatgtctcaggccaccaagaggaagcatgtggtgaaggaggtgctaggggagcacatagtgccctccgaccagcagcagattgtcagggtactcaggaccccagggaacaatctgcatgaggtggagacagcccaagggcagcgcttcctggtgagcatgccctccaaataccgcaagaacatctggatcaagagaggggactttctcattgttgaccccattgaagagggagaaaaggtgaaggctgaaatctcgtttgtgctctgcaaggaccacgtgcgctctctgcagaaggaggggttttggcctgaggccttctctgaagtggctgagaaacacaacaacaggaacagacaaactcaaccagaactcccagctgagccacagttatcaggagaggagtccagctcagaagatgattctgacctgtttgttaacacaaaccgcagacagtatcatgagagtgaggaggagagtgaagaggaggaggcagcctgagactccaggacccaattctccacttgctcagggactggcccctggctcttctgggcttggacattcccagggtgctctgcacatcttcacccctgcatgaggacaaagcagggctcctctctgaactgatcttttgattcagagaattaaacccctggtgggttggtgacttgttctggtgtctgagtggctctctcgggggagggagattgtgatgaagtgaaaaactgctccctatttattagagaccttgtgggtgggtgggctgaatggggaggaaatgggaaatggctggagtctttcccaggtggtttgttctttcttattgggcacttagaaagtgccaggccgtgctctgggccttcttgcatgtgtttaacagctgggagcactcctgcttccttgcctgcttgcagttcataccaatttaagcattcaggatgacagccctaggacctaacacccacctgcctctaagagacgctcaggagcccatggtgcctcgtgctgttctccccgcctttctagtcaccctgtgtacgggagtgctcacctccagctactgtgtccatccccacatacgacctcatctctcccactctgcaccatctatcacttccagaaggtggctggcaaatctctctatccttaactttgttttgaatggtccatccatctcctgactttatttgaaacctgattattccctgaggacattgattgtcttataaccttttaaatagaggctgcttttccaccctcacccttcattcttctaaccagccctgacattctcatgagtaaccttctgccttcacttccctcttgtgtagcatcaattccgtagtccaccctacacccctctgtctccctccattctgttccgctagtaaaaccctaaccctgggtaaacccaatcattcacctctgtgcccaaacccaagtcaccatcattaggtgagaaaacagccagcctggccaccagttgtaccttacgtttatcattacaaacctcagatggacactaagcactgcccagcagatctactctgggatgtctgtttcaaaacttctgtcttatctatcaattcccccttgtggtagttaccacaacacatgcctcattaagaaacagcaaccatcagagggaatgcctgcctccctgttaccagctctgcagatgtgcacatatcttcctgtcgtaagccaatgggacttaaaccttacctcttgtgttttggagactatctttttttttttttttttttttttgagagagtgtctccctgtgttgctcaggctggagtgcagtggtgtgatctcggctcactgtaaccttcacctactgggttcaagtaactctcctgcctcagcctcccgagtagcttggactacaggcgtgcaccaccacacctggctaactttttgtatttttagtagagacggggttttgccatgttgcccgggctggtctcgaactcctgaccttaaatgagcctcctgcctcagcctcccaaactgctgggattacaggcgtgtgccaccatgcctggctaatttttatattttcagtagagacgaggttttgccatgttggccaggctggtctcgaactcctgacctcaagtggtccacccaccttggcctcctagagtgctgggattacaggtgtgagccactgtgcccggcctcttttgctttcttaaagactttggtcgggtatttgtgttgttgagtattgtgtctgggtgtgggtatttgattctttttttgttttgtgtttttggctgtcctgtctattggatgtgatatgttatggatgtgatgtgttagtgtcgagcgtgctgtagaatctcccatttctgaaacaggcgtgaaaacctgtactgattcccacgtcctccagctaccacttcatttgtctgtttctcatttactttctcttatagcgtggctttaaacatatatacatttgtatatatgtatatatgaatataatgtataaaatgtatgtagatgtatatacaaaaaataaacgagatgggttaaagata

SEQ ID NO: 9004 - protein, 165 aa, Homo sapiens; identical to SEQ ID NO: 1374

SEQ ID NO: 9005 - DNA, 3049 bp, Homo sapiens
cccgcaacccctctggcctccaatcagggccctgctccgcggctggcgctcacccgcaacttcagttcccgtaacggttcctcccgccacccggccgctcctgcggatacctcaagccactagaactttcttccacttccgcttccgggtcgcttcaagagccgcctttaaaaaagaaacattccacgttgggcacttctagccagttagagctatagagttgaggcgccccggacctcgacggcgtccttagtaggcgctcctttccggtccttcgcgggaagccctgccttctaaggtctcgcttctcgcgcagttctgagggagataggcctccagggagaggacttcctttctctgctgcccggacccggaactcaaggacttaggcttgacggacctggcgtggggaagagttagaagacggacaagggaggggacgggaggcctccgagacagcgccggaagtacggttttcggagggatcagactcagactcacgtcgcactcctcgcagttggactggtgggaactgggaacactggagacctgatttctaactgacgctaccgtcgcggccgccggtactcaggaccccagggaacaatctgcatgaggtggagacagcccaagggcagcgcttcctggtgagcatgccctccaaataccgcaagaacatctggatcaagagaggggactttctcattgttgaccccattgaagagggagaaaaggtgaaggctgaaatctcgtttgtgctctgcaaggaccacgtgcgctctctgcagaaggaggggttttggcctgaggccttctctgaagtggctgagaaacacaacaacaggaacagacaaactcaaccagaactcccagctgagccacagttatcaggagaggagtccagctcagaagatgattctgacctgtttgttaacacaaaccgcagacagtatcatgagagtgaggaggagagtgaagaggaggaggcagcctgagactccaggacccaattctccacttgctcagggactggcccctggctcttctgggcttggacattcccagggtgctctgcacatcttcacccctgcatgaggacaaagcagggctcctctctgaactgatcttttgattcagagaattaaacccctggtgggttggtgacttgttctggtgtctgagtggctctctcgggggagggagattgtgatgaagtgaaaaactgctccctatttattagagaccttgtgggtgggtgggctgaatggggaggaaatgggaaatggctggagtctttcccaggtggtttgttctttcttattgggcacttagaaagtgccaggccgtgctctgggccttcttgcatgtgtttaacagctgggagcactcctgcttccttgcctgcttgcagttcataccaatttaagcattcaggatgacagccctaggacctaacacccacctgcctctaagagacgctcaggagcccatggtgcctcgtgctgttctccccgcctttctagtcaccctgtgtacgggagtgctcacctccagctactgtgtccatccccacatacgacctcatctctcccactctgcaccatctatcacttccagaaggtggctggcaaatctctctatccttaactttgttttgaatggtccatccatctcctgactttatttgaaacctgattattccctgaggacattgattgtcttataaccttttaaatagaggctgcttttccaccctcacccttcattcttctaaccagccctgacattctcatgagtaaccttctgccttcacttccctcttgtgtagcatcaattccgtagtccaccctacacccctctgtctccctccattctgttccgctagtaaaaccctaaccctgggtaaacccaatcattcacctctgtgcccaaacccaagtcaccatcattaggtgagaaaacagccagcctggccaccagttgtaccttacgtttatcattacaaacctcagatggacactaagcactgcccagcagatctactctgggatgtctgtttcaaaacttctgtcttatctatcaattcccccttgtggtagttaccacaacacatgcctcattaagaaacagcaaccatcagagggaatgcctgcctccctgttaccagctctgcagatgtgcacatatcttcctgtcgtaagccaatgggacttaaaccttacctcttgtgttttggagactatctttttttttttttttttttttttgagagagtgtctccctgtgttgctcaggctggagtgcagtggtgtgatctcggctcactgtaaccttcacctactgggttcaagtaactctcctgcctcagcctcccgagtagcttggactacaggcgtgcaccaccacacctggctaactttttgtatttttagtagagacggggttttgccatgttgcccgggctggtctcgaactcctgaccttaaatgagcctcctgcctcagcctcccaaactgctgggattacaggcgtgtgccaccatgcctggctaatttttatattttcagtagagacgaggttttgccatgttggccaggctggtctcgaactcctgacctcaagtggtccacccaccttggcctcctagagtgctgggattacaggtgtgagccactgtgcccggcctcttttgctttcttaaagactttggtcgggtatttgtgttgttgagtattgtgtctgggtgtgggtatttgattctttttttgttttgtgtttttggctgtcctgtctattggatgtgatatgttatggatgtgatgtgttagtgtcgagcgtgctgtagaatctcccatttctgaaacaggcgtgaaaacctgtactgattcccacgtcctccagctaccacttcatttgtctgtttctcatttactttctcttatagcgtggctttaaacatatatacatttgtatatatgtatatatgaatataatgtataaaatgtatgtagatgtatatacaaaaaataaacgagatgggttaaagata

SEQ ID NO: 9006 - protein, 113 aa, Homo sapiens
MPSKYRKNIWIKRGDFLIVDPIEEGEKVKAEISFVLCKDHVRSLQKEGFWPEAFSEVAEKHNNRNRQTQPELPAEPQLSGEESSSEDDSDLFVNTNRRQYHESEEESEEEEAA

SEQ ID NO: 9007 - DNA, 1087 bp, Homo sapiens
cccgcaacccctctggcctccaatcagggccctgctccgcggctggcgctcacccgcaacttcagttcccgtaacggttcctcccgccacccggccgctcctgcggatacctcaagccactagaactttcttccacttccgcttccgggtcgcttcaagagccgcctttaaaaaagaaacattccacgttgggcacttctagccagttagagctatagagttgaggcgccccggacctcgacggcgtccttagtaggcgctcctttccggtccttcgcgggaagccctgccttctaaggtctcgcttctcgcgcagttctgagggagataggcctccagggagaggacttcctttctctgctgcccggacccggaactcaaggacttaggcttgacggacctggcgtggggaagagttagaagacggacaagggaggggacgggaggcctccgagacagcgccggaagtacggttttcggagggatcagactcagactcacgtcgcactcctcgcagttggactggtgggaactgggaacactggagacctgatttctaactgacgctaccgtcgcggccgccggcaagttcctttactgtgttttcttggttcagccttgaagtgagtcgtggacgatcctctctcagcgtccagcctagacggcggtgttgctccggcagcgttcctgggagccgagggccagagactaagtaacagtcctgggttctgagcctgccatccaaggaactcaggaggaggagttgacagtctcttcgttcctaaccagtgtgggacgacttcagcatgtctcaggccaccaagaggaagcatgtggtgaaggaggtgctaggggagcacatagtgccctccgaccagcagcagattgtcagggtactcaggaccccagggaacaatctgcatgagtaaccttctgccttcacttccctcttgtgtagcatcaattccgtagtccaccctacacccctctgtctccctccattctgttccgctagtaaaaccctaaccctgggtaaacccaatcattcacctctgtgcccaaacccaagtcaccatcattaggtgag

SEQ ID NO: 9008 - protein, 40 aa, Homo sapiens
MSQATKRKHVVKEVLGEHIVPSDQQQIVRVLRTPGNNLHE

SEQ ID NO: 9009 - DNA, 1478 bp, Homo sapiens
cccgcaacccctctggcctccaatcagggccctgctccgcggctggcgctcacccgcaacttcagttcccgtaacggttcctcccgccacccggccgctcctgcggatacctcaagccactagaactttcttccacttccgcttccgggtcgcttcaagagccgcctttaaaaaagaaacattccacgttgggcacttctagccagttagagctatagagttgaggcgccccggacctcgacggcgtccttagtaggcgctcctttccggtccttcgcgggaagccctgccttctaaggtctcgcttctcgcgcagttctgagggagataggcctccagggagaggacttcctttctctgctgcccggacccggaactcaaggacttaggcttgacggacctggcgtggggaagagttagaagacggacaagggaggggacgggaggcctccgagacagcgccggaagtacggttttcggagggatcagactcagactcacgtcgcactcctcgcagttggactggtgggaactgggaacactggagacctgatttctaactgacgctaccgtcgcggccgccggcaagttcctttactgtgttttcttggttcagccttgaagtgagtcgtggacgatcctctctcagcgtccagcctagacggcggtgttgctccggcagcgttcctgggagccgagggccagagactaagtaacagtcctgggttctgagcctgccatccaaggaactcaggaggaggagttgacagtctcttcgttcctaaccagtgtgggacgacttcagcatgtctcaggccaccaagaggaagcatgtggtgaaggaggtgctaggggagcacatagtgccctccgaccagcagcagattgtcagggtactcaggaccccagggaacaatctgcatgaggtggagacagcccaagggcagcgcttcctggtgagcatgccctccaaataccgcaagaacatctggatcaagagaggggactttctcattgttgaccccattgaagagggagaaaaggtgaaggctgaaatctcgtttgtgctctgcaaggaccacgtgcgctctctgcagaaggaggggttttggcctgaggccttctctgaagtggctgagaaacacaacaacaggaacagacaaactcaaccagaactcccagctgagccacagttatcaggagaggagtccagctcagaagatgattctgacctgtttgttaacacaaaccgcagacagtatcatgagagtgaggaggagagtgaagaggaggaggcagcctgagactccaggacccaattctccacttgctcagggactggcccctggctcttctgggcttggacattcccagggtgctctgcacatcttcacccctgcatgaggacaaagcagggctcctctctgaactgatcttttgattcagagaattaaacccctggtgggttggtgacttgt

SEQ ID NO: 9010 - protein, 165 aa, Homo sapiens; identical to SEQ ID NO: 1374

SEQ ID NO: 9011 - DNA, 1347 bp, Homo sapiens
cccgcaacccctctggcctccaatcagggccctgctccgcggctggcgctcacccgcaacttcagttcccgtaacggttcctcccgccacccggccgctcctgcggatacctcaagccactagaactttcttccacttccgcttccgggtcgcttcaagagccgcctttaaaaaagaaacattccacgttgggcacttctagccagttagagctatagagttgaggcgccccggacctcgacggcgtccttagtaggcgctcctttccggtccttcgcgggaagccctgccttctaaggtctcgcttctcgcgcagttctgagggagataggcctccagggagaggacttcctttctctgctgcccggacccggaactcaaggacttaggcttgacggacctggcgtggggaagagttagaagacggacaagggaggggacgggaggcctccgagacagcgccggaagtacggttttcggagggatcagactcagactcacgtcgcactcctcgcagttggactggtgggaactgggaacactggagacctgatttctaactgacgctaccgtcgcggccgccggcaatcctgggttctgagcctgccatccaaggaactcaggaggaggagttgacagtctcttcgttcctaaccagtgtgggacgacttcagcatgtctcaggccaccaagaggaagcatgtggtgaaggaggtgctaggggagcacatagtgccctccgaccagcagcagattgtcagggtactcaggaccccagggaacaatctgcatgaggtggagacagcccaagggcagcgcttcctggtgagcatgccctccaaataccgcaagaacatctggatcaagagaggggactttctcattgttgaccccattgaagagggagaaaaggtgaaggctgaaatctcgtttgtgctctgcaaggaccacgtgcgctctctgcagaaggaggggttttggcctgaggccttctctgaagtggctgagaaacacaacaacaggaacagacaaactcaaccagaactcccagctgagccacagttatcaggagaggagtccagctcagaagatgattctgacctgtttgttaacacaaaccgcagacagtatcatgagagtgaggaggagagtgaagaggaggaggcagcctgagactccaggacccaattctccacttgctcagggactggcccctggctcttctgggcttggacattcccagggtgctctgcacatcttcacccctgcatgaggacaaagcagggctcctctctgaactgatcttttgattcagagaattaaacccctggtgggttggtgacttgt

SEQ ID NO: 9012 - protein, 165 aa, Homo sapiens; identical to SEQ ID NO: 1374

SEQ ID NO: 9013 - DNA, 1403 bp, Homo sapiens
cccgcaacccctctggcctccaatcagggccctgctccgcggctggcgctcacccgcaacttcagttcccgtaacggttcctcccgccacccggccgctcctgcggatacctcaagccactagaactttcttccacttccgcttccgggtcgcttcaagagccgcctttaaaaaagaaacattccacgttgggcacttctagccagttagagctatagagttgaggcgccccggacctcgacggcgtccttagtaggcgctcctttccggtccttcgcgggaagccctgccttctaaggtctcgcttctcgcgcagttctgagggagataggcctccagggagaggacttcctttctctgctgcccggacccggaactcaaggacttaggcttgacggacctggcgtggggaagagttagaagacggacaagggaggggacgggaggcctccgagacagcgccggaagtacggttttcggagggatcagactcagactcacgtcgcactcctcgcagttggactggtgggaactgggaacactggagacctgatttctaactgacgctaccgtcgcggccgccggcaagttcctttactgtgttttcttggttcagccttgaagtgagtcgtggacgatcctctctcagcgtccagcctagacggcggtgttgctccggcagcgttcctgggagccgagggccagagactaagttgtgggacgacttcagcatgtctcaggccaccaagaggaagcatgtggtgaaggaggtgctaggggagcacatagtgccctccgaccagcagcagattgtcagggtactcaggaccccagggaacaatctgcatgaggtggagacagcccaagggcagcgcttcctggtgagcatgccctccaaataccgcaagaacatctggatcaagagaggggactttctcattgttgaccccattgaagagggagaaaaggtgaaggctgaaatctcgtttgtgctctgcaaggaccacgtgcgctctctgcagaaggaggggttttggcctgaggccttctctgaagtggctgagaaacacaacaacaggaacagacaaactcaaccagaactcccagctgagccacagttatcaggagaggagtccagctcagaagatgattctgacctgtttgttaacacaaaccgcagacagtatcatgagagtgaggaggagagtgaagaggaggaggcagcctgagactccaggacccaattctccacttgctcagggactggcccctggctcttctgggcttggacattcccagggtgctctgcacatcttcacccctgcatgaggacaaagcagggctcctctctgaactgatcttttgattcagagaattaaacccctggtgggttggtgacttgt

SEQ ID NO: 9014 - protein, 165 aa, Homo sapiens; identical to SEQ ID NO: 1374

SEQ ID NO: 9015 - DNA, 1273 bp, Homo sapiens
cccgcaacccctctggcctccaatcagggccctgctccgcggctggcgctcacccgcaacttcagttcccgtaacggttcctcccgccacccggccgctcctgcggatacctcaagccactagaactttcttccacttccgcttccgggtcgcttcaagagccgcctttaaaaaagaaacattccacgttgggcacttctagccagttagagctatagagttgaggcgccccggacctcgacggcgtccttagtaggcgctcctttccggtccttcgcgggaagccctgccttctaaggtctcgcttctcgcgcagttctgagggagataggcctccagggagaggacttcctttctctgctgcccggacccggaactcaaggacttaggcttgacggacctggcgtggggaagagttagaagacggacaagggaggggacgggaggcctccgagacagcgccggaagtacggttttcggagggatcagactcagactcacgtcgcactcctcgcagttggactggtgggaactgggaacactggagacctgatttctaactgacgctaccgtcgcggccgccgtgtgggacgacttcagcatgtctcaggccaccaagaggaagcatgtggtgaaggaggtgctaggggagcacatagtgccctccgaccagcagcagattgtcagggtactcaggaccccagggaacaatctgcatgaggtggagacagcccaagggcagcgcttcctggtgagcatgccctccaaataccgcaagaacatctggatcaagagaggggactttctcattgttgaccccattgaagagggagaaaaggtgaaggctgaaatctcgtttgtgctctgcaaggaccacgtgcgctctctgcagaaggaggggttttggcctgaggccttctctgaagtggctgagaaacacaacaacaggaacagacaaactcaaccagaactcccagctgagccacagttatcaggagaggagtccagctcagaagatgattctgacctgtttgttaacacaaaccgcagacagtatcatgagagtgaggaggagagtgaagaggaggaggcagcctgagactccaggacccaattctccacttgctcagggactggcccctggctcttctgggcttggacattcccagggtgctctgcacatcttcacccctgcatgaggacaaagcagggctcctctctgaactgatcttttgattcagagaattaaacccctggtgggttggtgacttgt

SEQ ID NO: 9016 - protein, 165 aa, Homo sapiens; identical to SEQ ID NO: 1374

SEQ ID NO: 9017 - DNA, 1030 bp, Homo sapiens
cccgcaacccctctggcctccaatcagggccctgctccgcggctggcgctcacccgcaacttcagttcccgtaacggttcctcccgccacccggccgctcctgcggatacctcaagccactagaactttcttccacttccgcttccgggtcgcttcaagagccgcctttaaaaaagaaacattccacgttgggcacttctagccagttagagctatagagttgaggcgccccggacctcgacggcgtccttagtaggcgctcctttccggtccttcgcgggaagccctgccttctaaggtctcgcttctcgcgcagttctgagggagataggcctccagggagaggacttcctttctctgctgcccggacccggaactcaaggacttaggcttgacggacctggcgtggggaagagttagaagacggacaagggaggggacgggaggcctccgagacagcgccggaagtacggttttcggagggatcagactcagactcacgtcgcactcctcgcagttggactggtgggaactgggaacactggagacctgatttctaactgacgctaccgtcgcggccgccggcaagttcctttactgtgttttcttggttcagccttgaagtgagtcgtggacgatcctctctcagcgtccagcctagacggcggtgttgctccggcagcgttcctgggagccgagggccagagactaagtaacagtcctgggttctgagcctgccatccaaggaactcaggaggaggagttgacagtctcttcgttcctaaccagtgtgggacgacttcagcatgtctcaggccaccaagaggaagcatgtggtgaaggaggtgctaggggagcacatagtgccctccgaccagcagcagattgtcagggtactcaggaccccagggaacaatctgcatgaggtggagacagcccaagggcagcgcttcctggtgagcatgccctccaaataccgcaagaacatctggatcaagagaggggactttctcattgttgaccccattga

SEQ ID NO: 9018 - protein, 73 aa, Homo sapiens
MSQATKRKHVVKEVLGEHIVPSDQQQIVRVLRTPGNNLHEVETAQGQRFLVSMPSKYRKNIWIKRGDFLIVDP

SEQ ID NO: 9019 - DNA, 1154 bp, Homo sapiens
ccagtgttcccagttcccaccagtccaactgcgaggagtgcgacgtgagtctgagtctgatccctccgaaaaccgtacttccggcgctgtctcggaggcctcccgtcccctcccttgtccgtcttctaactcttccccacgccaggtccgtcaagcctaagtccttgagttccgggtccgggcagcagagaaaggaagtcctctccctggaggcctatctccctcagaactgcgcgagaagcgagaccttagaaggcagggcttcccgcgaaggaccggaaaggagcgcctactaaggacgccgtcgaggtccggggcgcctcaactctatagctctaactggctagaagtgcccaacgtggaatgtttcttttttaaaggcggctcttgaagcgacccggaagcggaagtggaagaaagttctagtggcttgaggtatccgcaggagcggccgggtggcgggaggaaccgttacgggaactgaagttgcggattaagcctgatcaagatgacaacctcccaaaagcaccgagacttcgtggcagagcccatgggggagaagccagtggggagcctggctgggattggtgaagtcctgggcaagaagctggaggaaaggggttttgacaaggcctatgttgtccttggccagtttctggtgctaaagaaagatgaagacctcttccgggaatggctgaaagacacttgtggcgccaacgccaagcagtcccgggactgcttcggatgccttcgagagtggtgcgacgccttcttgtgatgctctctgggaagctctcaatccccagccctcatccagagtttgcagccgagtagggactcctcccctgtcctctacgaaggaaaagattgctattgtcgtactcacctccgacgtactccggggtcttttgggagttttctcccctaaccatttcaacttttttttggattctcgctcttgcatgcctcccccgtcctttttcccttgccagttccctggtgacagttaccagctttcctgaatggattcccggccccatccctcacccccaccctcactttcaatccgtttgataccatttggctccttttttggcagaacagtcactgtccttgtaaagttttttagatcaataaagtcagtggctttcatg

SEQ ID NO: 9020 - protein, 89 aa, Homo sapiens; identical to SEQ ID NO: 1376

SEQ ID NO: 9021 - DNA, 988 bp, Homo sapiens
gcagagaaaggaagtcctctccctggaggcctatctccctcagaactgcgcgagaagcgagaccttagaaggcagggcttcccgcgaaggaccggaaaggagcgcctactaaggacgccgtcgaggtccggggcgcctcaactctatagctctaactggctagaagtgcccaacgtggaatgtttcttttttaaaggcggctcttgaagcgacccggaagcggaagtggaagaaagttctagtggcttgaggtatccgcaggagcggccgggtggcgggaggaaccgttacgggaactgaagttgcggattaagcctgatcaagatgacaacctcccaaaagcaccgagacttcgtggcagagcccatgggggagaagccagtggggagcctggctgggattggtgaagtcctgggcaagaagctggaggaaaggggttttgacaaggcctatgttgtccttggccagtttctggtgctaaagaaagatgaagacctcttccgggaatggctgaaagacacttgtggcgccaacgccaagcagtcccgggactgcttcggatgccttcgagagtggtgcgacgccttcttgtgatgctctctgggaagctctcaatccccagccctcatccagagtttgcagccgagtagggactcctcccctgtcctctacgaaggaaaagattgctattgtcgtactcacctccgacgtactccggggtcttttgggagttttctcccctaaccatttcaacttttttttggattctcgctcttgcatgcctcccccgtcctttttcccttgccagttccctggtgacagttaccagctttcctgaatggattcccggccccatccctcacccccaccctcactttcaatccgtttgataccatttggctccttttttggcagaacagtcactgtccttgtaaagttttttagatcaataaagtcagtggctttcatgactgggctttgtgcactg

SEQ ID NO: 9022 - protein, 89 aa, Homo sapiens; identical to SEQ ID NO: 1376

SEQ ID NO: 9023 - DNA, 913 bp, Homo sapiens
cagagaaaggaagtcctctccctggaggcctatctccctcagaactgcgcgagaagcgagaccttagaaggcagggcttcccgcgaaggaccggaaaggagcgcctactaaggacgccgtcgaggtccggggcgcctcaactctatagctctaactggctagaagtgcccaacgtggaatgtttcttttttaaaggcggctcttgaagcgacccggaagcggaagtggaagaaagttctagtggcttgagattaagcctgatcaagatgacaacctcccaaaagcaccgagacttcgtggcagagcccatgggggagaagccagtggggagcctggctgggattggtgaagtcctgggcaagaagctggaggaaaggggttttgacaaggcctatgttgtccttggccagtttctggtgctaaagaaagatgaagacctcttccgggaatggctgaaagacacttgtggcgccaacgccaagcagtcccgggactgcttcggatgccttcgagagtggtgcgacgccttcttgtgatgctctctgggaagctctcaatccccagccctcatccagagtttgcagccgagtagggactcctcccctgtcctctacgaaggaaaagattgctattgtcgtactcacctccgacgtactccggggtcttttgggagttttctcccctaaccatttcaacttttttttggattctcgctcttgcatgcctcccccgtcctttttcccttgccagttccctggtgacagttaccagctttcctgaatggattcccggccccatccctcacccccaccctcactttcaatccgtttgataccatttggctccttttttggcagaacagtcactgtccttgtaaagttttttagatcaataaagtcagtggctttcatga

SEQ ID NO: 9024 - protein, 89 aa, Homo sapiens; identical to SEQ ID NO: 1376

SEQ ID NO: 9025 - DNA, 767 bp, Homo sapiens
aggaagtcctctccctggaggcctatctccctcagaactgcgcgagaagcgagaccttagaaggcagggcttcccgcgaaggaccggaaaggagcgcctactaaggacgccgtcgaggtccggggcgcctcaactctatagctctaactggctagaagtgcccaacgtggaatgtttcttttttaaaggcggctcttgaagcgacccggaagcggaagtggaagaaagttctagtggcttgaggcctatgttgtccttggccagtttctggtgctaaagaaagatgaagacctcttccgggaatggctgaaagacacttgtggcgccaacgccaagcagtcccgggactgcttcggatgccttcgagagtggtgcgacgccttcttgtgatgctctctgggaagctctcaatccccagccctcatccagagtttgcagccgagtagggactcctcccctgtcctctacgaaggaaaagattgctattgtcgtactcacctccgacgtactccggggtcttttgggagttttctcccctaaccatttcaacttttttttggattctcgctcttgcatgcctcccccgtcctttttcccttgccagttccctggtgacagttaccagctttcctgaatggattcccggccccatccctcacccccaccctcactttcaatccgtttgataccatttggctccttttttggcagaacagtcactgtccttgtaaagttttttagatcaataaagtcagtggctttcatga

SEQ ID NO: 9026 - protein, 47 aa, Homo sapiens
MAERHLWRQRQAVPGLLRMPSRVVRRLLVMLSGKLSIPSPHPEFAAE

SEQ ID NO: 9027 - DNA, 615 bp, Homo sapiens
aagcggaagtggaagaaagttctagtggcttgaggtatccgcaggagcggccgggtggcgggaggaaccgttacgggaactgaagttgcgggcctatgttgtccttggccagtttctggtgctaaagaaagatgaagacctcttccgggaatggctgaaagacacttgtggcgccaacgccaagcagtcccgggactgcttcggatgccttcgagagtggtgcgacgccttcttgtgatgctctctgggaagctctcaatccccagccctcatccagagtttgcagccgagtagggactcctcccctgtcctctacgaaggaaaagattgctattgtcgtactcacctccgacgtactccggggtcttttgggagttttctcccctaaccatttcaacttttttttggattctcgctcttgcatgcctcccccgtcctttttcccttgccagttccctggtgacagttaccagctttcctgaatggattcccggccccatccctcacccccaccctcactttcaatccgtttgataccatttggctccttttttggcagaacagtcactgtccttgtaaagttttttagatcaataaagtcagtggctttcatga

SEQ ID NO: 9028 - protein, 47 aa, Homo sapiens; identical to SEQ ID NO: 9026

SEQ ID NO: 9029 - DNA, 1385 bp, Homo sapiens
ggtatccgcaggagcggccgggtggcgggaggaaccgttacgggaactgaagttgcgggtgagcgccagccgcggagcagggccctgattggaggccagaggggttgcggggagaaggggaggagaggggtcgcaggcgctgtggcgggccctgggggagagcttggccgcgctgcggggagggggcggggtgcagcgcgtgggagccgggccgcgggaaggggcgggccgcagcggcgcgcggtgggggcggagctggggcgcggcgtgaaccccgcgggcggggagcgggtgtgcgcagcgctaggtgtgcgcttcgccctgtaggtagagagaccctttggttagctttccacgccaagtggccgttccaggcaggcagtgtcgtcttggttcagccaaggtcacagagggagtgatagcttccgcgcagccctggctacggactctgggcatctttccactgccccgcttgcgccacctgttaggcaggatcgtttttcctctggggcaagatcaaaatccaggtcctgcaggaagaaactcctcttaaaaatagtagggaagagtctccctggaactgttttctcctttcaggatgagggggatcgagcaagccactgtaacccctggcttggcttcctcttactatgagattgctcgtgggcccttagaagttccaggtcttcagccctaatctgccttttttttgggattcctagattaagcctgatcaagatgacaacctcccaaaagcaccgagacttcgtggcagagcccatgggggagaagccagtggggagcctggctgggattggtgaagtcctgggcaagaagctggaggaaaggggttttgacaaggcctatgttgtccttggccagtttctggtgctaaagaaagatgaagacctcttccgggaatggctgaaagacacttgtggcgccaacgccaagcagtcccgggactgcttcggatgccttcgagagtggtgcgacgccttcttgtgatgctctctgggaagctctcaatccccagccctcatccagagtttgcagccgagtagggactcctcccctgtcctctacgaaggaaaagattgctattgtcgtactcacctccgacgtactccggggtcttttgggagttttctcccctaaccatttcaacttttttttggattctcgctcttgcatgcctcccccgtcctttttcccttgccagttccctggtgacagttaccagctttcctgaatggattcccggccccatccctcacccccaccctcactttcaatccgtttgataccatttggctccttttttggcagaacagtcactgtccttgtaaagttttttagatcaataaagtcagtggctttcatga

SEQ ID NO: 9030 - protein, 89 aa, Homo sapiens; identical to SEQ ID NO: 1376

SEQ ID NO: 9031 - DNA, 703 bp, Homo sapiens
gcgggtgagcgccagccgcggagcagggccctgattggagattaagcctgatcaagatgacaacctcccaaaagcaccgagacttcgtggcagagcccatgggggagaagccagtggggagcctggctgggattggtgaagtcctgggcaagaagctggaggaaaggggttttgacaaggcctatgttgtccttggccagtttctggtgctaaagaaagatgaagacctcttccgggaatggctgaaagacacttgtggcgccaacgccaagcagtcccgggactgcttcggatgccttcgagagtggtgcgacgccttcttgtgatgctctctgggaagctctcaatccccagccctcatccagagtttgcagccgagtagggactcctcccctgtcctctacgaaggaaaagattgctattgtcgtactcacctccgacgtactccggggtcttttgggagttttctcccctaaccatttcaacttttttttggattctcgctcttgcatgcctcccccgtcctttttcccttgccagttccctggtgacagttaccagctttcctgaatggattcccggccccatccctcacccccaccctcactttcaatccgtttgataccatttggctccttttttggcagaacagtcactgtccttgtaaagttttttagatcaataaagtcagtggctttcatga

SEQ ID NO: 9032 - protein, 89 aa, Homo sapiens; identical to SEQ ID NO: 1376

SEQ ID NO: 9033 - DNA, 1153 bp, Homo sapiens
gccgcggagcagggccctgattggaggccagaggggttgcggggagaaggggaggagaggggtcgcaggcgctgtggcgggccctgggggagagcttggccgcgctgcggggagggggcggggtgcagcgcgtgggagccgggccgcgggaaggggcgggccgcagcggcgcgcggtgggggcggagctggggcgcggcgtgaaccccgcgggcggggagcgggtgtgcgcagcgctaggtgtgcgcttcgccctgtaggtagagagaccctttggttagctttccacgccaagtggccgttccaggcaggcagtgtcgtcttggttcagccaaggtcacagagggagtgatagcttccgcgcagccctggctacggactctgggcatctttccactgccccgcttgcgccacctgttaggcaggatcgtttttcctctggggcaagatcaaaatccaggtcctgcaggaagaaactcctcttaaaaataattaagcctgatcaagatgacaacctcccaaaagcaccgagacttcgtggcagagcccatgggggagaagccagtggggagcctggctgggattggtgaagtcctgggcaagaagctggaggaaaggggttttgacaaggcctatgttgtccttggccagtttctggtgctaaagaaagatgaagacctcttccgggaatggctgaaagacacttgtggcgccaacgccaagcagtcccgggactgcttcggatgccttcgagagtggtgcgacgccttcttgtgatgctctctgggaagctctcaatccccagccctcatccagagtttgcagccgagtagggactcctcccctgtcctctacgaaggaaaagattgctattgtcgtactcacctccgacgtactccggggtcttttgggagttttctcccctaaccatttcaacttttttttggattctcgctcttgcatgcctcccccgtcctttttcccttgccagttccctggtgacagttaccagctttcctgaatggattcccggccccatccctcacccccaccctcactttcaatccgtttgataccatttggctccttttttggcagaacagtcactgtccttgtaaagttttttagatcaataaagtcagtggctttcatga

SEQ ID NO: 9034 - protein, 89 aa, Homo sapiens; identical to SEQ ID NO: 1376

SEQ ID NO: 9035 - DNA, 618 bp, Homo sapiens
ttaagcctgatcaagatgacaacctcccaaaagcaccgagacttcgtggcagagcccatgggggagaagccagtggggagcctggctgggattggcctatgttgtccttggccagtttctggtgctaaagaaagatgaagacctcttccgggaatggctgaaagacacttgtggcgccaacgccaagcagtcccgggactgcttcggatgccttcgagagtggtgcgacgccttcttgtgatgctctctgggaagctctcaatccccagccctcatccagagtttgcagccgagtagggactcctcccctgtcctctacgaaggaaaagattgctattgtcgtactcacctccgacgtactccggggtcttttgggagttttctcccctaaccatttcaacttttttttggattctcgctcttgcatgcctcccccgtcctttttcccttgccagttccctggtgacagttaccagctttcctgaatggattcccggccccatccctcacccccaccctcactttcaatccgtttgataccatttggctccttttttggcagaacagtcactgtccttgtaaagttttttagatcaataaagtcagtggctttcatga

SEQ ID NO: 9036 - protein, 40 aa, Homo sapiens
MTTSQKHRDFVAEPMGEKPVGSLAGIGLCCPWPVSGAKER

SEQ ID NO: 9037 - DNA, 1092 bp, Homo sapiens
ggttgtcaggcagcgctgagcagtaatgtgtcctactcacctgctgtttatccagcaccagacctcttctaagaactttacctgtttcagctcactgaatcctcacaacacccattgtacagaagaggaaactgaggcagcgagtggttaagtgacttctccgaggttacacagctaggaaatggtggcaacagtaagagcccacgaagagctgcggttggtagttcattctggacagccctcccgtgaaccgtccctgtactggcacttgttgctggggactgtcgctgtcctctccctccccgggccaggtgtgtcctggagggcagggaagcgtcttggcacgcgggtgcgcgccgccccctcggcctcctgggctccctgaacctcgcaggaccccggcaacttcgagccccgccccagctccaggccgcgggggcgcatcgcgggcgtcgggcggggcggcccagcgggtaaaagctgcgcggccgcaagctcggcactcacggctctgagggctccgacggcactgacggccatggcgcgttcgaacctcccgctggcgctgggcctggccctggtcgcattctgcctcctggcgctgccacgcgacgcccgggcccggccgcaggagcgcatggtcggagaactccgggacctgtcgcccgacgacccgcaggtgcagaaggcggcgcaggcggccgtggccagctacaacatgggcagcaacagcatctactacttccgagacacgcacatcatcaaggcgcagagccagctggtggccggcatcaagtacttcctgacgatggagatggggagcacagactgccgcaagaccagggtcactggagaccacgtcgacctcaccacttgccccctggcagcaggggcgcagcaggagaagctgcgctgtgactttgaggtccttgtggttccctggcagaactcctctcagctcctaaagcacaactgtgtgcagatgtgataagtccccgagggcgaaggccattgggtttggggccatggtggagggcacttcaggtccgtgggccgtatctgtcacaataaatggccagtgctgcttcttgc

SEQ ID NO: 9038 - protein, 149 aa, Homo sapiens; identical to SEQ ID NO: 1378

SEQ ID NO: 9039 - DNA, 1135 bp, Homo sapiens
ggttgtcaggcagcgctgagcagtaatgtgtcctactcacctgctgtttatccagcaccagacctcttctaagaactttacctgtttcagctcactgaatcctcacaacacccattgtacagaagaggaaactgaggcagcgagtggttaagtgacttctccgaggttacacagctaggaaatggtggcaacagtaagagcccacgaagagctgcggttggtagttcattctggacagccctcccgtgaaccgtccctgtactggcacttgttgctggggactgtcgctgtcctctccctccccgggccaggtgtgtcctggagggcagggaagcgtcttggcacgcgggtgcgcgccgccccctcggcctcctgggctccctgaacctcgcaggaccccggcaacttcgagccccgccccagctccaggccgcgggggcgcatcgcgggcgtcgggcggggcggcccagcgggtaaaagctgcgcggccgcaagctcggcactcacggctctgagggctccgacggcactgacggccatggcgcgttcgaacctcccgctggcgctgggcctggccctggtcgcattctgcctcctggcgctgccacgcgacgcccgggcccggccgcaggagcgcatggtcggagaactccgggacctgtcgcccgacgacccgcaggtgcagaaggcggcgcaggcggccgtggccagctacaacatgggcagcaacagcatctactacttccgagacacgcacatcatcaaggcgcagagccagctggtggccggcatcaagtacttcctgacgatggagatggggagcacagactgccgcaagaccagggtcactggagaccacgtcgacctcaccacttgccccctggcagcaggggcgcagcaggagaagctgcgctgtgactttgaggtccttgtggttccctggcagaactcctctcagctcctaaagcacaactgtgtgcagatgtgataagtccccgagggcgaaggccattgggtttggggccatggtggagggcacttcaggtccgtgggccgtatctgtcacaataaatggccagtgctgcttcttgcattggtttcttccaagtgcttcgcttctgcccccatcccccac

SEQ ID NO: 9040 - protein, 149 aa, Homo sapiens; identical to SEQ ID NO: 1378

SEQ ID NO: 9041 - DNA, 720 bp, Homo sapiens
gactcagtccccactccttctgcccacagcttcctgaccagcgtccaggaagtgacagggaccctgggccagtccttgccgtccatcgcagccatcctcatcctcatgtttacctgcctcttcctcttctccgcggtcctccgggcactgttccgcaaatctgaccccaagcgcttccagaacatcttcaccaccatcttcaccctcttcaccttgctcacgctggatgactggtccctcatctacatggacagccgtgcccaggagggccgcccggatccaagagaagctgctggaagactcactgacggagctcagagctgcagagcccaaagaggtggcgagtgaaggcaccatgctgaagcggctcatcgagaaaaagtttgggaccatgactgagaagtgaggagacaggaagggagcgaggcctggggtctgagggcagcaggagctcctgttccattacctgcagctggtggcaagcgtggagcaggagcagcagaagttccgctcccaggcagccgtcatcgatgagattgtggacaccacatttgaggctggagaagaggacttcaggaattgaccccaggaggacaccagatacagacttcagcccctggcagtctgcccacctgggtgcactgggacgggtccccagatctgctggaatgattgtccgggccctgcagagcaggggccccaacagagtttttaaacccc

SEQ ID NO: 9042 - protein, 80 aa, Homo sapiens
MFTCLFLFSAVLRALFRKSDPKRFQNIFTTIFTLFTLLTLDDWSLIYMDSRAQEGRPDPREAAGRLTDGAQSCRAQRGGE

SEQ ID NO: 9043 - DNA, 2618 bp, Homo sapiens
acgagaatagtcaggcctttctggaagcccagtgccacagtctgcattgagcttggctcaggaaagaagggaaatccaggcggggcctgttgggcccaggtcttgagctcttttggctccagagttcccagcacagtcatggatcaaaactcagtgcctgaaaaggctcagaatgaggcagacaccaataacgcagataggttctttcgctctcactcatcacccccacaccacaggccaggccacagcagagctctccaccattacgagttgcaccatcacggcgtgccccaccaacgtggtgaatctcaccaccctccggagttccaagacttccacgaccaagccttgtcctcccatgtccaccaatctcaccaccacagcgaggcacggaatcacggcagagcccatggccccacaggctttggtctggctccctctcaaggcgccgtcccctcccaccgttcctacggtgaggactaccatgatgagctccaacgtgatggcaggaggcatcatgatgggtcccaatacggtgggttccatcagcagagtgactcccattaccatagggggtctcaccatggcagaccccaatatctcggtgagaatttatcccactattcctctggcgtgccccaccacggtgaggcttcccaccatggtgggtcctacctcccccatggacccaatccctacagtgagtccttccaccacagcgaggcttcccaccttagcgggctccaacacgatgagtcccagcatcaccaagtcccccaccgtggctggccccaccatcaccaagtccaccaccatggcaggtcccgtcatcatgaagcccaccagcatggaaagtctcctcatcacggagagaccatttcccctcattcctctgtggggtcctaccagcgtgggatatctgactatcacagcgagtaccaccaaggtgatcaccaccccagtgagtaccaccatggcgaccatccccaccacacacagcaccactaccaccagacccaccggcaccgagactaccatcagcaccaagaccaccacggcgcgtatcattccagttacctccatggcgactacgtccagagcacttcccaactctctatcccacacacatcccggagcctgattcacgatgcccccggccctgctgcttctcgtacaggagtcttcccctatcacgtagcacacccacggggctcggctcacagcatgactcggtcctccagcacaatccgctcacgtgtcacccagatgtccaaaaaagtccatacccaggatatctccaccaaacattcagaagactggggcaaagaagaagggcaatttcagaaacgcaaaaccggccggctccagcggacccgcaagaagggacactctaccaatctcttccagtggctgtgggaaaagctaaccttcctcattcagggcttccgggaaatgatccggaacctgacccaatccttggcctttgaaactttcatcttcttcgttgtctgcctcaacaccgtcatgctggtggcccagaccttcgctgaagtcgagatccggggcgagtggtacttcatggccttggactccatattcttctgcatctacgtggtggaagccctgctcaagatcatcgccctgggcctctcgtacttctttgacttctggaacaatttggacttcttcattatggccatggccgtgctggacttcttgctgatgcagacccactccttcgccatctaccaccaaagcctcttccggatcctcaaggtcttcaagagcctgcgggccctgagggcaatccgggtcctgcggaggctcagcttcctgaccagcgtccaggaagtgacagggaccctgggccagtccttgccgtccatcgcagccatcctcatcctcatgtttacctgcctcttcctcttctccgcggtcctccgggcactgttccgcaaatctgaccccaagcgcttccagaacatcttcaccaccatcttcaccctcttcaccttgctcacgctggatgactggtccctcatctacatggacagccgtgcccagggcgcctggtacatcattcccatcctcgtaatttacatcatcatccagtacttcatcttcctcaacctggtgattactgtcctggtggatagcttccagacggcgctgttcaaaggccttgagaaagcgaagcaggagagggccgcccggatccaagagaagctgctggaagactcactgacggagctcagagctgcagagcccaaagaggtggcgagtgaaggcaccatgctgaagcggctcatcgagaaaaagtttgggaccatgactgagaagcagcaggagctcctgttccattacctgcagctggtggcaagcgtggagcaggagcagcagaagttccgctcccaggcagccgtcatcgatgagattgtggacaccacatttgaggctggagaagaggacttcaggaattgaccccaggaggacaccagatacagacttcagcccctggcagtctgcccacctgggtgcactgggacgggtccccagatctgctggaatgattgtccgggccctgcagagcaggggccccaacagagtttttaaacccc

SEQ ID NO: 9044 - protein, 780 aa, Homo sapiens
MDQNSVPEKAQNEADTNNADRFFRSHSSPPHHRPGHSRALHHYELHHHGVPHQRGESHHPPEFQDFHDQALSSHVHQSHHHSEARNHGRAHGPTGFGLAPSQGAVPSHRSYGEDYHDELQRDGRRHHDGSQYGGFHQQSDSHYHRGSHHGRPQYLGENLSHYSSGVPHHGEASHHGGSYLPHGPNPYSESFHHSEASHLSGLQHDESQHHQVPHRGWPHHHQVHHHGRSRHHEAHQHGKSPHHGETISPHSSVGSYQRGISDYHSEYHQGDHHPSEYHHGDHPHHTQHHYHQTHRHRDYHQHQDHHGAYHSSYLHGDYVQSTSQLSIPHTSRSLIHDAPGPAASRTGVFPYHVAHPRGSAHSMTRSSSTIRSRVTQMSKKVHTQDISTKHSEDWGKEEGQFQKRKTGRLQRTRKKGHSTNLFQWLWEKLTFLIQGFREMIRNLTQSLAFETFIFFVVCLNTVMLVAQTFAEVEIRGEWYFMALDSIFFCIYVVEALLKIIALGLSYFFDFWNNLDFFIMAMAVLDFLLMQTHSFAIYHQSLFRILKVFKSLRALRAIRVLRRLSFLTSVQEVTGTLGQSLPSIAAILILMFTCLFLFSAVLRALFRKSDPKRFQNIFTTIFTLFTLLTLDDWSLIYMDSRAQGAWYIIPILVIYIIIQYFIFLNLVITVLVDSFQTALFKGLEKAKQERAARIQEKLLEDSLTELRAAEPKEVASEGTMLKRLIEKKFGTMTEKQQELLFHYLQLVASVEQEQQKFRSQAAVIDEIVDTTFEAGEEDFRN

SEQ ID NO: 9045 - DNA, 8778 bp, Homo sapiens; identical to SEQ ID NO: 1381

SEQ ID NO: 9046 - protein, 1254 aa, Homo sapiens; identical to SEQ ID NO: 1382

SEQ ID NO: 9047 - DNA, 2045 bp, Homo sapiens
atgatgatgaacgtccccggcggaggagcggccgcggtgatgatgacgggctacaataatggtcgctgtccccggaattctctctacagtgactgcattattgaggagaagacggtggtcctgcagaaaaaagacaatgagggctttggattcgtgcttcgaggggccaaagctgacacacccattgaagaattcacaccaacaccggctttcccagccctacagtacctggagtccgtggatgaaggtggggtggcgtggcaagccggactaaggaccggggacttcttgattgaggttaacaatgagaatgttgtcaaagtcggccacaggcaggtggtgaacatgatccggcagggagggaatcacctggtccttaaggtggtcacggtgaccaggaatctggaccccgacgacaccgccaggaagaaagctcccccgcctccaaagcgggcaccgaccacagccctcaccctgcgctccaagtccatgacctcggagctggaggagctcggtaacctcggtccggaagaagaaggataaacccgaggagatagtcccggcctccaagccctcccgcgctgctgagaacatggctgtggaaccgagggtggcgaccatcaagcagcggcccagcagccggtgcttcccggcgggctcagacatgaactctgtgtacgaacgccaaggaatcgccgtgatgacgcccactgttcctgggagcccaaaagccccgtttctgggcatccctcgaggtacgatgcgaaggcagaaatcaataggtaagaagtgtggcactcccccacagaagttgcccctgggctttcaaacacagccttaggcccctcaggaattctgagccctgggcctctcacagttgccttggcgtcccaccccagcaaggccctgccagcccacccaccagagggtgggaacctggccttgcccactagggagccattggaacatctgagtggcatgaaactcatcccccctgaaggacacaaaatctagggtggcttctgtcatcttgaagcccagttatctgtgataattccagcagggtaaagcgggagggtgggcggggtggtgcgagccaacccccctcccccaccctgccctgctcagggtgggaagggtaagtgggttccctgcattccccagccaccaccaggcctggagtatgagctcagcagatgtacttccaagggtggttgggtcaggtctcgaaatgaaataatgtactgtgtgttgcagaaaactgccttcctttcttcttaatgtcacaattattcctattgaccctgttgcaggcaaaggtacacttgaccttgagacaaggtcacacttgaccctttgagacagtccctttgtgagataattcagcattgcctttactgtgtcaattctggtagaagctaaggcccttgccctgtgagagttgtggaggcaaccctgggactctggtctgcccagcccaccccaggggcactgtcctgtgtgttctggaaatgcctctgggctgctgtgcaaaagcgcagcgtgcttgtgagtctcaggtggataactgtaggcagtcactaggcagtaagtggccgtggaggtggtgtctgctgtgcttaaagctccccctgcaccagcaaactcagggaaagctgcgtatttgtcttgcggttactggttaataacaactgatttcctcctgtcagacagcagaatctttctatcaggttagtgaaccttacggtttggaatctgtaatctgaatgtaacccagtttactttataaggtgtattcttaaattagtactccttgggaacagaattgccagacagccaactcagagtgactggtcaatggagaacactttgaacgagccatctttgcaatgccaaaatgtcctcccacaaggagtatgttaaatttggaatacccttatcgaatggaagttttcattggaataaattattgtagtttgtcctaggactttttttcatttcaagtaatttattttgctacctctttgaaaacctgcatgctccca

SEQ ID NO: 9048 - protein, 180 aa, Homo sapiens [sequence omitted]

SEQ ID NO: 9049 - DNA, 907 bp, Homo sapiens
cagccctacagtacctggagtccgtggatgaaggtggggtggcgtggcaagccggactaaggaccggggacttcttgattgaggctgtggatcaccggaagtcactcagcctctaaggtgaatacccacaagtacacccacatcctccagccccttggcactccctctcatggagccagctgggctgcagtgatcctggagggtgaccctgtctgaagctgcagcccacacacaccactggaggccgcagctgtggaggcagacccgggcctgcagcagagcaggatcaatgtcacccatatcttgtcaattgtgactgcaaacttcagaaggactcagagtggaaagtcttggcaaccatgttgcggttcagacagtgggagccatgcttctgcgaatgagcctggggactggggactgtggtcccagccctggatttgatgaggggagtatccctgtcctgcgagggtgcagtgtcacttttccactcccatttggggtcaactcttaacagcatccctgagaagtgaggtggtgtaaagtcagggaagtgtggtctttgtcttattaaaaataatgcgatgagatggacgatggcagaagcttcagggtagaccatggagctcatcatggtatttgatatggcttggctttgtccccacccaaatctcatcttgaattgtagctcccatgattcccatgtgttgtgggagggacccagtgggagataactgaatcatggggtcattctcccccatactgttctcatagtagtgaacaagtctcatgagatctgatgattttataaggggaaacccctttctcttggctcccattctctcttgcctgctgccatgtagaacatgccctttcccttctgccatgattgtgaggcctccccagccat

SEQ ID NO: 9050 - protein, 41 aa, Homo sapiens
MLLRMSLGTGDCGPSPGFDEGSIPVLRGCSVTFPLPFGVNS

SEQ ID NO: 9051 - DNA, 417 bp, Homo sapiens
ggcaggaatgacagaagcagcagcgagagcccttcagaggaccgcgaaacgcgaactcccaccccactcaaacccaggacattcagtgtaaatgactgtgagcctcaggctggaaagatcgtttcccttcccagctagaaagactcatccatcaggctgtgtcagacgcacctgagccctccagggtggtcaaagaatctgcatcacagaagatatccagttgggcaagaccccgcctccctgacaggtggcacaggagggtggttggagcaggagggtgggaagtgatacgtggatcttggaagaacagcctggctctaccactcgccgtgtgtctgtgggtatgtgagtccccactctgtgctgtggcctcctcatgcagagaaaggagctgataaaagtcaccgagttaaactt

SEQ ID NO: 9052 - protein, 97 aa, Homo sapiens
ASGWKDRFPSQLERLIHQAVSDAPEPSRVVKESASQKISSWARPRLPDRWHRRVVGAGGWEVIRGSWKNSLALPLAVCLWVCESPLCAVASSCRERS

SEQ ID NO: 9053 - DNA, 2252 bp, Homo sapiens
aatgacagaagcagcagcgagagcccttcagaggaccgcgaaacgcgaactcccaccccagcaaaccaccaaggggaagaggcgggcccccatccaggaggccttaggaacaggagagctgacttttctaaagcaaataaggcagtgttctccccagggcgccaggcttccccagctccaagtctgggcgtctgaaatctgctgtgtaattggatcacgcccggcccgtgctgagcgcccatctgcgcccgtcttggaaaacacaagtctcagagaaggaaagcagttgccacagtgttcagcttaaccaagtcatcttatttgatatgtgaaagttcttcgagatggaagaatctcagctcatcactgcgaaggcatgccaggattaggaagtcatcagatgcaagcctgcaagcctcagtgtactcctcaatgtctgcagggcccaccccagagagaggcccctgggtgaccagccggtgaggagcttcaagaggaaggattcaccatcaccacctggatcctgtgtgcagcttttgtcacagcggtggcgagcacagtttctgcctcctggggagatggggtgtgaagctcacagcacctgcgtgtggctgggcccaacattaacagcgctgcaagagctcacctccatttataggaagtgggaaggacccaaggactggccgatgacaccacaggaggcagaaggcacatcgggggttgggggtagcctatggccaacctaccctgtccctctaacaacctaccctgtccctataacacgttgctggcaggaaacacgggagatggctcagactggagacctggggacatatctaccaagtgccacgtgggtcctgggtcaaagtcaccaccgtgaaaagacatttctgagataatttgggacatgtgctaatggaggggtttcagattccacccagagaccactgctgggtgcgtggatgggacagtgacactggggcccgcaagaaagatcccatgctgtgagagacagactgaaggggaagagggagtgacgcgatgcctgggatttgctgaagaaaaaaaaaagaataaaaaggtccgtctgtatatggatggcaagaatttcttggtaacaaaagcacagccaataaaagaaaaaataaatactaaggtcgatgaaaatttaaaacttttgtgcatcaaagggcaccatcaacagagcaaaaaggcagctaaagaatgggaggaaatatttgcaaatcatgtatctggtaaggggttagtatccagaatgtgcagaaaactcttacaactcaacaacagaaacaaaaatctaatttaaaaatgggcaaactggccaggtgaggtggctcatgcctgtaatcccagcactttgggaggccgaggtgggcggatcacttgaggtcaggagttcgagaccagactggccaacatggcaaaaccccatctccactaaaatttcaaaaattagccaggtgtgatggcacgtccctgtaaccccagttactcgggaggctgaggcagaagaattgctggaacccaggaggcaaaggtcgcagtgaggtgagatcacgccactgcactctagcctgggtgacagagtgagactccgtctcataaataaataaataaaaatgggtaaaggacttgaatagacatttctccaaagaagagatacaaatggctgataaggacttttctgaaaagatgttcaacaccactaatcaattagagaaaggcaaatccaaactacaacgggacaccatctcacacctgttaggatggccacgatcctaaaacagaaagtaatgacgctggtgagtatgtggggaaactggagcccttgggcaccgctggcaggaaggtaaagtggtgcagcccctgtggaacatggcatggctgctcctcaaaaccttaaacacagaacgagcacgtgagccagcaatgccacttctgcatctatgcccgaaggcattgacagcggggtcttgaagagatatctgcacacccgcgttcacggtggcagcactattcatggtagctaagaggtggacgcaacctaagtgtccacctacagatgaacagacacacaaaaggtggtgtttccgtagagttgggatagttatcattcaggcttaaaccagaaggagattctgatgcatgctacaacacggaggaacctcgaaggtattacactgagtgaaatgtaccaagcacaaaaagataaatactgcaggattccactg

SEQ ID NO: 9054 - protein, 101 aa, Homo sapiens
MTEAAARALQRTAKRELPPQQTTKGKRRAPIQEALGTGELTFLKQIRQCSPQGARLPQLQVWASEICCVIGSRPARAERPSAPVLENTSLREGKQLPQCSA

SEQ ID NO: 9055 - DNA, 414 bp, Homo sapiens
gagaggagaaggccacgtgaagatggaggcagagacgagcgacgcagccatgagccaagggacgcctggagacacgggaagccggaagaggctgggaaggatcctcccctagagccaccatggggagcagggccctgccaggccctggatttcaaacctgtggcctccagcactgtgagtgaacgcatcgctgttgtctcaggccactcagtttctggtcatttgtgacagcggcctcaggacatgaatacagctatgcttcagagaggactgcacgaagctgaggcccgagccctgacctgggatcacagaatctgcatcacagaagatatccagttgggcaagaccccgcctccctgacaggtggcacaggagggtggttggagcaggagggtgggaagtgatacgtggatc

SEQ ID NO: 9056 - protein, 38 aa, Homo sapiens
MNTAMLQRGLHEAEARALTWDHRICITEDIQLGKTPPP

SEQ ID NO: 9057 - DNA, 325 bp, Homo sapiens
ccagccaattccctccctgggattcccctccactcacccggaaaacagtgagagaaggatctagaaatggccacattaattaaggtcaaacagcagaggccctaagggccatttctacttgggactttacagatatttcaatgtcatttttaaaaacatgtctccactcagggaatgggaatcttaagttcccactcctcgttaaccaaatccccagcctcatcatgggatacccagggttcggcatcatccttccagggtttcagggaggcggtcaccctcagcagctcctcttgcagacagcaggtgcacagcagggttgagc

SEQ ID NO: 9058 - protein, 60 aa, Homo sapiens
MSFLKTCLHSGNGNLKFPLLVNQIPSLIMGYPGFGIILPGFQGGGHPQQLLLQTAGAQQG

SEQ ID NO: 9059 - DNA, 2775 bp, Homo sapiens
agccgggtttgagagcagcccgtctacgtgcagttggttcccagctgacagacagaatatggggtgggctttgtcaccagcacgctgggtctggcatgcccagctatgctcggaagtgcaccgtgcccagacacccgccacctctccccgggtcccagctgctctagcaccgaggggccgggctgcacgcctgtccttcctcccatccaggaaggttatataatgagcggaccgctgccaaagtcagagggaaaatgaagtctttgttaaatgccttcaccaagaaggaagtgcccttccgagaggccccggcgtactccaaccgccggcggcggccccccaacacgctggccgccccccgggtcctgctgcgctccaacagtgacaacaacctcaatgccagcgctcccgactgggccgtctgctccacggccacctcgcaccgcagcctgtcaccccagctgctgcagcagatgcccagcaagcccgagggggccgcgaagaccattgggagctacgtgcccgggccccgcagccggtccccatcgctcaacaggctgggcggcgcaggcgaggacggcaagaggccgcagcctctctggcatgtcgggtcgccttttgctcttggtgccaacaaggactcactctcggccttcgagtacccggggcccaagcggaagctctacagtgccgtgcccgggaggctcttcgtcgctgtcaagccataccaaccccaagtggacggcgagatcccccttcaccgcggtgacagggtcaaagttctgagcatcggtgaagggggcttctgggaaggcagcgcccgcggccacatcggatggtttccggcggagtgcgtggaggaggtccagtgtaagcccagggacagccaggcagaaacccgcgctgaccgcagcaagaagcttttcaggcactacaccgtgggctcctatgacagcttcgacacttccaggttgcagacacatttgggggtccctgcaaccctcggagacagctggagtctggacctgtagggcctggttgtggaaacagccccgctgcctcctgcccggtggctctggaggccccttccgcacatccagggcgggtcggctgctccagttctgccttcccacccagtgctgggatgtgcaacgccccccaccgaatgctcagatgtgcagccccctcctctgctggcctggaccttggacctcacacgtgcacatgttctgacatcagtgcctcatccgatgtccaaccccggccagaggaaccaccgtcgcttcagccccactctgaccttggaagccccaccctgcatggaggcagaggtgggaactctgtcatccaccgttccccacagaccactcacagccgctttaagagaacagccagggcttctaggcaggagcacgacagtgttcacgctgatggccagggagcctcctcagccagcagcagccgactcgtgcttgtgcattgttcagatggaagcatgatcattggatggaagttcctggcacaggtgcaagttgaccctgagtcattccagaaggattcgggcctcaccggaaagaacgccaggaaaagccatagggcaacagctcttctgccatttcagtcctcatgggtgaaactggggtaaagcgtgagtggctggggccctgctgacacctgcacttgtgcgtcaccgccaagctgtgtccctagactgccctgggtgagtaggcagccaacgtctgcagccccgtgtggtcagctgctcctgccctcccgcctcatcacggcccttcagacatcagggccggctgcctaccttccaaccccactctgtctggaatgttcttttctcttctgtcccctccccagtcctccaacccattctcctatgtatacttcagtcctcctcctccaggaagtcttccaggtgcccgtatggttctcacagaaccacgtcctgcactgttgaaggcacacatttctgtgactgtggattgatgtttatcttcctcacttgcccggcctttgctctaacgatcaccacagactagggggctcaaaacaagagaagtcacttacctgtcacagccctggaggccagaggtccaaaaccaagatgacagcagggccacgctccctccgggggctccaggggagagtcttcctcctccacctctgctgttggcctgcagtccttggtgctcctcagctgggccacatcactccagcctccacatcactccagcctctgcctccaccttcccatggcctcctctgcactgcctctgggtgtcaacctccctctgcttttctcgcgtaagggcacagtcattggtttaggaccctccctaaatccaggaagatctcaactcaagacccttaactaattatacctgcaaagacccaaattccaagtgtcgtcactttcacagacgctgggggttaggaattggacacatttttttgggtgggttgagtcaccattcaactgaccacaccagacaactctataaggaccagactgggcctggtttgttccttcctaaatgcccagcacccagttcatcccctgactctcagtgggtattcaggatgtaacagctggattgatttattgatttacacggcggcttgacactggccccagttacttctgaactttgaaacccagtcccagctggtcacggaagaactaaagctgtcaccagacggggccaccaacccagctgggatcctgagagctatgagtaaagccatctggtctaccccaataac

SEQ ID NO: 9060 - protein, 258 aa, Homo sapiens
MKSLLNAFTKKEVPFREAPAYSNRRRRPPNTLAAPRVLLRSNSDNNLNASAPDWAVCSTATSHRSLSPQLLQQMPSKPEGAAKTIGSYVPGPRSRSPSLNRLGGAGEDGKRPQPLWHVGSPFALGANKDSLSAFEYPGPKRKLYSAVPGRLFVAVKPYQPQVDGEIPLHRGDRVKVLSIGEGGFWEGSARGHIGWFPAECVEEVQCKPRDSQAETRADRSKKLFRHYTVGSYDSFDTSRLQTHLGVPATLGDSWSLDL

SEQ ID NO: 9061 - DNA, 510 bp, Homo sapiens
cactctcggccttcgagtacccggggcccaagcggaagctctacagtgccgtgcccgggaggctcttcgtcgctgtcaagccataccaaccccaagtggacggcgagatcccccttcaccgcggtgacagggtcaaagttctgagcatcggtgaagggggcttctgggaaggcagcgcccgcggccacatcggatggtttccggcggagtgcgtggaggaggtccagtgtaagcccagggacagccaggcagaaacccgcgctgaccgcagcaagaagcttttcaggcactacaccgtgggctcctatgacagcttcgacacttccaggtggaatggctgtgaaggaagggggcaggcgagccaccaggtagccagatcttctaagcacagcaggtttgagttcgtctgatgtgtggaaagagccctgcatctttgacaatgtgactggcacaggcacgtggttggatttttctgcagaaaccacacctgtgtgtcaccagctgtgggga

SEQ ID NO: 9062 - protein, 135 aa, Homo sapiens
LSAFEYPGPKRKLYSAVPGRLFVAVKPYQPQVDGEIPLHRGDRVKVLSIGEGGFWEGSARGHIGWFPAECVEEVQCKPRDSQAETRADRSKKLFRHYTVGSYDSFDTSRWNGCEGRGQASHQVARSSKHSRFEFV

SEQ ID NO: 9063 - DNA, 2710 bp, Homo sapiens
gagcaggggaaaatacctaagggaaatgctgaggcaagaggctggaaaaggacaggctgaggctgagcctcagggaggcggggtgcagcttcctcttcacagagaggctggacttgaacaaacccagccttctatacaaccgtggagccagggcaagggagagacagaaggagcaagtgacccagggagacaaacacttggagatacttggggctgagtttgagcaagactccctaacctgtgtctggacaagtctgatgtcctgtgtggcccaagaagaactgaccccgtgtctggagctcccaccgttattgcatccctgctgtggctcacctgctgctgtctccaggagcccctgagaagatttgcttcctctcccctgctaagctccaggtcctgagattaaattaggggctggagctcactgcactccagcagtcatgggacccaggatagggccagcgggtgaggtaccccaggtaccagacaaggaaaccaaagccacaatgggcacagaaaacacacctggaggcaaagccagcccagaccctcaggacgtgcggccaagtgtgttccataacatcaagctgttcgttctgtgccacagcctgctgcagctggcgcagctcatgatctccggctacctaaagagctccatctccacagtggagaagcgcttcggcctctccagccagacgtcggggctgctggcctccttcaacgaggtggggaacacagccttgattgtgtttgtgagctattttggcagccgggtgcaccgaccccgaatgattggctatggggctatccttgtggccctggcgggcctgctcatgactctcccgcacttcatctcggagccataccgctacgacaacaccagccctgaggatatgccacaggacttcaaggcttccctgtgcctgcccacaacctcggccccagcctcggccccctccaatggcaactgctcaagctacacagaaacccagcatctgagtgtggtggggatcatgttcgtggcacagaccctgctgggcgtgggcggggtgcccattcagccctttggcatctcctacatcgatgactttgcccacaacagcaactcgcccctctacctcgggatcctgtttgcagtgaccatgatggggccaggcctggcctttgggctgggcagcctcatgctgcgcctttatgtggacattaaccagatgccagaaggtggtatcagcctgaccataaaggacccccgatgggtgggtgcctggtggctgggtttcctcatcgctgccggtgcagtggccctggctgccatcccctacttcttcttccccaaggaaatgcccaaggaaaaacgtgagcttcagtttcggcgaaaggtcttagcagtcacagactcacctgccaggaagggcaaggactctccctctaagcagagccctggggagtccacgaagaagcaggatggcctagtccagattgcaccaaacctgactgtgatccagttcattaaagtcttccccagggtgctgctgcagaccctacgccaccccatcttcctgctggtggtcctgtcccaggtatgcttgtcatccatggctgcgggcatggccatcttcctgcccaagttcctggagcgccagttttccatcacagcctcctacgccaacctgctcatcggctgcctctccttcccttcggtcatcgtgggcatcgtggtgggtggcgtcctggtcaagcggctccacctgggccctgtgggatgcggtgccctttgcctgctggggatgctgctgtgcctcttcttcagcctgccgctcttctttatcggctgctccagccaccagattgcgggcatcacacaccagaccagtgcccaccctgggctggagctgtctccaagctgcatggaggcctgctcctgcccattggacggctttaaccctgtctgcgaccccagcactcgtgtggaatacatcacaccctgccacgcaggctgctcaagctgggtggtccaggatgctctggacaacagccaggttttctacaccaactgcagctgcgtggtggagggcaaccccgtgctggcaggatcctgcgactcaacgtgcagccatctggtggtgcccttcctgctcctggtcagcctgggctcggccctggcctgtctcacccacacaccctccttcatgctcatcctaagaggagtgaagaaagaagacaagactttggctgtgggcatccagttcatgttcctgaggattttggcctggatgcccagccccgtgatccacggcagcgccatcgacaccacctgtgtgcactgggccctgagctgtgggcgtcgagctgtctgtcgctactacaataatgacctgctccgaaaccggttcatcggcctccagttcttcttcaaaacaggttctgtgatctgcttcgccttagttttggctgtcctgaggcagcaggacaaagaggcaaggaccaaagagagcagatccagccctgccgtagagcagcaattgctagtgtcggggccagggaagaagccagaggattcccgagtgtgagctgtcttggggccccacctggccaagagtagcagccacagcagtacctcctctgagtcctttgcccaagattgggtgtcaagagccctgtgttccattctggctcctccactaaattgctgtgtgacttcaggcaagac

SEQ ID NO: 9064 - protein, 709 aa, Homo sapiens
MGPRIGPAGEVPQVPDKETKATMGTENTPGGKASPDPQDVRPSVFHNIKLFVLCHSLLQLAQLMISGYLKSSISTVEKRFGLSSQTSGLLASFNEVGNTALIVFVSYFGSRVHRPRMIGYGAILVALAGLLMTLPHFISEPYRYDNTSPEDMPQDFKASLCLPTTSAPASAPSNGNCSSYTETQHLSVVGIMFVAQTLLGVGGVPIQPFGISYIDDFAHNSNSPLYLGILFAVTMMGPGLAFGLGSLMLRLYVDINQMPEGGISLTIKDPRWVGAWWLGFLIAAGAVALAAIPYFFFPKEMPKEKRELQFRRKVLAVTDSPARKGKDSPSKQSPGESTKKQDGLVQIAPNLTVIQFIKVFPRVLLQTLRHPIFLLVVLSQVCLSSMAAGMAIFLPKFLERQFSITASYANLLIGCLSFPSVIVGIVVGGVLVKRLHLGPVGCGALCLLGMLLCLFFSLPLFFIGCSSHQIAGITHQTSAHPGLELSPSCMEACSCPLDGFNPVCDPSTRVEYITPCHAGCSSWVVQDALDNSQVFYTNCSCVVEGNPVLAGSCDSTCSHLVVPFLLLVSLGSALACLTHTPSFMLILRGVKKEDKTLAVGIQFMFLRILAWMPSPVIHGSAIDTTCVHWALSCGRRAVCRYYNNDLLRNRFIGLQFFFKTGSVICFALVLAVLRQQDKEARTKESRSSPAVEQQLLVSGPGKKPEDSRV

SEQ ID NO: 9065 - DNA, 3505 bp, Homo sapiens
gagcaggggaaaatacctaagggaaatgctgaggcaagaggctggaaaaggacaggctgaggctgagcctcagggaggcggggtgcagcttcctcttcacagagaggctggacttgaacaaacccagccttctatacaaccgtggagccagggcaagggagagacagaaggagcaagtgacccagggagacaaacacttggagatacttggggctgagtttgagcaagactccctaacctgtgtctggacaagtctgatgtcctgtgtggcccaagaagaactgaccccgtgtctggagctcccaccgttattgcatccctgctgtggctcacctgctgctgtctccaggagcccctgagaagatttgcttcctctcccctgctaagctccaggtcctgagattaaattaggggctggagctcactgcactccagcagtcatgggacccaggataggtggggaacacagccttgattgtgtttgtgagctattttggcagccgggtgcaccgaccccgaatgattggctatggggctatccttgtggccctggcgggcctgctcatgactctcccgcacttcatctcggagccataccgctacgacaacaccagccctggtggtatcagcctgaccataaaggacccccgatgggtgggtgcctggtggctgggtttcctcatcgctgccggtgcagtggccctggctgccatcccctacttcttcttccccaaggaaatgcccaaggaaaaacgtgagcttcagtttcggcgaaaggtcttagcagtcacagactcacctgccaggaagggcaaggactctccctctaagcagagccctggggagtccacgaagaagcaggatggcctagtccagattgcaccaaacctgactgtgatccagttcattaaagtcttccccagggtgctgctgcagaccctacgccaccccatcttcctgctggtggtcctgtcccaggtatgcttgtcatccatggctgcgggcatggccatcttcctgcccaagttcctggagcgccagttttccatcacagcctcctacgccaacctgctcatcggctgcctctccttcccttcggtcatcgtgggcatcgtggtgggtggcgtcctggtcaagcggctccacctgggccctgtgggatgcggtgccctttgcctgctggggatgctgctgtgcctcttcttcagcctgccgctcttctttatcggctgctccagccaccagattgcgggcatcacacaccagaccagtgcccaccctgggctggagctgtctccaagctgcatggaggcctgctcctgcccattggacggctttaaccctgtctgcgaccccagcactcgtgtggaatacatcacaccctgccacgcaggctgctcaagctgggtggtccaggatgctctggacaacagccaggttttctacaccaactgcagctgcgtggtggagggcaaccccgtgctggcaggatcctgcgactcaacgtgcagccatctggtggtgcccttcctgctcctggtcagcctgggctcggccctggcctgtctcacccacacaccctccttcatgctcatcctaagaggagtgaagaaagaagacaagactttggctgtgggcatccagttcatgttcctgaggattttggcctggatgcccagccccgtgatccacggcagcgccatcgacaccacctgtgtgcactgggccctgagctgtgggcgtcgagctgtctgtcgctactacaataatgacctgctccgaaaccggttcatcggcctccagttcttcttcaaaacaggttctgtgatctgcttcgccttagttttggctgtcctgaggcagcaggacaaagaggcaaggaccaaagagagcagatccagccctgccgtagagcagcaattgctagtgtcggggccagggaagaagccagaggattcccgagtgtgagctgtcttggggccccacctggccaagagtagcagccacagcagtacctcctctgagtcctttgcccaagattgggtgtcaagagccctgtgttccattctggctcctccactaaattgctgtgtgacttcaggcaagacattgatcctctctcagcctttgcttgctagtctgaaccaaagagttgtttgggcatttgctgtgttggccatttctggagcaagagggtcttcttcctccttcccccagccagccagctgtcctggggccaggctttcctgggtggaaagaagtatacctttccctggggccctaggatagcaaagtgagccatagtgggccaggctgccctccatgctgggccccagcccaggtctgcactcgcctggatcaccttctttgagccttagccatctcctgtcaggtaggaatgaacttgccagccttcaggctcgttcagctatgaccatctgtgcggtcagggtacactcagctctcctccccaactccagcagcctttaagaagtgtccctttggcgccccctggaggcagagcactgagctggaccctgggtagactcccacagggaggacggagctggcctcaggagtgggacacccagacttggcagggccttcaagaggcctgtgtgggggccccaggaatccttagctgaagcggggagactcactctccatctcaggaaattctagcccttgccctcagggagccacggttgagggtgaggcccaacacctgccttagggccctgggtgggcaagtctgggccctggggtagggagggagactcaggcccacacttgggtattttctaatttcagacaaacacacactcagcgcgcactcactgattcctacacattgccaagatttcacacatgtgaccaggggccaccaaagtccctgtgacctttgtgactaggatcctaatttctctattttctcctgggtgcctgggtctgtgtcacctggggcagtgtggataatgtttagttctgtgacactgttttttgggggtggcacctggttctccgatgcctgggctggtgtcaggcccaggactgtagtgctgggagcagtaaagctcagctctgtgtaatgagtgatgctatggcttgctcgtgtcttatgatccaatccttttctacatcagcccttgttttgttttatggctagtcttatctggcctggttatttccttgcggggaggagagggtttgctaatctgctcccagcccaacctattaccaccccacctcgctgggacctactgctcgggaggcagcagacagggagccaccagcagtggcttcctggccctgtgctgggggtggggggaagctgggggcacatgtggcccttgccttctgagcagctcccagtgccagggctttgagactttcccacatgataaaagaaaagggaggtacagaagttccaattccctttttattttgctggttggtatctgtaaatgtttaataaatatctgagcatgtatctatcaacgccaag

SEQ ID NO: 9066 - protein, 482 aa, Homo sapiens
MIGYGAILVALAGLLMTLPHFISEPYRYDNTSPGGISLTIKDPRWVGAWWLGFLIAAGAVALAAIPYFFFPKEMPKEKRELQFRRKVLAVTDSPARKGKDSPSKQSPGESTKKQDGLVQIAPNLTVIQFIKVFPRVLLQTLRHPIFLLVVLSQVCLSSMAAGMAIFLPKFLERQFSITASYANLLIGCLSFPSVIVGIVVGGVLVKRLHLGPVGCGALCLLGMLLCLFFSLPLFFIGCSSHQIAGITHQTSAHPGLELSPSCMEACSCPLDGFNPVCDPSTRVEYITPCHAGCSSWVVQDALDNSQVFYTNCSCVVEGNPVLAGSCDSTCSHLVVPFLLLVSLGSALACLTHTPSFMLILRGVKKEDKTLAVGIQFMFLRILAWMPSPVIHGSAIDTTCVHWALSCGRRAVCRYYNNDLLRNRFIGLQFFFKTGSVICFALVLAVLRQQDKEARTKESRSSPAVEQQLLVSGPGKKPEDSRV

SEQ ID NO: 9067 - DNA, 4107 bp, Homo sapiens
gagcaggggaaaatacctaagggaaatgctgaggcaagaggctggaaaaggacaggctgaggctgagcctcagggaggcggggtgcagcttcctcttcacagagaggctggacttgaacaaacccagccttctatacaaccgtggagccagggcaagggagagacagaaggagcaagtgacccagggagacaaacacttggagatacttggggctgagtttgagcaagactccctaacctgtgtctggacaagtctgatgtcctgtgtggcccaagaagaactgaccccgtgtctggagctcccaccgttattgcatccctgctgtggctcacctgctgctgtctccaggagcccctgagaagatttgcttcctctcccctgctaagctccaggtcctgagattaaattaggggctggagctcactgcactccagcagtcatgggacccaggatagggccagcgggtgaggtaccccaggtaccagacaaggaaaccaaagccacaatgggcacagaaaacacacctggaggcaaagccagcccagaccctcaggacgtgcggccaagtgtgttccataacatcaagctgttcgttctgtgccacagcctgctgcagctggcgcagctcatgatctccggctacctaaagagctccatctccacagtggagaagcgcttcggcctctccagccagacgtcggggctgctggcctccttcaacgaggtggggaacacagccttgattgtgtttgtgagctattttggcagccgggtgcaccgaccccgaatgattggctatggggctatccttgtggccctggcgggcctgctcatgactctcccgcacttcatctcggagccataccgctacgacaacaccagccctgaggatatgccacaggacttcaaggcttccctgtgcctgcccacaacctcggccccagcctcggccccctccaatggcaactgctcaagctacacagaaacccagcatctgagtgtggtggggatcatgttcgtggcacagaccctgctgggcgtgggcggggtgcccattcagccctttggcatctcctacatcgatgactttgcccacaacagcaactcgcccctctacctcgggatcctgtttgcagtgaccatgatggggccaggcctggcctttgggctgggcagcctcatgctgcgcctttatgtggacattaaccagatgccagaaggtggtatcagcctgaccataaaggacccccgatgggtgggtgcctggtggctgggtttcctcatcgctgccggtgcagtggccctggctgccatcccctacttcttcttccccaaggaaatgcccaaggaaaaacgtgagcttcagtttcggcgaaaggtcttagcagtcacagactcacctgccaggaagggcaaggactctccctctaagcagagccctggggagtccacgaagaagcaggatggcctagtccagattgcaccaaacctgactgtgatccagttcattaaagtcttccccagggtgctgctgcagaccctacgccaccccatcttcctgctggtggtcctgtcccaggtatgcttgtcatccatggctgcgggcatggccatcttcctgcccaagttcctggagcgccagttttccatcacagcctcctacgccaacctgctcatcggctgcctctccttcccttcggtcatcgtgggcatcgtggtgggtggcgtcctggtcaagcggctccacctgggccctgtgggatgcggtgccctttgcctgctggggatgctgctgtgcctcttcttcagcctgccgctcttctttatcggctgctccagccaccagattgcgggcatcacacaccagaccagtgcccaccctgggctggagctgtctccaagctgcatggaggcctgctcctgcccattggacggctttaaccctgtctgcgaccccagcactcgtgtggaatacatcacaccctgccacgcaggctgctcaagctgggtggtccaggatgctctggacaacagccaggttttctacaccaactgcagctgcgtggtggagggcaaccccgtgctggcaggatcctgcgactcaacgtgcagccatctggtggtgcccttcctgctcctggtcagcctgggctcggccctggcctgtctcacccacacaccctccttcatgctcatcctaagaggagtgaagaaagaagacaagactttggctgtgggcatccagttcatgttcctgaggattttggcctggatgcccagccccgtgatccacggcagcgccatcgacaccacctgtgtgcactgggccctgagctgtgggcgtcgagctgtctgtcgctactacaataatgacctgctccgaaaccggttcatcggcctccagttcttcttcaaaacaggttctgtgatctgcttcgccttagttttggctgtcctgaggcagcaggacaaagaggcaaggaccaaagagagcagatccagccctgccgtagagcagcaattgctagtgtcggggccagggaagaagccagaggattcccgagtgtgagctgtcttggggccccacctggccaagagtagcagccacagcagtacctcctctgagtcctttgcccaagattgggtgtcaagagccctgtgttccattctggctcctccactaaattgctgtgtgacttcaggcaagacattgatcctctctcagcctttgcttgctagtctgaaccaaagagttgtttgggcatttgctgtgttggccatttctggagcaagagggtcttcttcctccttcccccagccagccagctgtcctggggccaggctttcctgggtggaaagaagtatacctttccctggggccctaggatagcaaagtgagccatagtgggccaggctgccctccatgctgggccccagcccaggtctgcactcgcctggatcaccttctttgagccttagccatctcctgtcaggtaggaatgaacttgccagccttcaggctcgttcagctatgaccatctgtgcggtcagggtacactcagctctcctccccaactccagcagcctttaagaagtgtccctttggcgccccctggaggcagagcactgagctggaccctgggtagactcccacagggaggacggagctggcctcaggagtgggacacccagacttggcagggccttcaagaggcctgtgtgggggccccaggaatccttagctgaagcggggagactcactctccatctcaggaaattctagcccttgccctcagggagccacggttgagggtgaggcccaacacctgccttagggccctgggtgggcaagtctgggccctggggtagggagggagactcaggcccacacttgggtattttctaatttcagacaaacacacactcagcgcgcactcactgattcctacacattgccaagatttcacacatgtgaccaggggccaccaaagtccctgtgacctttgtgactaggatcctaatttctctattttctcctgggtgcctgggtctgtgtcacctggggcagtgtggataatgtttagttctgtgacactgttttttgggggtggcacctggttctccgatgcctgggctggtgtcaggcccaggactgtagtgctgggagcagtaaagctcagctctgtgtaatgagtgatgctatggcttgctcgtgtcttatgatccaatccttttctacatcagcccttgttttgttttatggctagtcttatctggcctggttatttccttgcggggaggagagggtttgctaatctgctcccagcccaacctattaccaccccacctcgctgggacctactgctcgggaggcagcagacagggagccaccagcagtggcttcctggccctgtgctgggggtggggggaagctgggggcacatgtggcccttgccttctgagcagctcccagtgccagggctttgagactttcccacatgataaaagaaaagggaggtacagaagttccaattccctttttattttgctggttggtatctgtaaatgtttaataaatatctgagcatgtatctatcaacgccaag

SEQ ID NO: 9068 - protein, 709 aa, Homo sapiens; identical to SEQ ID NO: 9064

SEQ ID NO: 9069 - DNA, 4246 bp, Homo sapiens
gagcaggggaaaatacctaagggaaatgctgaggcaagaggctggaaaaggacaggctgaggctgagcctcagggaggcggggtgcagcttcctcttcacagagaggctggacttgaacaaacccagccttctatacaaccgtggagccagggcaagggagagacagaaggagcaagtgacccagggagacaaacacttggagatacttggggctgagtttgagcaagactccctaacctgtgtctggacaagtctgatgtcctgtgtggcccaagaagaactgaccccgtgtctggagctcccaccgttattgcatccctgctgtggctcacctgctgctgtctccaggagcccctgagaagatttgcttcctctcccctgctaagctccaggtcctgagattaaattaggggctggagctcactgcactccagcagtcatgggacccaggatagggccagcgggtgaggtaccccaggtaccagacaaggaaaccaaagccacaatgggcacagaaaacacacctggaggcaaagccagcccagaccctcaggacgtgcggccaagtgtgttccataacatcaagctgttcgttctgtgccacagcctgctgcagctggcgcagctcatgatctccggctacctaaagagctccatctccacagtggagaagcgcttcggcctctccagccagacgtcggggctgctggcctccttcaacgaggtggggaacacagccttgattgtgtttgtgagctattttggcagccgggtgcaccgaccccgaatgattggctatggggctatccttgtggccctggcgggcctgctcatgactctcccgcacttcatctcggagccataccgctacgacaacaccagccctgaggatatgccacaggacttcaaggcttccctgtgcctgcccacaacctcggccccagcctcggccccctccaatggcaactgctcaagctacacagaaacccagcatctgagtgtggtggggatcatgttcgtggcacagaccctgctgggcgtgggcggggtgcccattcagccctttggcatctcctacatcgatgactttgcccacaacagcaactcgcccctctacctcgggatcctgtttgcagtgaccatgatggggccaggcctggcctttgggctgggcagcctcatgctgcgcctttatgtggacattaaccagatgccagaaggtggtatcagcctgaccataaaggacccccgatgggtgggtgcctggtggctgggtttcctcatcgctgccggtgcagtggccctggctgccatcccctacttcttcttccccaaggaaatgcccaaggaaaaacgtgagcttcagtttcggcgaaaggtcttagcagtcacagactcacctgccaggaagggcaaggactctccctctaagcagagccctggggagtccacgaagaagcaggatggcctagtccagattgcaccaaacctgactgtgatccagttcattaaagtcttccccagggtgctgctgcagaccctacgccaccccatcttcctgctggtggtcctgtcccaggtatgcttgtcatccatggctgcgggcatggccatcttcctgcccaagttcctggagcgccagttttccatcacagcctcctacgccaacctgctcatcggctgcctctccttcccttcggtcatcgtgggcatcgtggtgggtggcgtcctggtcaagcggctccacctgggccctgtgggatgcggtgccctttgcctgctggggatgctgctgtgcctcttcttcagcctgccgctcttctttatcggctgctccagccaccagattgcgggcatcacacaccagaccagtgcccaccctgggctggagctgtctccaagctgcatggaggcctgctcctgcccattggacggctttaaccctgtctgcgaccccagcactcgtgtggaatacatcacaccctgccacgcaggctgctcaagctgggtggtccaggatgctctggacaacagccaggttttctacaccaactgcagctgcgtggtggagggcaaccccgtgctggcaggatcctgcgactcaacgtgcagccatctggtggtgcccttcctgctcctggtcagcctgggctcggccctggcctgtctcacccacacaccctccttcatgctcatcctaagaggagtgaagaaagaagacaagactttggctgtgggcatccagttcatgttcctgaggattttggcctggatgcccagccccgtgatccacggcagcgccatcgacaccacctgtgtgcactgggccctgagctgtgggcgtcgagctgtctgtcgctactacaataatgacctgctccgaaaccggttcatcggcctccagttcttcttcaaaacaggttctgtgatctgcttcgccttagttttggctgtcctgaggcagcaggacaaagaggcaaggaccaaagagagcagatccagccctgccgtagagcagcaattgctagtgtcggggccagggaagaagccagaggattcccgagtgtgagctgtcttggggccccacctggccaagagtagcagccacagcagtacctcctctgagtcctttgcccaagattgggtgtcaagagccctgtgttccattctggctcctccactaaattgctgtgtgacttcaggcaagacattgatcctctctcagcctttgcttgctagtctgaaccaaagagttgtttgggcatttgctgtgttggccatttctggagcaagagggtcttcttcctccttcccccagccagccagctgtcctggggccaggctttcctgggtggaaagaagtatacctttccctggggccctaggatagcaaagtgagccatagtgggccaggctgccctccatgctgggccccagcccaggtctgcactcgcctggatcaccttctttgagccttagccatctcctgtcaggtaggaatgaacttgccagccttcaggctcgttcagctatgaccatctgtgcggtcagggtacactcagctctcctccccaactccagcagcctttaagaagtgtccctttggcgccccctggaggcagagcactgagctggaccctgggtagactcccacagggaggacggagctggcctcaggagtgggacacccagacttggcagggccttcaagaggcctgtgtgggggccccaggaatccttagctgaagcggggagactcactctccatctcaggaaattctagcccttgccctcagggagccacggttgagggtgaggcccaacacctgccttagggccctgggtgggcaagtctgggccctggggtagggagggagactcaggcccacacttgggtattttctaatttcagacaaacacacactcagcgcgcactcactgattcctacacattgccaagatttcacacatgtgaccaggggccaccaaagtccctgtgacctttgtgactaggatcctaatttctctattttctcctgggtgcctgggtctgtgtcacctggggcagtgtggataatgtttagttctgtgacactgttttttgggggtggcacctggttctccgatgcctgggctggtgtcaggcccaggactgtagtgctgggagcagtaaagctcagctctgtgtaatgagtgatgctatggcttgctcgtgtcttatgatccaatccttttctacatcagcccttgttttgttttatggctagtcttatctggcctggttatttccttgcggggaggagagggtttgctaatctgctcccagcccaacctattaccaccccacctcgctgggacctactgctcgggaggcagcagacagggagccaccagcagtggcttcctggccctgtgctgggggtggggggaagctgggggcacatgtggcccttgccttctgagcagctcccagtgccagggctttgagactttcccacatgataaaagaaaagggaggtacagaagttccaattccctttttattttgctggttggtatctgtaaatgtttaataaatatctgagcatgtatctatcaacgccaagaatttcaaagtctccttcaacaatatgaggcttttaggatgtttatattccttcatccctcttgtttcccaggttttgcagggaaaaaaagtctggaattatagatacagcttattattaaatttgttcttgcataatg

SEQ ID NO: 9070 - protein, 709 aa, Homo sapiens; identical to SEQ ID NO: 9064

SEQ ID NO: 9071 - DNA, 4392 bp, Homo sapiens
gagcaggggaaaatacctaagggaaatgctgaggcaagaggctggaaaaggacaggctgaggctgagcctcagggaggcggggtgcagcttcctcttcacagagaggctggacttgaacaaacccagccttctatacaaccgtggagccagggcaagggagagacagaaggagcaagtgacccagggagacaaacacttggagatacttggggctgagtttgagcaagactccctaacctgtgtctggacaagtctgatgtcctgtgtggcccaagaagaactgaccccgtgtctggagctcccaccgttattgcatccctgctgtggctcacctgctgctgtctccaggagcccctgagaagatttgcttcctctcccctgctaagctccaggtcctgagattaaattaggggctggagctcactgcactccagcagtcatgggacccaggatagggccagcgggtgaggtaccccaggtaccagacaaggaaaccaaagccacaatgggcacagaaaacacacctggaggcaaagccagcccagaccctcaggacgtgcggccaagtgtgttccataacatcaagctgttcgttctgtgccacagcctgctgcagctggcgcagctcatgatctccggctacctaaagagctccatctccacagtggagaagcgcttcggcctctccagccagacgtcggggctgctggcctccttcaacgaggtggggaacacagccttgattgtgtttgtgagctattttggcagccgggtgcaccgaccccgaatgattggctatggggctatccttgtggccctggcgggcctgctcatgactctcccgcacttcatctcggagccataccgctacgacaacaccagccctgaggatatgccacaggacttcaaggcttccctgtgcctgcccacaacctcggccccagcctcggccccctccaatggcaactgctcaagctacacagaaacccagcatctgagtgtggtggggatcatgttcgtggcacagaccctgctgggcgtgggcggggtgcccattcagccctttggcatctcctacatcgatgactttgcccacaacagcaactcgcccctctacctcgggatcctgtttgcagtgaccatgatggggccaggcctggcctttgggctgggcagcctcatgctgcgcctttatgtggacattaaccagatgccagaaggtggtatcagcctgaccataaaggacccccgatgggtgggtgcctggtggctgggtttcctcatcgctgccggtgcagtggccctggctgccatcccctacttcttcttccccaaggaaatgcccaaggaaaaacgtgagcttcagtttcggcgaaaggtcttagcagtcacagactcacctgccaggaagggcaaggactctccctctaagcagagccctggggagtccacgaagaagcaggatggcctagtccagattgcaccaaacctgactgtgatccagttcattaaagtcttccccagggtgctgctgcagaccctacgccaccccatcttcctgctggtggtcctgtcccaggtatgcttgtcatccatggctgcgggcatggccatcttcctgcccaagttcctggagcgccagttttccatcacagcctcctacgccaacctgctcatcggctgcctctccttcccttcggtcatcgtgggcatcgtggtgggtggcgtcctggtcaagcggctccacctgggccctgtgggatgcggtgccctttgcctgctggggatgctgctgtgcctcttcttcagcctgccgctcttctttatcggctgctccagccaccagattgcgggcatcacacaccagaccagtgcccaccctgggctggagctgtctccaagctgcatggaggcctgctcctgcccattggacggctttaaccctgtctgcgaccccagcactcgtgtggaatacatcacaccctgccacgcaggctgctcaagctgggtggtccaggatgctctggacaacagccaggttttctacaccaactgcagctgcgtggtggagggcaaccccgtgctggcaggatcctgcgactcaacgtgcagccatctggtggtgcccttcctgctcctggtcagcctgggctcggccctggcctgtctcacccacacaccctccttcatgctcatcctaagaggagtgaagaaagaagacaagactttggctgtgggcatccagttcatgttcctgaggattttggcctggatgcccagccccgtgatccacggcagcgccatcgacaccacctgtgtgcactgggccctgagctgtgggcgtcgagctgtctgtcgctactacaataatgacctgctccgaaaccggttcatcggcctccagttcttcttcaaaacaggttctgtgatctgcttcgccttagttttggctgtcctgaggcagcaggacaaagaggcaaggaccaaagagagcagatccagccctgccgtagagcagcaattgctagtgtcggggccagggaagaagccagaggattcccgagtgtgagctgtcttggggccccacctggccaagagtagcagccacagcagtacctcctctgagtcctttgcccaagattgggtgtcaagagccctgtgttccattctggctcctccactaaattgctgtgtgacttcaggcaagacattgatcctctctcagcctttgcttgctagtctgaaccaaagagttgtttgggcatttgctgtgttggccatttctggagcaagagggtcttcttcctccttcccccagccagccagctgtcctggggccaggctttcctgggtggaaagaagtatacctttccctggggccctaggatagcaaagtgagccatagtgggccaggctgccctccatgctgggccccagcccaggtctgcactcgcctggatcaccttctttgagccttagccatctcctgtcaggtaggaatgaacttgccagccttcaggctcgttcagctatgaccatctgtgcggtcagggtacactcagctctcctccccaactccagcagcctttaagaagtgtccctttggcgccccctggaggcagagcactgagctggaccctgggtagactcccacagggaggacggagctggcctcaggagtgggacacccagacttggcagggccttcaagaggcctgtgtgggggccccaggaatccttagctgaagcggggagactcactctccatctcaggaaattctagcccttgccctcagggagccacggttgagggtgaggcccaacacctgccttagggccctgggtgggcaagtctgggccctggggtagggagggagactcaggcccacacttgggtattttctaatttcagacaaacacacactcagcgcgcactcactgattcctacacattgccaagatttcacacatgtgaccaggggccaccaaagtccctgtgacctttgtgactaggatcctaatttctctattttctcctgggtgcctgggtctgtgtcacctggggcagtgtggataatgtttagttctgtgacactgttttttgggggtggcacctggttctccgatgcctgggctggtgtcaggcccaggactgtagtgctgggagcagtaaagctcagctctgtgtaatgagtgatgctatggcttgctcgtgtcttatgatccaatccttttctacatcagcccttgttttgttttatggctagtcttatctggcctggttatttccttgcggggaggagagggtttgctaatctgctcccagcccaacctattaccaccccacctcgctgggacctactgctcgggaggcagcagacagggagccaccagcagtggcttcctggccctgtgctgggggtggggggaagctgggggcacatgtggcccttgccttctgagcagctcccagtgccagggctttgagactttcccacatgataaaagaaaagggaggtacagaagttccaattccctttttattttgctggttggtatctgtaaatgtttaataaatatctgagcatgtatctatcaacgccaagaatttcaaagtctccttcaacaatatgaggcttttaggatgtttatattccttcatccctcttgtttcccaggttttgcagggaaaaaaagtctggaattatagatacagcttattattaaatttgttcttgcataatgtctcttctattacaaaaattctttcttcataaactgcattagaggtttgcaacaaccacatcatttccattaacttagatttaggttttactggattcattgctcaccattattgcttgtatattacatcttttccaatctttata

SEQ ID NO: 9072 - protein, 709 aa, Homo sapiens; identical to SEQ ID NO: 9064

SEQ ID NO: 9073 - DNA, 2360 bp, Homo sapiens
ggataaagtactcccaggaaggctttgagccttggcagaaaaggctgggattgaagcttcagggagagccagaggtgaggctggagtgggagatcacctgaggcagggccagcgggtgaggtaccccaggtaccagacaaggaaaccaaagccacaatgggcacagaaaacacacctggaggcaaagccagcccagaccctcaggacgtgcggccaagtgtgttccataacatcaagctgttcgttctgtgccacagcctgctgcagctggcgcagctcatgatctccggctacctaaagagctccatctccacagtggagaagcgcttcggcctctccagccagacgtcggggctgctggcctccttcaacgaggtggggaacacagccttgattgtgtttgtgagctattttggcagccgggtgcaccgaccccgaatgattggctatggggctatccttgtggccctggcgggcctgctcatgactctcccgcacttcatctcggagccataccgctacgacaacaccagccctgaggatatgccacaggacttcaaggcttccctgtgcctgcccacaacctcggccccagcctcggccccctccaatggcaactgctcaagctacacagaaacccagcatctgagtgtggtggggatcatgttcgtggcacagaccctgctgggcgtgggcggggtgcccattcagccctttggcatctcctacatcgatgactttgcccacaacagcaactcgcccctctacctcgggatcctgtttgcagtgaccatgatggggccaggcctggcctttgggctgggcagcctcatgctgcgcctttatgtggacattaaccagatgccagaaggtggtatcagcctgaccataaaggacccccgatgggtgggtgcctggtggctgggtttcctcatcgctgccggtgcagtggccctggctgccatcccctacttcttcttccccaaggaaatgcccaaggaaaaacgtgagcttcagtttcggcgaaaggtcttagcagtcacagactcacctgccaggaagggcaaggactctccctctaagcagagccctggggagtccacgaagaagcaggatggcctagtccagattgcaccaaacctgactgtgatccagttcattaaagtcttccccagggtgctgctgcagaccctacgccaccccatcttcctgctggtggtcctgtcccaggtatgcttgtcatccatggctgcgggcatggccatcttcctgcccaagttcctggagcgccagttttccatcacagcctcctacgccaacctgctcatcggctgcctctccttcccttcggtcatcgtgggcatcgtggtgggtggcgtcctggtcaagcggctccacctgggccctgtgggatgcggtgccctttgcctgctggggatgctgctgtgcctcttcttcagcctgccgctcttctttatcggctgctccagccaccagattgcgggcatcacacaccagaccagtgcccaccctgggctggagctgtctccaagctgcatggaggcctgctcctgcccattggacggctttaaccctgtctgcgaccccagcactcgtgtggaatacatcacaccctgccacgcaggctgctcaagctgggtggtccaggatgctctggacaacagccaggttttctacaccaactgcagctgcgtggtggagggcaaccccgtgctggcaggatcctgcgactcaacgtgcagccatctggtggtgcccttcctgctcctggtcagcctgggctcggccctggcctgtctcacccacacaccctccttcatgctcatcctaagaggagtgaagaaagaagacaagactttggctgtgggcatccagttcatgttcctgaggattttggcctggatgcccagccccgtgatccacggcagcgccatcgacaccacctgtgtgcactgggccctgagctgtgggcgtcgagctgtctgtcgctactacaataatgacctgctccgaaaccggttcatcggcctccagttcttcttcaaaacaggttctgtgatctgcttcgccttagttttggctgtcctgaggcagcaggacaaagaggcaaggaccaaagagagcagatccagccctgccgtagagcagcaattgctagtgtcggggccagggaagaagccagaggattcccgagtgtgagctgtcttggggccccacctggccaagagtagcagccacagcagtacctcctctgagtcctttgcccaagattgggtgtcaagagccctgtgttccattctggctcctccactaaattgctgtgtgacttcaggcaagac

SEQ ID NO: 9074 - protein, 687 aa, Homo sapiens
MGTENTPGGKASPDPQDVRPSVFHNIKLFVLCHSLLQLAQLMISGYLKSSISTVEKRFGLSSQTSGLLASFNEVGNTALIVFVSYFGSRVHRPRMIGYGAILVALAGLLMTLPHFISEPYRYDNTSPEDMPQDFKASLCLPTTSAPASAPSNGNCSSYTETQHLSVVGIMFVAQTLLGVGGVPIQPFGISYIDDFAHNSNSPLYLGILFAVTMMGPGLAFGLGSLMLRLYVDINQMPEGGISLTIKDPRWVGAWWLGFLIAAGAVALAAIPYFFFPKEMPKEKRELQFRRKVLAVTDSPARKGKDSPSKQSPGESTKKQDGLVQIAPNLTVIQFIKVFPRVLLQTLRHPIFLLVVLSQVCLSSMAAGMAIFLPKFLERQFSITASYANLLIGCLSFPSVIVGIVVGGVLVKRLHLGPVGCGALCLLGMLLCLFFSLPLFFIGCSSHQIAGITHQTSAHPGLELSPSCMEACSCPLDGFNPVCDPSTRVEYITPCHAGCSSWVVQDALDNSQVFYTNCSCVVEGNPVLAGSCDSTCSHLVVPFLLLVSLGSALACLTHTPSFMLILRGVKKEDKTLAVGIQFMFLRILAWMPSPVIHGSAIDTTCVHWALSCGRRAVCRYYNNDLLRNRFIGLQFFFKTGSVICFALVLAVLRQQDKEARTKESRSSPAVEQQLLVSGPGKKPEDSRV

SEQ ID NO: 9075 - DNA, 5877 bp, Homo sapiens
tgtctgcagctgccagggctggaggtgagaggcccagagggctccagctgtccaggccagccagccacttcaagggttgatgggactaatccctgcacacctgtctcccatctgaggccctgtgtggctggggcacatgagtctagaagctctggtctatgggaaagcaaagagaagcccaggcctcttggcttgggctggcttctatcgggtgcctgtgagccctggcagtccagatcacttcgcagagtccttggctggaggttttcctcgctacctagggagtgagtgcaggctgggatcaaacactccagggggcaagcccggggacatggccagcctggggatgttttcttacagttggtgtgtagaatgtgggggaatgatgctctcctggctccctccctcttcttctctactttctctctgcttccctctccctgcccaccacctcagcccaggctcaacttgcacatagacagcccttgaggtgcctgctcctcaagccgtctttgctcagccaacgggtcacgatctcggactcccagccagctctaccccaactggctgtggaacttgggcctctcacaagccttccccgctgcaagcccttggccagctgcctgcccttggaggctcttgaagtctcttcctcctcttcccactccaggttttctacaccaactgcagctgcgtggtggagggcaaccccgtgctggcaggatcctgcgactcaacgtgcagccatctggtggtgcccttcctgctcctggtcagcctgggctcggccctggcctgtctcacccacacaccctccttcatgctcatcctaaggtgaaggtgggggtggggcaggggcaggtggataccaggaggtccttaaccacaggcagaacaaggaattccaaggacggagttcaagaaaggaggccacttgggtgtcctggcccccacaatatggccttaactgtgttcatcccatggcaacctactgaggcaaggttttctccccatcttgcagataagaaaattgaggctcagagaagttcaggagctggcccccatcacatagcaagtgttgggtggaatagtactggttccctggcccacagcccaggctcctacttgcccaggggagaggaggacatacctagggccctgtcctggcctctggaggtgagggcataatacctgcaatggatgagctgcaggaggtgcatctaggaaaccaaactgtgtcagtctggtgcatgactctgaatgctgcttcaaggctacatacaagtgcttattaggtgcccgctgtggacccaacccatgctgagcactgccttttgggccaagatctttgtggccctcgtcctaagaatgcctgctggccctgacaaattgtcacctgagttcaaagtcagggtctcctggggtgagggctgggataagaggactgagtgagaaaaaaatagtttttcctttttttttttttttttttttgagatgcagttttgctctgtctcccaggctggagtgcaatggcgcaatctcggctcactgcaacctcctcctcctgggttcacgccattctcctgcctcagcctccctagtagctgggattacaggcacccgccaccacacccaactaattgtatttttagcagagacggggtttcaccatgttggccaggacggtctcgaactcctgacctcagtgatccacctgccttggcctcccaaagtgctgggattacaggcatgagccaccacactcggctgagaaaaacagtttttctattctctcactcaacaatcaacacagaagacttctgcaaccagaagtgtgggggtattttcccacacaccaggcactcaattaattctgcagtggaccctagccagtgtcccccaattctattctgacacaatctacctggagacagcatcagatcccacaggctgagtgctcagtcccacaagactttccctccacttcccatgccaaccacaagcctcaggctgttttaccaatgattctgactgaccagccgtatgctggggtttccacagccccatctttgagtttgctttatttgctagagtggctcacagagctcaggaaaacatctacttaatgtttatcggtttattataaaagatattacaaaggatacagatgaagtgatgcatacggtgaggtatgggggaggagctttcatgccctccctggctgcatcctgcagggacctccatgtgttcagctatccggaagctcgccaaagcttcattatgtaggcatgattgattaaatcactggatattggcagtcacctcaaccttcagcccctctccccttgctggaggttggggctgaaagtcctaaccctctaatcctgccttggtccctctggtgaccaagccccagcctgaagctactaggggctgctcaccatcaatcaactcattagcatacaaaaagacacttttcactttgaacattccaagaattttaggagtgtatgccgggaagaccaaatacacatctcacaatatcacagggacctcagagcaagataatttccattttccttctcctgggattattttattcactatctactttctaggaaattagaagggaaatggagcctcttgcaaataccagaagacatgtagatctagaacacaagctggcctgggagagaaaatagaggaatcagatgcccaacaggcagcctgactaaaaggagttgagaacacagcctcagggctgcgtggatacaggccctgaccgctgtcagccatgagatcttggccaagttattgaatctgtctaagtgtcagtctccttatctgtaaaatggggctaatgtacacctcgctcataggagtgatgtggggttgcagggcagagttactgagcccgtagtaagcgctccataaatgccagccactggtgttgtctggcaggagctggcgttacagtggttggggatgctggggaagtgtctgactgtcccagctccaggtcttgccaactgtaggagtaaggggagaatttgatgggaccagtgggtggaggaagaggagtgatgtctgtgaccagaaacatacagaggtcagcacaggaccctgatggtcagtgggtgtgttgtcttgtatatgggaccaggctctgcaggttgaaaaaggatggggtacgtccctgagcccccagcctagatcatcagatgggagagaggctggctctgggtggtgggagagaagggcataataagaacccttcaacgttgatgcatggcccttgggggctggaacccctccaacctcatgttgcccatgtctctgcttgttagaggagtgaagaaagaagacaagactttggctgtgggcatccagttcatgttcctgaggattttgggtaaagatcttgcttgggaccattggtggtggtgatggggtccagatgcccactgtgtgccaggcctggggcacaggcatgagcggaattcaatccctgatcttagggctcacaagctcatggggtgacagacctggcccagctctcctagagcggggtatagaggcagagtctagacagcccgtcaggaagccacctcggatgcaggggtggggcgggcttgagggccagacagccaagaggccccagtaacccagagcccctgaggggttgtacatgccagggagggggcagggtaggacggtgggccttcattgtcccctgagcaccacctccctcagcctggatgcccagccccgtgatccacggcagcgccatcgacaccacctgtgtgcactgggccctgagctgtgggcgtcgagctgtctgtcgctactacaataatgacctgctccgaaaccggttcatcggcctccagttcttcttcaaaacaggttctgtgatctgcttcgccttagttttggctgtcctgaggcagcaggacaaagaggcaaggaccaaagagagcagatccagccctgccgtagagcagcaattgctagtgtcggggccagggaagaagccagaggattcccgagtgtgagctgtcttggggccccacctggccaagagtagcagccacagcagtacctcctctgagtcctttgcccaagattgggtgtcaagagccctgtgttccattctggctcctccactaaattgctgtgtgacttcaggcaagacattgatcctctctcagcctttgcttgctagtctgaaccaaagagttgtttgggcatttgctgtgttggccatttctggagcaagagggtcttcttcctccttcccccagccagccagctgtcctggggccaggctttcctgggtggaaagaagtatacctttccctggggccctaggatagcaaagtgagccatagtgggccaggctgccctccatgctgggccccagcccaggtctgcactcgcctggatcaccttctttgagccttagccatctcctgtcaggtaggaatgaacttgccagccttcaggctcgttcagctatgaccatctgtgcggtcagggtacactcagctctcctccccaactccagcagcctttaagaagtgtccctttggcgccccctggaggcagagcactgagctggaccctgggtagactcccacagggaggacggagctggcctcaggagtgggacacccagacttggcagggccttcaagaggcctgtgtgggggccccaggaatccttagctgaagcggggagactcactctccatctcaggaaattctagcccttgccctcagggagccacggttgagggtgaggcccaacacctgccttagggccctgggtgggcaagtctgggccctggggtagggagggagactcaggcccacacttgggtattttctaatttcagacaaacacacactcagcgcgcactcactgattcctacacattgccaagatttcacacatgtgaccaggggccaccaaagtccctgtgacctttgtgactaggatcctaatttctctattttctcctgggtgcctgggtctgtgtcacctggggcagtgtggataatgtttagttctgtgacactgttttttgggggtggcacctggttctccgatgcctgggctggtgtcaggcccaggactgtagtgctgggagcagtaaagctcagctctgtgtaatgagtgatgctatggcttgctcgtgtcttatgatccaatccttttctacatcagcccttgttttgttttatggctagtcttatctggcctggttatttccttgcggggaggagagggtttgctaatctgctcccagcccaacctattaccaccccacctcgctgggacctactgctcgggaggcagcagacagggagccaccagcagtggcttcctggccctgtgctgggggtggggggaagctgggggcacatgtggcccttgccttctgagcagctcccagtgccagggctttgagactttcccacatgataaaagaaaagggaggtacagaagttccaattccctttttattttgctggttggtatctgtaaatgtttaataaatatctgagcatgtatctatcaacgccaagaatttcaaagtctccttcaacaatatgaggcttttaggatgtttatattccttcatccctcttgtttcccaggttttgcagggaaaaaaagtctggaattatagatacagcttattattaaatttgttcttgcataatgtctcttctattacaaaaattctttcttcataaactgcattagaggtttgcaacaaccacatcatttccattaacttagatttaggttttactggattcattgctcaccattattgcttgtatattacatcttttccaatctttata

SEQ ID NO: 9076 - protein, 98 aa, Homo sapiens
MPSPVIHGSAIDTTCVHWALSCGRRAVCRYYNNDLLRNRFIGLQFFFKTGSVICFALVLAVLRQQDKEARTKESRSSPAVEQQLLVSGPGKKPEDSRV

SEQ ID NO: 9077 - DNA, 3386 bp, Homo sapiens
ttgctggaggttggggctgaaagtcctaaccctctaatcctgccttggtccctctggtgaccaagccccagcctgaagctactaggggctgctcaccatcaatcaactcattagcatacaaaaagacacttttcactttgaacattccaagaattttaggagtgtatgccgggaagaccaaatacacatctcacaatatcacagggacctcagagcaagataatttccattttccttctcctgggattattttattcactatctactttctaggaaattagaagggaaatggagcctcttgcaaataccagaagacatgtagatctagaacacaagctggcctgggagagaaaatagaggaatcagatgcccaacaggcagcctgactaaaaggagttgagaacacagcctcagggctgcgtggatacaggccctgaccgctgtcagccatgagatcttggccaagttattgaatctgtctaagtgtcagtctccttatctgtaaaatggggctaatgtacacctcgctcataggagtgatgtggggttgcagggcagagttactgagcccgtagtaagcgctccataaatgccagccactggtgttgtctggcaggagctggcgttacagtggttggggatgctggggaagtgtctgactgtcccagctccaggtcttgccaactgtaggagtaaggggagaatttgatgggaccagtgggtggaggaagaggagtgatgtctgtgaccagaaacatacagaggtcagcacaggaccctgatggtcagtgggtgtgttgtcttgtatatgggaccaggctctgcaggttgaaaaaggatggggtacgtccctgagcccccagcctagatcatcagatgggagagaggctggctctgggtggtgggagagaagggcataataagaacccttcaacgttgatgcatggcccttgggggctggaacccctccaacctcatgttgcccatgtctctgcttgttagaggagtgaagaaagaagacaagactttggctgtgggcatccagttcatgttcctgaggattttgggtaaagatcttgcttgggaccattggtggtggtgatggggtccagatgcccactgtgtgccaggcctggggcacaggcatgagcggaattcaatccctgatcttagggctcacaagctcatggggtgacagacctggcccagctctcctagagcggggtatagaggcagagtctagacagcccgtcaggaagccacctcggatgcaggggtggggcgggcttgagggccagacagccaagaggccccagtaacccagagcccctgaggggttgtacatgccagggagggggcagggtaggacggtgggccttcattgtcccctgagcaccacctccctcagcctggatgcccagccccgtgatccacggcagcgccatcgacaccacctgtgtgcactgggccctgagctgtgggcgtcgagctgtctgtcgctactacaataatgacctgctccgaaaccggttcatcggcctccagttcttcttcaaaacaggttctgtgatctgcttcgccttagttttggctgtcctgaggcagcaggacaaagaggcaaggaccaaagagagcagatccagccctgccgtagagcagcaattgctagtgtcggggccagggaagaagccagaggattcccgagtgtgagctgtcttggggccccacctggccaagagtagcagccacagcagtacctcctctgagtcctttgcccaagattgggtgtcaagagccctgtgttccattctggctcctccactaaattgctgtgtgacttcaggcaagacattgatcctctctcagcctttgcttgctagtctgaaccaaagagttgtttgggcatttgctgtgttggccatttctggagcaagagggtcttcttcctccttcccccagccagccagctgtcctggggccaggctttcctgggtggaaagaagtatacctttccctggggccctaggatagcaaagtgagccatagtgggccaggctgccctccatgctgggccccagcccaggtctgcactcgcctggatcaccttctttgagccttagccatctcctgtcaggtaggaatgaacttgccagccttcaggctcgttcagctatgaccatctgtgcggtcagggtacactcagctctcctccccaactccagcagcctttaagaagtgtccctttggcgccccctggaggcagagcactgagctggaccctgggtagactcccacagggaggacggagctggcctcaggagtgggacacccagacttggcagggccttcaagaggcctgtgtgggggccccaggaatccttagctgaagcggggagactcactctccatctcaggaaattctagcccttgccctcagggagccacggttgagggtgaggcccaacacctgccttagggccctgggtgggcaagtctgggccctggggtagggagggagactcaggcccacacttgggtattttctaatttcagacaaacacacactcagcgcgcactcactgattcctacacattgccaagatttcacacatgtgaccaggggccaccaaagtccctgtgacctttgtgactaggatcctaatttctctattttctcctgggtgcctgggtctgtgtcacctggggcagtgtggataatgtttagttctgtgacactgttttttgggggtggcacctggttctccgatgcctgggctggtgtcaggcccaggactgtagtgctgggagcagtaaagctcagctctgtgtaatgagtgatgctatggcttgctcgtgtcttatgatccaatccttttctacatcagcccttgttttgttttatggctagtcttatctggcctggttatttccttgcggggaggagagggtttgctaatctgctcccagcccaacctattaccaccccacctcgctgggacctactgctcgggaggcagcagacagggagccaccagcagtggcttcctggccctgtgctgggggtggggggaagctgggggcacatgtggcccttgccttctgagcagctcccagtgccagggctttgagactttcccacatgataaaagaaaagggaggtacagaagttccaattccctttttattttgctggttggtatctgtaaatgtttaataaatatctgagcatgtatctatcaacgccaagaatttcaaagtctccttcaacaatatgaggcttttaggatgtttatattccttcatccctcttgtttcccaggttttgcagggaaaaaaagtctggaattatagatacagcttattattaaatttgttcttgcataatg

SEQ ID NO: 9078 - protein, 98 aa, Homo sapiens; identical to SEQ ID NO: 9076

SEQ ID NO: 9079 - DNA, 368 bp, Homo sapiens
tttagcaacttaaaacaacaaatatttattatctcatagaatttctgagggtcaagaacccacagatgggctaactggaaggtgctggatcttcatgaggatttctgatgaagttgtagtcaagcatcagccagggctgcagtcatcagaaggctcaactggggtgagaggatccacttccaagttcattcgatgattgctgttgggcctctgtaccttgttggcagttgaccaaaagctttgattccatgtgccttttatgatcccttcattcatatcacagactttcttgcctgaagatggaggcttaagtgttggtggtgccctggtgagcgcggcggcccgggcgctggatgcgggggcggccg

SEQ ID NO: 9080 - protein, 35 aa, Homo sapiens
MIPSFISQTFLPEDGGLSVGGALVSAAARALDAGA

SEQ ID NO: 9081 - DNA, 1242 bp, Homo sapiens
ctcctcccatttccgccgccaccagaataactctgcttttatctgtcttgcctactgagatttcattttcaagctttctttgaagaagaacttcaaaccaccatctcgaggtttgatcttagaccagccagcacaggttctattcttgctgttcatgttggaatggctccagcgttccagtacaaagtgtctttgtgttggaacttgggtcacagacccaggcacaagcatttatacacacacacacacacacacacacacacacacacacacacgtacatagttgatggtttttctagccaacccaccctgaagctctggccaaggtttgatttggacagggacctggtgctcagtggggatgggtcgtgaccctgatattggcccatgaagcatggggagctctggagcaaggaaacaggctcaatcccccactgaggacttgtgtctgcacccctatctggcaccccactttcctggcctaggcccaagggacacagcaggagaagcagtgtgataggagagaggctagggttaaattcatctttacacagcgccggatggatggaaatcttggctcacataaaagacagactcagggaggattttatgacaaaagtccctcctttgagggcaggattcccccaggaatcctggacactttagtgagaactggaccagcccttggcacaaaaccctgcctgccctgtcccccactcccaccccctgtgtgcaaaatggggctagtccaggctcttcccacctcactgggacaattgcaagggtcataggagaggtgggtatgataggtggtcatatgaggtggtgagtatgagaggtgggtgcctcacaaactcggggtatggtcctgacctgcatggcagatgagcagagcacttgggaacgagcataggaagtgccatcttcccgggcatctctgctcagtgttaaggtctagccacagacactgtgggacctgcctcttcctatggaatgggggcctgcatgggttgtgtcctggggcaggagtgagggatggctgggaagaatctccaggtctgtggcccttgtgttgagtgattattttgtgacactctcattcctggaccacctgccaggtttatctgttatacctgtggcattcttattatgtcagacaagttattatagttcattcaactctaacaaatgaacaaaagaacaataaataggaggccattaaaggtcttttgtggcagagga

SEQ ID NO: 9082 - protein, 76 aa, Homo sapiens
MDGNLGSHKRQTQGGFYDKSPSFEGRIPPGILDTLVRTGPALGTKPCLPCPPLPPPVCKMGLVQALPTSLGQLQGS

SEQ ID NO: 9083 - DNA, 1512 bp, Homo sapiens
cgagccacagcggatgcagtggcgtcagcatcccagagcggcagcttctctcctgcctgtcactggggactggttgctctccacccatccaggaggaaggggttaggtcccagtcttacactcttatagggtctcatggacataggcctatgcctgttctgatatctataattttttaaactcaaaaggaccaaaacactcctgaaccctcatctatacggcctgcactgggcttggtgtttcctcctggcccaggcagctccatctcttctgccattcctcctggacgaaagtggcaggaccccacctctaccacttccccacagggtcactgcacagcggcttcaaagacacgccctgttgaaggggaaacatcctccccccatcacactccaactcgtcaccccaaaagggaagtcaaagcacaggtccgtggggcctatggtttgtagacactgacacagtggttttcaaaccaggtgctgcggaacccctgatattccacagagctttgtcaggggatgctaaagtgggaagatgggagtggaggcaaaggataggtttccagccctcctcccatttccgccgccaccagaataactctgcttttatctgtcttgcctactgagatttcattttcaagctttctttgaagaagaacttcaaaccaccatctcgaggtttgatcttagaccagccagcacaggttctattcttgctgttcatgttggaatggctccagcgttccagtacaaagtgtctttgtgttggaacttgggtcacagacccaggcacaagcatttatacacacacacacacacacacacacacacacacacacacacgtacatagttgatggtttttctagccaacccaccctgaagctctggccaaggtttgatttggacagggacctggtgctcagtggggatgggtcgtgaccctgatattggcccatgaagcatggggagctctggagcaaggaaacaggctcaatcccccactgaggacttgtgtctgcacccctatctggcaccccactttcctggcctaggcccaagggacacagcaggagaagcagtgtgataggagagaggctagggttaaattcatctttacacagcgccggatggatggaaatcttggctcacataaaagacagactcagggaggattttatgacaaaagtccctcctttgagggcaggattcccccaggaatcctggacactttagtgagaactggaccagcccttggcacaaaaccctgcctgccatgggttgtgtcctggggcaggagtgagggatggctgggaagaatctccaggtctgtggcccttgtgttgagtgattattttgtgacactctcattcctggaccacctgccaggtttatctgttatacctgtggcattcttattatgtcagacaagttattatagttcattcaactctaacaaatgaacaaaagaacaataaataggaggccattaaaggtcttttgtggcagagg

SEQ ID NO: 9084 - protein, 110 aa, Homo sapiens
MDGNLGSHKRQTQGGFYDKSPSFEGRIPPGILDTLVRTGPALGTKPCLPWVVSWGRSEGWLGRISRSVALVLSDYFVTLSFLDHLPGLSVIPVAFLLCQTSYYSSFNSNK

SEQ ID NO: 9085 - DNA, 1307 bp, Homo sapiens
cccagtacgcattagctggtgttgggttgattgagacctggggcagttcctggggcaagaagccagatgggagatgagatagaaagtgttaggagttatcctctttgcctggcctttgagaataacttactgtgtgactttgggcaagttccttccccactctgggcctcagtttctcacttgggaaagcaaggagtttgaccagatgatcacaatgggccttcctagctctggccaccaagaatttgtgaacattagagctcctggtctggtgggtagagccagagctgctgactggtctctctgcctccagaggggatttattggacctcagaggtggcagggccctatggagcaccaactgccctcaaccccaccctgtgcccaagactgggaagggattgatgtcaggctgtggccataggtagcatgagttgcccaaggagggacagagcatatctttgctgaggcttggctgaggggcttatgatagggcttgcagtacctcacagccccctgtgggcacagacaccctgaggtttacccaggcaaatatattgattagcaggacaagggctctctcctcagtttctgctcccttccatctctctcccatacttgtctgaaaagggagacaaaaaatcttatacaagtggcatctcaatcctttccagtccagcacctcctggggcaggcagtgtgacttatttcctgtggtgaaatcacctgtttcacaagcctggcagcgcgacttctgagtctcatgaccactcaacccaagggacccctccccagaccagaaccaagtcagctgggggctgtcgtactaccctgtccagtcttgagggcctagttgcaggtcccccaggcatccagcccctcctagagcttgctgggcaggctgcacctcatctgggcaggcgcagagctgatgaaatgctggagcaatgcatggcaaacatatgccctccagtgtcttctgaaacctttggggctgacacaagatcctttagtgtttgggatgacctctttcctgcagacttcttcccctatcccagtcttcatcgcttgccctgcttctcacttaggcaggagtgagggatggctgggaagaatctccaggtctgtggcccttgtgttgagtgattattttgtgacactctcattcctggaccacctgccaggtttatctgttatacctgtggcattcttattatgtcagacaagttattatagttcattcaactctaacaaatgaacaaaagaacaataaataggaggccattaaaggtcttttgtggcagagg

SEQ ID NO: 9086 - protein, 108 aa, Homo sapiens
MKCWSNAWQTYALQCLLKPLGLTQDPLVFGMTSFLQTSSPIPVFIACPASHLGRSEGWLGRISRSVALVLSDYFVTLSFLDHLPGLSVIPVAFLLCQTSYYSSFNSNK

SEQ ID NO: 9087 - DNA, 3628 bp, Homo sapiens
gggagagctgagcctgcggggctggccctggcctggctgctgctgcctgcagcccccagctcaggctccctccacctcacagtccactgctttggcgctgcttctgggctggcctcttcactccactgaatctttgggctctcatctgtaaaatgggagtgttcaagaaggccagtccaaatggaaagctcaccgtctacctgggaaagcgggactttgtggaccacatcgacctcgtggaccctgtggatggtgtggtcctggtggatcctgagtatctcaaagagcggagagtctatgtgacgctgacctgcgccttccgctatggccgggaggacctggatgtcctgggcctgacctttcgcaaggacctgtttgtggccaacgtacagtcgttcccaccggcccccgaggacaagaagcccctgacgcggctgcaggaacgcctcatcaagaagctgggcgagcacgcttaccctttcacctttgagatccctccaaaccttccatgttctgtgacactgcagccggggcccgaagacacggggaaggcttgcggtgtggactatgaagtcaaagccttctgcgcggagaatttggaggagaagatccacaagcggaattctgtgcgtctggtcatccggaaggttcagtatgccccagagaggcctggcccccagcccacagccgagaccaccaggcagttcctcatgtcggacaagcccttgcacctagaagcctctctggataaggagatctattaccatggagaacccatcagcgtcaacgtccacgtcaccaacaacaccaacaagacggtgaagaagatcaagatctcagtgcgccagtatgcagacatctgccttttcaacacagctcagtacaagtgccctgttgccatggaagaggctgatgacactgtggcacccagctcgacgttctgcaaggtctacacactgacccccttcctagccaataaccgagagaagcggggcctcgccttggacgggaagctcaagcacgaagacacgaacttggcctctagcaccctgttgagggaaggtgccaaccgtgagatcctggggatcattgtttcctacaaagtgaaagtgaagctggtggtgtctcggggcggcctgttgggagatcttgcatccagcgacgtggccgtggaactgcccttcaccctaatgcaccccaagcccaaagaggaacccccgcatcgggaagttccagagaacgagacgccagtagataccaatctcatagaacttgacacaaatgatgacgacattgtatttgaggactttgctcgccagagactgaaaggcatgaaggatgacaaggaggaagaggaggatggtaccggctctccacagctcaacaacagatagacgggccggccctgcctccacgtggctccggctccactctcgtgcactcggatgcttactcgtcttcttcctgttctggtttcttttcccctttgttcttccagtttctaccagggggccccgtgggcttccagatcacggtgatgaacctctggcctcaggattggccccacatcaccacgccaacaggaccacagcgcactggctccaccccatctctgccatctccactcccctccttttcatgctgtctcccagaaaagctgccagggctctggccttggaattggacttgagatggggagcagacaggggaggatggggaatgtgggacacggtgtggtgggcatgagggcttggaggggtggggatgagggctcaagacacgagagaagatgtccacggtcccaggtggttaacaaagttctggcagctaaaagatgaccgcgttgaaggccacctccttctggctgggaggggcagaactgtggacagattctcaatgcctttttgaagttctgacccaccaaagaccttctgccttcaccctcctccccacctgatgtccctctgtgtctgatagtgatgttggtgaaagttcgtagaccccaggagtagagaaaagcaactggactgactttcttaccagcagttacctagactgaggcaagctgtgtggactcacccaagtatatttcagtactgtcaggctgtgacatcttagctaccttgtatttcaagtgcatggccctgtctagagatatgcacagagagaaaagcagagggagggagggagggggtcttcagcaagcaccagcccccagcagagtgagctgaagctcctgaggagggttcccgaaggggggcgctcagagatgggggcagggggcggggagaggagagtctgccttatgtcccttccttgtggacttcacatggtcatgcaggaagtgaggatgggtgtccagcgggggccgaggccactagtatcctcctgcttccccctgccattctccagggctggactgaccctatggactgggagagagtgcctgaggccaccatgccacagtcaaagggggtcctatctcagaaggtggcagcatccactgagatatcctcacccgaagggaaggaggctgctgggtagcaaataagccccttcttttcttggtgagttgatgacctccaatagctcccagtgtcatgggtacccagtacgcattagctggtgttgggttgattgagacctggggcagttcctggggcaagaagccagatgggagatgagatagaaagtgttaggagttatcctctttgcctggcctttgagaataacttactgtgtgactttgggcaagttccttccccactctgggcctcagtttctcacttgggaaagcaaggagtttgaccagatgatcacaatgggccttcctagctctggccaccaagaatttgtgaacattagagctcctggtctggtgggtagagccagagctgctgactggtctctctgcctccagaggggatttattggacctcagaggtggcagggccctatggagcaccaactgccctcaaccccaccctgtgcccaagactgggaagggattgatgtcaggctgtggccataggtagcatgagttgcccaaggagggacagagcatatctttgctgaggcttggctgaggggcttatgatagggcttgcagtacctcacagccccctgtgggcacagacaccctgaggtttacccaggcaaatatattgattagcaggacaagggctctctcctcagtttctgctcccttccatctctctcccatacttgtctgaaaagggagacaaaaaatcttatacaagtggcatctcaatcctttccagtccagcacctcctggggcaggcagtgtgacttatttcctgtggtgaaatcacctgtttcacaagcctggcagcgcgacttctgagtctcatgaccactcaacccaagggacccctccccagaccagaaccaagtcagctgggggctgtcgtactaccctgtccagtcttgagggcctagttgcaggtcccccaggcatccagcccctcctagagcttgctgggcaggctgcacctcatctgggcaggcgcagagctgatgaaatgctggagcaatgcatggcaaacatatgccctccagtgtcttctgaaacctttggggctgacacaagatcctttagtgtttggg

SEQ ID NO: 9088 - protein, 413 aa, Homo sapiens
MGVFKKASPNGKLTVYLGKRDFVDHIDLVDPVDGVVLVDPEYLKERRVYVTLTCAFRYGREDLDVLGLTFRKDLFVANVQSFPPAPEDKKPLTRLQERLIKKLGEHAYPFTFEIPPNLPCSVTLQPGPEDTGKACGVDYEVKAFCAENLEEKIHKRNSVRLVIRKVQYAPERPGPQPTAETTRQFLMSDKPLHLEASLDKEIYYHGEPISVNVHVTNNTNKTVKKIKISVRQYADICLFNTAQYKCPVAMEEADDTVAPSSTFCKVYTLTPFLANNREKRGLALDGKLKHEDTNLASSTLLREGANREILGIIVSYKVKVKLVVSRGGLLGDLASSDVAVELPFTLMHPKPKEEPPHREVPENETPVDTNLIELDTNDDDIVFEDFARQRLKGMKDDKEEEEDGTGSPQLNNR

SEQ ID NO: 9089 - DNA, 3604 bp, Homo sapiens
gggagagctgagcctgcggggctggccctggcctggctgctgctgcctgcagcccccagctcaggctccctccacctcacagtccactgctttggcgctgcttctgggctggcctcttcactccactgaatctttgggctctcatctgtaaaatgggagtgttcaagaaggccagtccaaatggaaagctcaccgtctacctgggaaagcgggactttgtggaccacatcgacctcgtggaccctgtggatggtgtggtcctggtggatcctgagtatctcaaagagcggagagtctatgtgacgctgacctgcgccttccgctatggccgggaggacctggatgtcctgggcctgacctttcgcaaggacctgtttgtggccaacgtacagtcgttcccaccggcccccgaggacaagaagcccctgacgcggctgcaggaacgcctcatcaagaagctgggcgagcacgcttaccctttcacctttgagatccctccaaaccttccatgttctgtgacactgcagccggggcccgaagacacggggaaggcttgcggtgtggactatgaagtcaaagccttctgcgcggagaatttggaggagaagatccacaagcggaattctgtgcgtctggtcatccggaaggttcagtatgccccagagaggcctggcccccagcccacagccgagaccaccaggcagttcctcatgtcggacaagcccttgcacctagaagcctctctggataaggagatctattaccatggagaacccatcagcgtcaacgtccacgtcaccaacaacaccaacaagacggtgaagaagatcaagatctcagtgcgccagtatgcagacatctgccttttcaacacagctcagtacaagtgccctgttgccatggaagaggctgatgacactgtggcacccagctcgacgttctgcaaggtctacacactgacccccttcctagccaataaccgagagaagcggggcctcgccttggacgggaagctcaagcacgaagacacgaacttggcctctagcaccctgttgagggaaggtgccaaccgtgagatcctggggatcattgtttcctacaaagtgaaagtgaagctggtggtgtctcggggcggcgacgtggccgtggaactgcccttcaccctaatgcaccccaagcccaaagaggaacccccgcatcgggaagttccagagaacgagacgccagtagataccaatctcatagaacttgacacaaatgatgacgacattgtatttgaggactttgctcgccagagactgaaaggcatgaaggatgacaaggaggaagaggaggatggtaccggctctccacagctcaacaacagatagacgggccggccctgcctccacgtggctccggctccactctcgtgcactcggatgcttactcgtcttcttcctgttctggtttcttttcccctttgttcttccagtttctaccagggggccccgtgggcttccagatcacggtgatgaacctctggcctcaggattggccccacatcaccacgccaacaggaccacagcgcactggctccaccccatctctgccatctccactcccctccttttcatgctgtctcccagaaaagctgccagggctctggccttggaattggacttgagatggggagcagacaggggaggatggggaatgtgggacacggtgtggtgggcatgagggcttggaggggtggggatgagggctcaagacacgagagaagatgtccacggtcccaggtggttaacaaagttctggcagctaaaagatgaccgcgttgaaggccacctccttctggctgggaggggcagaactgtggacagattctcaatgcctttttgaagttctgacccaccaaagaccttctgccttcaccctcctccccacctgatgtccctctgtgtctgatagtgatgttggtgaaagttcgtagaccccaggagtagagaaaagcaactggactgactttcttaccagcagttacctagactgaggcaagctgtgtggactcacccaagtatatttcagtactgtcaggctgtgacatcttagctaccttgtatttcaagtgcatggccctgtctagagatatgcacagagagaaaagcagagggagggagggagggggtcttcagcaagcaccagcccccagcagagtgagctgaagctcctgaggagggttcccgaaggggggcgctcagagatgggggcagggggcggggagaggagagtctgccttatgtcccttccttgtggacttcacatggtcatgcaggaagtgaggatgggtgtccagcgggggccgaggccactagtatcctcctgcttccccctgccattctccagggctggactgaccctatggactgggagagagtgcctgaggccaccatgccacagtcaaagggggtcctatctcagaaggtggcagcatccactgagatatcctcacccgaagggaaggaggctgctgggtagcaaataagccccttcttttcttggtgagttgatgacctccaatagctcccagtgtcatgggtacccagtacgcattagctggtgttgggttgattgagacctggggcagttcctggggcaagaagccagatgggagatgagatagaaagtgttaggagttatcctctttgcctggcctttgagaataacttactgtgtgactttgggcaagttccttccccactctgggcctcagtttctcacttgggaaagcaaggagtttgaccagatgatcacaatgggccttcctagctctggccaccaagaatttgtgaacattagagctcctggtctggtgggtagagccagagctgctgactggtctctctgcctccagaggggatttattggacctcagaggtggcagggccctatggagcaccaactgccctcaaccccaccctgtgcccaagactgggaagggattgatgtcaggctgtggccataggtagcatgagttgcccaaggagggacagagcatatctttgctgaggcttggctgaggggcttatgatagggcttgcagtacctcacagccccctgtgggcacagacaccctgaggtttacccaggcaaatatattgattagcaggacaagggctctctcctcagtttctgctcccttccatctctctcccatacttgtctgaaaagggagacaaaaaatcttatacaagtggcatctcaatcctttccagtccagcacctcctggggcaggcagtgtgacttatttcctgtggtgaaatcacctgtttcacaagcctggcagcgcgacttctgagtctcatgaccactcaacccaagggacccctccccagaccagaaccaagtcagctgggggctgtcgtactaccctgtccagtcttgagggcctagttgcaggtcccccaggcatccagcccctcctagagcttgctgggcaggctgcacctcatctgggcaggcgcagagctgatgaaatgctggagcaatgcatggcaaacatatgccctccagtgtcttctgaaacctttggggctgacacaagatcctttagtgtttggg

SEQ ID NO: 9090 - protein, 405 aa, Homo sapiens
MGVFKKASPNGKLTVYLGKRDFVDHIDLVDPVDGVVLVDPEYLKERRVYVTLTCAFRYGREDLDVLGLTFRKDLFVANVQSFPPAPEDKKPLTRLQERLIKKLGEHAYPFTFEIPPNLPCSVTLQPGPEDTGKACGVDYEVKAFCAENLEEKIHKRNSVRLVIRKVQYAPERPGPQPTAETTRQFLMSDKPLHLEASLDKEIYYHGEPISVNVHVTNNTNKTVKKIKISVRQYADICLFNTAQYKCPVAMEEADDTVAPSSTFCKVYTLTPFLANNREKRGLALDGKLKHEDTNLASSTLLREGANREILGIIVSYKVKVKLVVSRGGDVAVELPFTLMHPKPKEEPPHREVPENETPVDTNLIELDTNDDDIVFEDFARQRLKGMKDDKEEEEDGTGSPQLNNR

SEQ ID NO: 9091 - DNA, 3786 bp, Homo sapiens
gcgctgccctgcctcgctgggcggcgcgcgcacacgcagacgcgcacacacacacacatacacacacgcacacaccccgcgcggttccacgcccctggccgcggcccgggcgctgcgctgctcgacgcggcgggcggcgggcggggaccgggggcgggggcggcggcggcggccgggagagcggaggaggcggagcagggagccgggagcgggctggcccgcgctcctcctgctggctggggattttccagcctgggcgctgacgccgcggacctccctgcgaccgtcgcggaccatgggcgacaaagggacccgagtgttcaagaaggccagtccaaatggaaagctcaccgtctacctgggaaagcgggactttgtggaccacatcgacctcgtggaccctgtggatggtgtggtcctggtggatcctgagtatctcaaagagcggagagtctatgtgacgctgacctgcgccttccgctatggccgggaggacctggatgtcctgggcctgacctttcgcaaggacctgtttgtggccaacgtacagtcgttcccaccggcccccgaggacaagaagcccctgacgcggctgcaggaacgcctcatcaagaagctgggcgagcacgcttaccctttcacctttgagatccctccaaaccttccatgttctgtgacactgcagccggggcccgaagacacggggaaggcttgcggtgtggactatgaagtcaaagccttctgcgcggagaatttggaggagaagatccacaagcggaattctgtgcgtctggtcatccggaaggttcagtatgccccagagaggcctggcccccagcccacagccgagaccaccaggcagttcctcatgtcggacaagcccttgcacctagaagcctctctggataaggagatctattaccatggagaacccatcagcgtcaacgtccacgtcaccaacaacaccaacaagacggtgaagaagatcaagatctcagtgcgccagtatgcagacatctgccttttcaacacagctcagtacaagtgccctgttgccatggaagaggctgatgacactgtggcacccagctcgacgttctgcaaggtctacacactgacccccttcctagccaataaccgagagaagcggggcctcgccttggacgggaagctcaagcacgaagacacgaacttggcctctagcaccctgttgagggaaggtgccaaccgtgagatcctggggatcattgtttcctacaaagtgaaagtgaagctggtggtgtctcggggcggcctgttgggagatcttgcatccagcgacgtggccgtggaactgcccttcaccctaatgcaccccaagcccaaagaggaacccccgcatcgggaagttccagagaacgagacgccagtagataccaatctcatagaacttgacacaaatgatgacgacattgtatttgaggactttgctcgccagagactgaaaggcatgaaggatgacaaggaggaagaggaggatggtaccggctctccacagctcaacaacagatagacgggccggccctgcctccacgtggctccggctccactctcgtgcactcggatgcttactcgtcttcttcctgttctggtttcttttcccctttgttcttccagtttctaccagggggccccgtgggcttccagatcacggtgatgaacctctggcctcaggattggccccacatcaccacgccaacaggaccacagcgcactggctccaccccatctctgccatctccactcccctccttttcatgctgtctcccagaaaagctgccagggctctggccttggaattggacttgagatggggagcagacaggggaggatggggaatgtgggacacggtgtggtgggcatgagggcttggaggggtggggatgagggctcaagacacgagagaagatgtccacggtcccaggtggttaacaaagttctggcagctaaaagatgaccgcgttgaaggccacctccttctggctgggaggggcagaactgtggacagattctcaatgcctttttgaagttctgacccaccaaagaccttctgccttcaccctcctccccacctgatgtccctctgtgtctgatagtgatgttggtgaaagttcgtagaccccaggagtagagaaaagcaactggactgactttcttaccagcagttacctagactgaggcaagctgtgtggactcacccaagtatatttcagtactgtcaggctgtgacatcttagctaccttgtatttcaagtgcatggccctgtctagagatatgcacagagagaaaagcagagggagggagggagggggtcttcagcaagcaccagcccccagcagagtgagctgaagctcctgaggagggttcccgaaggggggcgctcagagatgggggcagggggcggggagaggagagtctgccttatgtcccttccttgtggacttcacatggtcatgcaggaagtgaggatgggtgtccagcgggggccgaggccactagtatcctcctgcttccccctgccattctccagggctggactgaccctatggactgggagagagtgcctgaggccaccatgccacagtcaaagggggtcctatctcagaaggtggcagcatccactgagatatcctcacccgaagggaaggaggctgctgggtagcaaataagccccttcttttcttggtgagttgatgacctccaatagctcccagtgtcatgggtacccagtacgcattagctggtgttgggttgattgagacctggggcagttcctggggcaagaagccagatgggagatgagatagaaagtgttaggagttatcctctttgcctggcctttgagaataacttactgtgtgactttgggcaagttccttccccactctgggcctcagtttctcacttgggaaagcaaggagtttgaccagatgatcacaatgggccttcctagctctggccaccaagaatttgtgaacattagagctcctggtctggtgggtagagccagagctgctgactggtctctctgcctccagaggggatttattggacctcagaggtggcagggccctatggagcaccaactgccctcaaccccaccctgtgcccaagactgggaagggattgatgtcaggctgtggccataggtagcatgagttgcccaaggagggacagagcatatctttgctgaggcttggctgaggggcttatgatagggcttgcagtacctcacagccccctgtgggcacagacaccctgaggtttacccaggcaaatatattgattagcaggacaagggctctctcctcagtttctgctcccttccatctctctcccatacttgtctgaaaagggagacaaaaaatcttatacaagtggcatctcaatcctttccagtccagcacctcctggggcaggcagtgtgacttatttcctgtggtgaaatcacctgtttcacaagcctggcagcgcgacttctgagtctcatgaccactcaacccaagggacccctccccagaccagaaccaagtcagctgggggctgtcgtactaccctgtccagtcttgagggcctagttgcaggtcccccaggcatccagcccctcctagagcttgctgggcaggctgcacctcatctgggcaggcgcagagctgatgaaatgctggagcaatgcatggcaaacatatgccctccagtgtcttctgaaacctttggggctgacacaagatcctttagtgtttggg

SEQ ID NO: 9092 - protein, 418 aa, Homo sapiens; identical to SEQ ID NO: 1390

SEQ ID NO: 9093 - DNA, 3762 bp, Homo sapiens
gcgctgccctgcctcgctgggcggcgcgcgcacacgcagacgcgcacacacacacacatacacacacgcacacaccccgcgcggttccacgcccctggccgcggcccgggcgctgcgctgctcgacgcggcgggcggcgggcggggaccgggggcgggggcggcggcggcggccgggagagcggaggaggcggagcagggagccgggagcgggctggcccgcgctcctcctgctggctggggattttccagcctgggcgctgacgccgcggacctccctgcgaccgtcgcggaccatgggcgacaaagggacccgagtgttcaagaaggccagtccaaatggaaagctcaccgtctacctgggaaagcgggactttgtggaccacatcgacctcgtggaccctgtggatggtgtggtcctggtggatcctgagtatctcaaagagcggagagtctatgtgacgctgacctgcgccttccgctatggccgggaggacctggatgtcctgggcctgacctttcgcaaggacctgtttgtggccaacgtacagtcgttcccaccggcccccgaggacaagaagcccctgacgcggctgcaggaacgcctcatcaagaagctgggcgagcacgcttaccctttcacctttgagatccctccaaaccttccatgttctgtgacactgcagccggggcccgaagacacggggaaggcttgcggtgtggactatgaagtcaaagccttctgcgcggagaatttggaggagaagatccacaagcggaattctgtgcgtctggtcatccggaaggttcagtatgccccagagaggcctggcccccagcccacagccgagaccaccaggcagttcctcatgtcggacaagcccttgcacctagaagcctctctggataaggagatctattaccatggagaacccatcagcgtcaacgtccacgtcaccaacaacaccaacaagacggtgaagaagatcaagatctcagtgcgccagtatgcagacatctgccttttcaacacagctcagtacaagtgccctgttgccatggaagaggctgatgacactgtggcacccagctcgacgttctgcaaggtctacacactgacccccttcctagccaataaccgagagaagcggggcctcgccttggacgggaagctcaagcacgaagacacgaacttggcctctagcaccctgttgagggaaggtgccaaccgtgagatcctggggatcattgtttcctacaaagtgaaagtgaagctggtggtgtctcggggcggcgacgtggccgtggaactgcccttcaccctaatgcaccccaagcccaaagaggaacccccgcatcgggaagttccagagaacgagacgccagtagataccaatctcatagaacttgacacaaatgatgacgacattgtatttgaggactttgctcgccagagactgaaaggcatgaaggatgacaaggaggaagaggaggatggtaccggctctccacagctcaacaacagatagacgggccggccctgcctccacgtggctccggctccactctcgtgcactcggatgcttactcgtcttcttcctgttctggtttcttttcccctttgttcttccagtttctaccagggggccccgtgggcttccagatcacggtgatgaacctctggcctcaggattggccccacatcaccacgccaacaggaccacagcgcactggctccaccccatctctgccatctccactcccctccttttcatgctgtctcccagaaaagctgccagggctctggccttggaattggacttgagatggggagcagacaggggaggatggggaatgtgggacacggtgtggtgggcatgagggcttggaggggtggggatgagggctcaagacacgagagaagatgtccacggtcccaggtggttaacaaagttctggcagctaaaagatgaccgcgttgaaggccacctccttctggctgggaggggcagaactgtggacagattctcaatgcctttttgaagttctgacccaccaaagaccttctgccttcaccctcctccccacctgatgtccctctgtgtctgatagtgatgttggtgaaagttcgtagaccccaggagtagagaaaagcaactggactgactttcttaccagcagttacctagactgaggcaagctgtgtggactcacccaagtatatttcagtactgtcaggctgtgacatcttagctaccttgtatttcaagtgcatggccctgtctagagatatgcacagagagaaaagcagagggagggagggagggggtcttcagcaagcaccagcccccagcagagtgagctgaagctcctgaggagggttcccgaaggggggcgctcagagatgggggcagggggcggggagaggagagtctgccttatgtcccttccttgtggacttcacatggtcatgcaggaagtgaggatgggtgtccagcgggggccgaggccactagtatcctcctgcttccccctgccattctccagggctggactgaccctatggactgggagagagtgcctgaggccaccatgccacagtcaaagggggtcctatctcagaaggtggcagcatccactgagatatcctcacccgaagggaaggaggctgctgggtagcaaataagccccttcttttcttggtgagttgatgacctccaatagctcccagtgtcatgggtacccagtacgcattagctggtgttgggttgattgagacctggggcagttcctggggcaagaagccagatgggagatgagatagaaagtgttaggagttatcctctttgcctggcctttgagaataacttactgtgtgactttgggcaagttccttccccactctgggcctcagtttctcacttgggaaagcaaggagtttgaccagatgatcacaatgggccttcctagctctggccaccaagaatttgtgaacattagagctcctggtctggtgggtagagccagagctgctgactggtctctctgcctccagaggggatttattggacctcagaggtggcagggccctatggagcaccaactgccctcaaccccaccctgtgcccaagactgggaagggattgatgtcaggctgtggccataggtagcatgagttgcccaaggagggacagagcatatctttgctgaggcttggctgaggggcttatgatagggcttgcagtacctcacagccccctgtgggcacagacaccctgaggtttacccaggcaaatatattgattagcaggacaagggctctctcctcagtttctgctcccttccatctctctcccatacttgtctgaaaagggagacaaaaaatcttatacaagtggcatctcaatcctttccagtccagcacctcctggggcaggcagtgtgacttatttcctgtggtgaaatcacctgtttcacaagcctggcagcgcgacttctgagtctcatgaccactcaacccaagggacccctccccagaccagaaccaagtcagctgggggctgtcgtactaccctgtccagtcttgagggcctagttgcaggtcccccaggcatccagcccctcctagagcttgctgggcaggctgcacctcatctgggcaggcgcagagctgatgaaatgctggagcaatgcatggcaaacatatgccctccagtgtcttctgaaacctttggggctgacacaagatcctttagtgtttggg

SEQ ID NO: 9094 - protein, 410 aa, Homo sapiens; identical to SEQ ID NO: 1392

SEQ ID NO: 9095 - DNA, 564 bp, Homo sapiens
tcctgcttccccctgccattctccagggctggactgaccctatggactgggagagagtgcctcacagccccctgtgggcacagacaccctgaggtttacccaggcaaatatattgattagcaggacaagggctctctcctcagtttctgctcccttccatctctctcccatacttgtctgaaaagggagacaaaaaatcttatacaagtggcatctcaatcctttccagtccagcacctcctggggcaggcagtgtgacttatttcctgtggtgaaatcacctgtttcacaagcctggcagcgcgacttctgagtctcatgaccactcaacccaagggacccctccccagaccagaaccaagtcagctgggggctgtcgtactaccctgtccagtcttgagggcctagttgcaggtcccccaggcatccagcccctcctagagcttgctgggcaggctgcacctcatctgggcaggcgcagagctgatgaaatgctggagcaatgcatggcaaacatatgccctccagtgtcttctgaaacctttggggctgacacaagatcct

SEQ ID NO: 9096 - protein, 47 aa, Homo sapiens
PYGLGESASQPPVGTDTLRFTQANILISRTRALSSVSAPFHLSPILV

SEQ ID NO: 9097 - DNA, 3245 bp, Homo sapiens
gggagagctgagcctgcggggctggccctggcctggctgctgctgcctgcagcccccagctcaggctccctccacctcacagtccactgctttggcgctgcttctgggctggcctcttcactccactgaatctttgggctctcatctgtaaaatgggagtgttcaagaaggccagtccaaatggaaagctcaccgtctacctgggaaagcgggactttgtggaccacatcgacctcgtggaccctgtggatggtgtggtcctggtggatcctgagtatctcaaagagcggagagtctatgtgacgctgacctgcgccttccgctatggccgggaggacctggatgtcctgggcctgacctttcgcaaggacctgtttgtggccaacgtacagtcgttcccaccggcccccgaggacaagaagcccctgacgcggctgcaggaacgcctcatcaagaagctgggcgagcacgcttaccctttcacctttgagatccctccaaaccttccatgttctgtgacactgcagccggggcccgaagacacggggaaggcttgcggtgtggactatgaagtcaaagccttctgcgcggagaatttggaggagaagatccacaagcggaattctgtgcgtctggtcatccggaaggttcagtatgccccagagaggcctggcccccagcccacagccgagaccaccaggcagttcctcatgtcggacaagcccttgcacctagaagcctctctggataaggagatctattaccatggagaacccatcagcgtcaacgtccacgtcaccaacaacaccaacaagacggtgaagaagatcaagatctcagtgcgccagtatgcagacatctgccttttcaacacagctcagtacaagtgccctgttgccatggaagaggctgatgacactgtggcacccagctcgacgttctgcaaggtctacacactgacccccttcctagccaataaccgagagaagcggggcctcgccttggacgggaagctcaagcacgaagacacgaacttggcctctagcaccctgttgagggaaggtgccaaccgtgagatcctggggatcattgtttcctacaaagtgaaagtgaagctggtggtgtctcggggcggcgacgtggccgtggaactgcccttcaccctaatgcaccccaagcccaaagaggaacccccgcatcgggaagttccagagaacgagacgccagtagataccaatctcatagaacttgacacaaatgatgacgacattgtatttgaggactttgctcgccagagactgaaaggcatgaaggatgacaaggaggaagaggaggatggtaccggctctccacagctcaacaacagatagacgggccggccctgcctccacgtggctccggctccactctcgtgcactcggatgcttactcgtcttcttcctgttctggtttcttttcccctttgttcttccagtttctaccagggggccccgtgggcttccagatcacggtgatgaacctctggcctcaggattggccccacatcaccacgccaacaggaccacagcgcactggctccaccccatctctgccatctccactcccctccttttcatgctgtctcccagaaaagctgccagggctctggccttggaattggacttgagatggggagcagacaggggaggatggggaatgtgggacacggtgtggtgggcatgagggcttggaggggtggggatgagggctcaagacacgagagaagatgtccacggtcccaggtggttaacaaagttctggcagctaaaagatgaccgcgttgaaggccacctccttctggctgggaggggcagaactgtggacagattctcaatgcctttttgaagttctgacccaccaaagaccttctgccttcaccctcctccccacctgatgtccctctgtgtctgatagtgatgttggtgaaagttcgtagaccccaggagtagagaaaagcaactggactgactttcttaccagcagttacctagactgaggcaagctgtgtggactcacccaagtatatttcagtactgtcaggctgtgacatcttagctaccttgtatttcaagtgcatggccctgtctagagatatgcacagagagaaaagcagagggagggagggagggggtcttcagcaagcaccagcccccagcagagtgagctgaagctcctgaggagggttcccgaaggggggcgctcagagatgggggcagggggcggggagaggagagtctgccttatgtcccttccttgtggacttcacatggtcatgcaggaagtgaggatgggtgtccagcgggggccgaggccactagtatcctcctgcttccccctgccattctccagggctggactgaccctatggactgggagagagtgcctgaggccaccatgccacagtcaaagggggtcctatctcagaaggtggcagcatccactgagatatcctcacccgaagggaaggaggctgctgggtagcaaataagccccttcttttcttggtgagttgatgacctccaatagctcccagtgtcatgggtacccagtacgcattagctggtgttgggttgattgagacctggggcagttcctggggcaagaagccagatgggagatgagatagaaagtgttaggagttatcctctttgcctggcctttgagaataacttactgtgtgactttgggcaagttccttccccactctgggcctcagtttctcacttgggaaagcaaggagtttgaccagatgatcacaatgggccttcctagctctggccaccaagaatttgtgaacattagagctcctggtctggtgggtagagccagagctgctgactggtctctctgcctccagaggggatttattggacctcagaggtggcagggccctatggagcaccaactgccctcaaccccaccctgtgcccaagactgggaagggattgatgtcaggctgtggccataggtagcatgagttgcccaaggagggacagagcatatctttgctgaggcttggctgaggggcttatgatagggcttgcagtacctcacagccccctgtgggcacagacaccctgaggtttacccaggcaaatatattgattagcaggacaagggctctctcctcagtttctgctcccttccatctctctcccatacttgtctgaaaagggagacaaaaaatcttatacaagtggcatctc

SEQ ID NO: 9098 - protein, 405 aa, Homo sapiens; identical to SEQ ID NO: 9090

SEQ ID NO: 9099 - DNA, 3269 bp, Homo sapiens
gggagagctgagcctgcggggctggccctggcctggctgctgctgcctgcagcccccagctcaggctccctccacctcacagtccactgctttggcgctgcttctgggctggcctcttcactccactgaatctttgggctctcatctgtaaaatgggagtgttcaagaaggccagtccaaatggaaagctcaccgtctacctgggaaagcgggactttgtggaccacatcgacctcgtggaccctgtggatggtgtggtcctggtggatcctgagtatctcaaagagcggagagtctatgtgacgctgacctgcgccttccgctatggccgggaggacctggatgtcctgggcctgacctttcgcaaggacctgtttgtggccaacgtacagtcgttcccaccggcccccgaggacaagaagcccctgacgcggctgcaggaacgcctcatcaagaagctgggcgagcacgcttaccctttcacctttgagatccctccaaaccttccatgttctgtgacactgcagccggggcccgaagacacggggaaggcttgcggtgtggactatgaagtcaaagccttctgcgcggagaatttggaggagaagatccacaagcggaattctgtgcgtctggtcatccggaaggttcagtatgccccagagaggcctggcccccagcccacagccgagaccaccaggcagttcctcatgtcggacaagcccttgcacctagaagcctctctggataaggagatctattaccatggagaacccatcagcgtcaacgtccacgtcaccaacaacaccaacaagacggtgaagaagatcaagatctcagtgcgccagtatgcagacatctgccttttcaacacagctcagtacaagtgccctgttgccatggaagaggctgatgacactgtggcacccagctcgacgttctgcaaggtctacacactgacccccttcctagccaataaccgagagaagcggggcctcgccttggacgggaagctcaagcacgaagacacgaacttggcctctagcaccctgttgagggaaggtgccaaccgtgagatcctggggatcattgtttcctacaaagtgaaagtgaagctggtggtgtctcggggcggcctgttgggagatcttgcatccagcgacgtggccgtggaactgcccttcaccctaatgcaccccaagcccaaagaggaacccccgcatcgggaagttccagagaacgagacgccagtagataccaatctcatagaacttgacacaaatgatgacgacattgtatttgaggactttgctcgccagagactgaaaggcatgaaggatgacaaggaggaagaggaggatggtaccggctctccacagctcaacaacagatagacgggccggccctgcctccacgtggctccggctccactctcgtgcactcggatgcttactcgtcttcttcctgttctggtttcttttcccctttgttcttccagtttctaccagggggccccgtgggcttccagatcacggtgatgaacctctggcctcaggattggccccacatcaccacgccaacaggaccacagcgcactggctccaccccatctctgccatctccactcccctccttttcatgctgtctcccagaaaagctgccagggctctggccttggaattggacttgagatggggagcagacaggggaggatggggaatgtgggacacggtgtggtgggcatgagggcttggaggggtggggatgagggctcaagacacgagagaagatgtccacggtcccaggtggttaacaaagttctggcagctaaaagatgaccgcgttgaaggccacctccttctggctgggaggggcagaactgtggacagattctcaatgcctttttgaagttctgacccaccaaagaccttctgccttcaccctcctccccacctgatgtccctctgtgtctgatagtgatgttggtgaaagttcgtagaccccaggagtagagaaaagcaactggactgactttcttaccagcagttacctagactgaggcaagctgtgtggactcacccaagtatatttcagtactgtcaggctgtgacatcttagctaccttgtatttcaagtgcatggccctgtctagagatatgcacagagagaaaagcagagggagggagggagggggtcttcagcaagcaccagcccccagcagagtgagctgaagctcctgaggagggttcccgaaggggggcgctcagagatgggggcagggggcggggagaggagagtctgccttatgtcccttccttgtggacttcacatggtcatgcaggaagtgaggatgggtgtccagcgggggccgaggccactagtatcctcctgcttccccctgccattctccagggctggactgaccctatggactgggagagagtgcctgaggccaccatgccacagtcaaagggggtcctatctcagaaggtggcagcatccactgagatatcctcacccgaagggaaggaggctgctgggtagcaaataagccccttcttttcttggtgagttgatgacctccaatagctcccagtgtcatgggtacccagtacgcattagctggtgttgggttgattgagacctggggcagttcctggggcaagaagccagatgggagatgagatagaaagtgttaggagttatcctctttgcctggcctttgagaataacttactgtgtgactttgggcaagttccttccccactctgggcctcagtttctcacttgggaaagcaaggagtttgaccagatgatcacaatgggccttcctagctctggccaccaagaatttgtgaacattagagctcctggtctggtgggtagagccagagctgctgactggtctctctgcctccagaggggatttattggacctcagaggtggcagggccctatggagcaccaactgccctcaaccccaccctgtgcccaagactgggaagggattgatgtcaggctgtggccataggtagcatgagttgcccaaggagggacagagcatatctttgctgaggcttggctgaggggcttatgatagggcttgcagtacctcacagccccctgtgggcacagacaccctgaggtttacccaggcaaatatattgattagcaggacaagggctctctcctcagtttctgctcccttccatctctctcccatacttgtctgaaaagggagacaaaaaatcttatacaagtggcatctc

SEQ ID NO: 9100 - protein, 413 aa, Homo sapiens; identical to SEQ ID NO: 9088

SEQ ID NO: 9101 - DNA, 3427 bp, Homo sapiens
gcgctgccctgcctcgctgggcggcgcgcgcacacgcagacgcgcacacacacacacatacacacacgcacacaccccgcgcggttccacgcccctggccgcggcccgggcgctgcgctgctcgacgcggcgggcggcgggcggggaccgggggcgggggcggcggcggcggccgggagagcggaggaggcggagcagggagccgggagcgggctggcccgcgctcctcctgctggctggggattttccagcctgggcgctgacgccgcggacctccctgcgaccgtcgcggaccatgggcgacaaagggacccgagtgttcaagaaggccagtccaaatggaaagctcaccgtctacctgggaaagcgggactttgtggaccacatcgacctcgtggaccctgtggatggtgtggtcctggtggatcctgagtatctcaaagagcggagagtctatgtgacgctgacctgcgccttccgctatggccgggaggacctggatgtcctgggcctgacctttcgcaaggacctgtttgtggccaacgtacagtcgttcccaccggcccccgaggacaagaagcccctgacgcggctgcaggaacgcctcatcaagaagctgggcgagcacgcttaccctttcacctttgagatccctccaaaccttccatgttctgtgacactgcagccggggcccgaagacacggggaaggcttgcggtgtggactatgaagtcaaagccttctgcgcggagaatttggaggagaagatccacaagcggaattctgtgcgtctggtcatccggaaggttcagtatgccccagagaggcctggcccccagcccacagccgagaccaccaggcagttcctcatgtcggacaagcccttgcacctagaagcctctctggataaggagatctattaccatggagaacccatcagcgtcaacgtccacgtcaccaacaacaccaacaagacggtgaagaagatcaagatctcagtgcgccagtatgcagacatctgccttttcaacacagctcagtacaagtgccctgttgccatggaagaggctgatgacactgtggcacccagctcgacgttctgcaaggtctacacactgacccccttcctagccaataaccgagagaagcggggcctcgccttggacgggaagctcaagcacgaagacacgaacttggcctctagcaccctgttgagggaaggtgccaaccgtgagatcctggggatcattgtttcctacaaagtgaaagtgaagctggtggtgtctcggggcggcctgttgggagatcttgcatccagcgacgtggccgtggaactgcccttcaccctaatgcaccccaagcccaaagaggaacccccgcatcgggaagttccagagaacgagacgccagtagataccaatctcatagaacttgacacaaatgatgacgacattgtatttgaggactttgctcgccagagactgaaaggcatgaaggatgacaaggaggaagaggaggatggtaccggctctccacagctcaacaacagatagacgggccggccctgcctccacgtggctccggctccactctcgtgcactcggatgcttactcgtcttcttcctgttctggtttcttttcccctttgttcttccagtttctaccagggggccccgtgggcttccagatcacggtgatgaacctctggcctcaggattggccccacatcaccacgccaacaggaccacagcgcactggctccaccccatctctgccatctccactcccctccttttcatgctgtctcccagaaaagctgccagggctctggccttggaattggacttgagatggggagcagacaggggaggatggggaatgtgggacacggtgtggtgggcatgagggcttggaggggtggggatgagggctcaagacacgagagaagatgtccacggtcccaggtggttaacaaagttctggcagctaaaagatgaccgcgttgaaggccacctccttctggctgggaggggcagaactgtggacagattctcaatgcctttttgaagttctgacccaccaaagaccttctgccttcaccctcctccccacctgatgtccctctgtgtctgatagtgatgttggtgaaagttcgtagaccccaggagtagagaaaagcaactggactgactttcttaccagcagttacctagactgaggcaagctgtgtggactcacccaagtatatttcagtactgtcaggctgtgacatcttagctaccttgtatttcaagtgcatggccctgtctagagatatgcacagagagaaaagcagagggagggagggagggggtcttcagcaagcaccagcccccagcagagtgagctgaagctcctgaggagggttcccgaaggggggcgctcagagatgggggcagggggcggggagaggagagtctgccttatgtcccttccttgtggacttcacatggtcatgcaggaagtgaggatgggtgtccagcgggggccgaggccactagtatcctcctgcttccccctgccattctccagggctggactgaccctatggactgggagagagtgcctgaggccaccatgccacagtcaaagggggtcctatctcagaaggtggcagcatccactgagatatcctcacccgaagggaaggaggctgctgggtagcaaataagccccttcttttcttggtgagttgatgacctccaatagctcccagtgtcatgggtacccagtacgcattagctggtgttgggttgattgagacctggggcagttcctggggcaagaagccagatgggagatgagatagaaagtgttaggagttatcctctttgcctggcctttgagaataacttactgtgtgactttgggcaagttccttccccactctgggcctcagtttctcacttgggaaagcaaggagtttgaccagatgatcacaatgggccttcctagctctggccaccaagaatttgtgaacattagagctcctggtctggtgggtagagccagagctgctgactggtctctctgcctccagaggggatttattggacctcagaggtggcagggccctatggagcaccaactgccctcaaccccaccctgtgcccaagactgggaagggattgatgtcaggctgtggccataggtagcatgagttgcccaaggagggacagagcatatctttgctgaggcttggctgaggggcttatgatagggcttgcagtacctcacagccccctgtgggcacagacaccctgaggtttacccaggcaaatatattgattagcaggacaagggctctctcctcagtttctgctcccttccatctctctcccatacttgtctgaaaagggagacaaaaaatcttatacaagtggcatctc

SEQ ID NO: 9102 - protein, 418 aa, Homo sapiens; identical to SEQ ID NO: 1390

SEQ ID NO: 9103 - DNA, 3403 bp, Homo sapiens
gcgctgccctgcctcgctgggcggcgcgcgcacacgcagacgcgcacacacacacacatacacacacgcacacaccccgcgcggttccacgcccctggccgcggcccgggcgctgcgctgctcgacgcggcgggcggcgggcggggaccgggggcgggggcggcggcggcggccgggagagcggaggaggcggagcagggagccgggagcgggctggcccgcgctcctcctgctggctggggattttccagcctgggcgctgacgccgcggacctccctgcgaccgtcgcggaccatgggcgacaaagggacccgagtgttcaagaaggccagtccaaatggaaagctcaccgtctacctgggaaagcgggactttgtggaccacatcgacctcgtggaccctgtggatggtgtggtcctggtggatcctgagtatctcaaagagcggagagtctatgtgacgctgacctgcgccttccgctatggccgggaggacctggatgtcctgggcctgacctttcgcaaggacctgtttgtggccaacgtacagtcgttcccaccggcccccgaggacaagaagcccctgacgcggctgcaggaacgcctcatcaagaagctgggcgagcacgcttaccctttcacctttgagatccctccaaaccttccatgttctgtgacactgcagccggggcccgaagacacggggaaggcttgcggtgtggactatgaagtcaaagccttctgcgcggagaatttggaggagaagatccacaagcggaattctgtgcgtctggtcatccggaaggttcagtatgccccagagaggcctggcccccagcccacagccgagaccaccaggcagttcctcatgtcggacaagcccttgcacctagaagcctctctggataaggagatctattaccatggagaacccatcagcgtcaacgtccacgtcaccaacaacaccaacaagacggtgaagaagatcaagatctcagtgcgccagtatgcagacatctgccttttcaacacagctcagtacaagtgccctgttgccatggaagaggctgatgacactgtggcacccagctcgacgttctgcaaggtctacacactgacccccttcctagccaataaccgagagaagcggggcctcgccttggacgggaagctcaagcacgaagacacgaacttggcctctagcaccctgttgagggaaggtgccaaccgtgagatcctggggatcattgtttcctacaaagtgaaagtgaagctggtggtgtctcggggcggcgacgtggccgtggaactgcccttcaccctaatgcaccccaagcccaaagaggaacccccgcatcgggaagttccagagaacgagacgccagtagataccaatctcatagaacttgacacaaatgatgacgacattgtatttgaggactttgctcgccagagactgaaaggcatgaaggatgacaaggaggaagaggaggatggtaccggctctccacagctcaacaacagatagacgggccggccctgcctccacgtggctccggctccactctcgtgcactcggatgcttactcgtcttcttcctgttctggtttcttttcccctttgttcttccagtttctaccagggggccccgtgggcttccagatcacggtgatgaacctctggcctcaggattggccccacatcaccacgccaacaggaccacagcgcactggctccaccccatctctgccatctccactcccctccttttcatgctgtctcccagaaaagctgccagggctctggccttggaattggacttgagatggggagcagacaggggaggatggggaatgtgggacacggtgtggtgggcatgagggcttggaggggtggggatgagggctcaagacacgagagaagatgtccacggtcccaggtggttaacaaagttctggcagctaaaagatgaccgcgttgaaggccacctccttctggctgggaggggcagaactgtggacagattctcaatgcctttttgaagttctgacccaccaaagaccttctgccttcaccctcctccccacctgatgtccctctgtgtctgatagtgatgttggtgaaagttcgtagaccccaggagtagagaaaagcaactggactgactttcttaccagcagttacctagactgaggcaagctgtgtggactcacccaagtatatttcagtactgtcaggctgtgacatcttagctaccttgtatttcaagtgcatggccctgtctagagatatgcacagagagaaaagcagagggagggagggagggggtcttcagcaagcaccagcccccagcagagtgagctgaagctcctgaggagggttcccgaaggggggcgctcagagatgggggcagggggcggggagaggagagtctgccttatgtcccttccttgtggacttcacatggtcatgcaggaagtgaggatgggtgtccagcgggggccgaggccactagtatcctcctgcttccccctgccattctccagggctggactgaccctatggactgggagagagtgcctgaggccaccatgccacagtcaaagggggtcctatctcagaaggtggcagcatccactgagatatcctcacccgaagggaaggaggctgctgggtagcaaataagccccttcttttcttggtgagttgatgacctccaatagctcccagtgtcatgggtacccagtacgcattagctggtgttgggttgattgagacctggggcagttcctggggcaagaagccagatgggagatgagatagaaagtgttaggagttatcctctttgcctggcctttgagaataacttactgtgtgactttgggcaagttccttccccactctgggcctcagtttctcacttgggaaagcaaggagtttgaccagatgatcacaatgggccttcctagctctggccaccaagaatttgtgaacattagagctcctggtctggtgggtagagccagagctgctgactggtctctctgcctccagaggggatttattggacctcagaggtggcagggccctatggagcaccaactgccctcaaccccaccctgtgcccaagactgggaagggattgatgtcaggctgtggccataggtagcatgagttgcccaaggagggacagagcatatctttgctgaggcttggctgaggggcttatgatagggcttgcagtacctcacagccccctgtgggcacagacaccctgaggtttacccaggcaaatatattgattagcaggacaagggctctctcctcagtttctgctcccttccatctctctcccatacttgtctgaaaagggagacaaaaaatcttatacaagtggcatctc

SEQ ID NO: 9104 - protein, 410 aa, Homo sapiens; identical to SEQ ID NO: 1392

SEQ ID NO: 9105 - DNA, 3152 bp, Homo sapiens
gggagagctgagcctgcggggctggccctggcctggctgctgctgcctgcagcccccagctcaggctccctccacctcacagtccactgctttggcgctgcttctgggctggcctcttcactccactgaatctttgggctctcatctgtaaaatgggagtgttcaagaaggccagtccaaatggaaagctcaccgtctacctgggaaagcgggactttgtggaccacatcgacctcgtggaccctgtggatggtgtggtcctggtggatcctgagtatctcaaagagcggagagtctatgtgacgctgacctgcgccttccgctatggccgggaggacctggatgtcctgggcctgacctttcgcaaggacctgtttgtggccaacgtacagtcgttcccaccggcccccgaggacaagaagcccctgacgcggctgcaggaacgcctcatcaagaagctgggcgagcacgcttaccctttcacctttgagatccctccaaaccttccatgttctgtgacactgcagccggggcccgaagacacggggaaggcttgcggtgtggactatgaagtcaaagccttctgcgcggagaatttggaggagaagatccacaagcggaattctgtgcgtctggtcatccggaaggttcagtatgccccagagaggcctggcccccagcccacagccgagaccaccaggcagttcctcatgtcggacaagcccttgcacctagaagcctctctggataaggagatctattaccatggagaacccatcagcgtcaacgtccacgtcaccaacaacaccaacaagacggtgaagaagatcaagatctcagtgcgccagtatgcagacatctgccttttcaacacagctcagtacaagtgccctgttgccatggaagaggctgatgacactgtggcacccagctcgacgttctgcaaggtctacacactgacccccttcctagccaataaccgagagaagcggggcctcgccttggacgggaagctcaagcacgaagacacgaacttggcctctagcaccctgttgagggaaggtgccaaccgtgagatcctggggatcattgtttcctacaaagtgaaagtgaagctggtggtgtctcggggcggcgacgtggccgtggaactgcccttcaccctaatgcaccccaagcccaaagaggaacccccgcatcgggaagttccagagaacgagacgccagtagataccaatctcatagaacttgacacaaatgatgacgacattgtatttgaggactttgctcgccagagactgaaaggcatgaaggatgacaaggaggaagaggaggatggtaccggctctccacagctcaacaacagatagacgggccggccctgcctccacgtggctccggctccactctcgtgcactcggatgcttactcgtcttcttcctgttctggtttcttttcccctttgttcttccagtttctaccagggggccccgtgggcttccagatcacggtgatgaacctctggcctcaggattggccccacatcaccacgccaacaggaccacagcgcactggctccaccccatctctgccatctccactcccctccttttcatgctgtctcccagaaaagctgccagggctctggccttggaattggacttgagatggggagcagacaggggaggatggggaatgtgggacacggtgtggtgggcatgagggcttggaggggtggggatgagggctcaagacacgagagaagatgtccacggtcccaggtggttaacaaagttctggcagctaaaagatgaccgcgttgaaggccacctccttctggctgggaggggcagaactgtggacagattctcaatgcctttttgaagttctgacccaccaaagaccttctgccttcaccctcctccccacctgatgtccctctgtgtctgatagtgatgttggtgaaagttcgtagaccccaggagtagagaaaagcaactggactgactttcttaccagcagttacctagactgaggcaagctgtgtggactcacccaagtatatttcagtactgtcaggctgtgacatcttagctaccttgtatttcaagtgcatggccctgtctagagatatgcacagagagaaaagcagagggagggagggagggggtcttcagcaagcaccagcccccagcagagtgagctgaagctcctgaggagggttcccgaaggggggcgctcagagatgggggcagggggcggggagaggagagtctgccttatgtcccttccttgtggacttcacatggtcatgcaggaagtgaggatgggtgtccagcgggggccgaggccactagtatcctcctgcttccccctgccattctccagggctggactgaccctatggactgggagagagtgcctgaggccaccatgccacagtcaaagggggtcctatctcagaaggtggcagcatccactgagatatcctcacccgaagggaaggaggctgctgggtagcaaataagccccttcttttcttggtgagttgatgacctccaatagctcccagtgtcatgggtacccagtacgcattagctggtgttgggttgattgagacctggggcagttcctggggcaagaagccagatgggagatgagatagaaagtgttaggagttatcctctttgcctggcctttgagaataacttactgtgtgactttgggcaagttccttccccactctgggcctcagtttctcacttgggaaagcaaggagtttgaccagatgatcacaatgggccttcctagctctggccaccaagaatttgtgaacattagagctcctggtctggtgggtagagccagagctgctgactggtctctctgcctccagaggggatttattggacctcagaggtggcagggccctatggagcaccaactgccctcaaccccaccctgtgcccaagactgggaagggattgatgtcaggctgtggccataggtagcatgagttgcccaaggagggacagagcatatctttgctgaggcttggctgaggggcttatgatagggcttgcagtacctcacagccccctgtgggcacagacaccctgaggtttacccaggcaaatatattgattagcagg

SEQ ID NO: 9106 - protein, 405 aa, Homo sapiens; identical to SEQ ID NO: 9090

SEQ ID NO: 9107 - DNA, 3176 bp, Homo sapiens
gggagagctgagcctgcggggctggccctggcctggctgctgctgcctgcagcccccagctcaggctccctccacctcacagtccactgctttggcgctgcttctgggctggcctcttcactccactgaatctttgggctctcatctgtaaaatgggagtgttcaagaaggccagtccaaatggaaagctcaccgtctacctgggaaagcgggactttgtggaccacatcgacctcgtggaccctgtggatggtgtggtcctggtggatcctgagtatctcaaagagcggagagtctatgtgacgctgacctgcgccttccgctatggccgggaggacctggatgtcctgggcctgacctttcgcaaggacctgtttgtggccaacgtacagtcgttcccaccggcccccgaggacaagaagcccctgacgcggctgcaggaacgcctcatcaagaagctgggcgagcacgcttaccctttcacctttgagatccctccaaaccttccatgttctgtgacactgcagccggggcccgaagacacggggaaggcttgcggtgtggactatgaagtcaaagccttctgcgcggagaatttggaggagaagatccacaagcggaattctgtgcgtctggtcatccggaaggttcagtatgccccagagaggcctggcccccagcccacagccgagaccaccaggcagttcctcatgtcggacaagcccttgcacctagaagcctctctggataaggagatctattaccatggagaacccatcagcgtcaacgtccacgtcaccaacaacaccaacaagacggtgaagaagatcaagatctcagtgcgccagtatgcagacatctgccttttcaacacagctcagtacaagtgccctgttgccatggaagaggctgatgacactgtggcacccagctcgacgttctgcaaggtctacacactgacccccttcctagccaataaccgagagaagcggggcctcgccttggacgggaagctcaagcacgaagacacgaacttggcctctagcaccctgttgagggaaggtgccaaccgtgagatcctggggatcattgtttcctacaaagtgaaagtgaagctggtggtgtctcggggcggcctgttgggagatcttgcatccagcgacgtggccgtggaactgcccttcaccctaatgcaccccaagcccaaagaggaacccccgcatcgggaagttccagagaacgagacgccagtagataccaatctcatagaacttgacacaaatgatgacgacattgtatttgaggactttgctcgccagagactgaaaggcatgaaggatgacaaggaggaagaggaggatggtaccggctctccacagctcaacaacagatagacgggccggccctgcctccacgtggctccggctccactctcgtgcactcggatgcttactcgtcttcttcctgttctggtttcttttcccctttgttcttccagtttctaccagggggccccgtgggcttccagatcacggtgatgaacctctggcctcaggattggccccacatcaccacgccaacaggaccacagcgcactggctccaccccatctctgccatctccactcccctccttttcatgctgtctcccagaaaagctgccagggctctggccttggaattggacttgagatggggagcagacaggggaggatggggaatgtgggacacggtgtggtgggcatgagggcttggaggggtggggatgagggctcaagacacgagagaagatgtccacggtcccaggtggttaacaaagttctggcagctaaaagatgaccgcgttgaaggccacctccttctggctgggaggggcagaactgtggacagattctcaatgcctttttgaagttctgacccaccaaagaccttctgccttcaccctcctccccacctgatgtccctctgtgtctgatagtgatgttggtgaaagttcgtagaccccaggagtagagaaaagcaactggactgactttcttaccagcagttacctagactgaggcaagctgtgtggactcacccaagtatatttcagtactgtcaggctgtgacatcttagctaccttgtatttcaagtgcatggccctgtctagagatatgcacagagagaaaagcagagggagggagggagggggtcttcagcaagcaccagcccccagcagagtgagctgaagctcctgaggagggttcccgaaggggggcgctcagagatgggggcagggggcggggagaggagagtctgccttatgtcccttccttgtggacttcacatggtcatgcaggaagtgaggatgggtgtccagcgggggccgaggccactagtatcctcctgcttccccctgccattctccagggctggactgaccctatggactgggagagagtgcctgaggccaccatgccacagtcaaagggggtcctatctcagaaggtggcagcatccactgagatatcctcacccgaagggaaggaggctgctgggtagcaaataagccccttcttttcttggtgagttgatgacctccaatagctcccagtgtcatgggtacccagtacgcattagctggtgttgggttgattgagacctggggcagttcctggggcaagaagccagatgggagatgagatagaaagtgttaggagttatcctctttgcctggcctttgagaataacttactgtgtgactttgggcaagttccttccccactctgggcctcagtttctcacttgggaaagcaaggagtttgaccagatgatcacaatgggccttcctagctctggccaccaagaatttgtgaacattagagctcctggtctggtgggtagagccagagctgctgactggtctctctgcctccagaggggatttattggacctcagaggtggcagggccctatggagcaccaactgccctcaaccccaccctgtgcccaagactgggaagggattgatgtcaggctgtggccataggtagcatgagttgcccaaggagggacagagcatatctttgctgaggcttggctgaggggcttatgatagggcttgcagtacctcacagccccctgtgggcacagacaccctgaggtttacccaggcaaatatattgattagcagg

SEQ ID NO: 9108 - protein, 413 aa, Homo sapiens; identical to SEQ ID NO: 9088

SEQ ID NO: 9109 - DNA, 3310 bp, Homo sapiens
gcgctgccctgcctcgctgggcggcgcgcgcacacgcagacgcgcacacacacacacatacacacacgcacacaccccgcgcggttccacgcccctggccgcggcccgggcgctgcgctgctcgacgcggcgggcggcgggcggggaccgggggcgggggcggcggcggcggccgggagagcggaggaggcggagcagggagccgggagcgggctggcccgcgctcctcctgctggctggggattttccagcctgggcgctgacgccgcggacctccctgcgaccgtcgcggaccatgggcgacaaagggacccgagtgttcaagaaggccagtccaaatggaaagctcaccgtctacctgggaaagcgggactttgtggaccacatcgacctcgtggaccctgtggatggtgtggtcctggtggatcctgagtatctcaaagagcggagagtctatgtgacgctgacctgcgccttccgctatggccgggaggacctggatgtcctgggcctgacctttcgcaaggacctgtttgtggccaacgtacagtcgttcccaccggcccccgaggacaagaagcccctgacgcggctgcaggaacgcctcatcaagaagctgggcgagcacgcttaccctttcacctttgagatccctccaaaccttccatgttctgtgacactgcagccggggcccgaagacacggggaaggcttgcggtgtggactatgaagtcaaagccttctgcgcggagaatttggaggagaagatccacaagcggaattctgtgcgtctggtcatccggaaggttcagtatgccccagagaggcctggcccccagcccacagccgagaccaccaggcagttcctcatgtcggacaagcccttgcacctagaagcctctctggataaggagatctattaccatggagaacccatcagcgtcaacgtccacgtcaccaacaacaccaacaagacggtgaagaagatcaagatctcagtgcgccagtatgcagacatctgccttttcaacacagctcagtacaagtgccctgttgccatggaagaggctgatgacactgtggcacccagctcgacgttctgcaaggtctacacactgacccccttcctagccaataaccgagagaagcggggcctcgccttggacgggaagctcaagcacgaagacacgaacttggcctctagcaccctgttgagggaaggtgccaaccgtgagatcctggggatcattgtttcctacaaagtgaaagtgaagctggtggtgtctcggggcggcgacgtggccgtggaactgcccttcaccctaatgcaccccaagcccaaagaggaacccccgcatcgggaagttccagagaacgagacgccagtagataccaatctcatagaacttgacacaaatgatgacgacattgtatttgaggactttgctcgccagagactgaaaggcatgaaggatgacaaggaggaagaggaggatggtaccggctctccacagctcaacaacagatagacgggccggccctgcctccacgtggctccggctccactctcgtgcactcggatgcttactcgtcttcttcctgttctggtttcttttcccctttgttcttccagtttctaccagggggccccgtgggcttccagatcacggtgatgaacctctggcctcaggattggccccacatcaccacgccaacaggaccacagcgcactggctccaccccatctctgccatctccactcccctccttttcatgctgtctcccagaaaagctgccagggctctggccttggaattggacttgagatggggagcagacaggggaggatggggaatgtgggacacggtgtggtgggcatgagggcttggaggggtggggatgagggctcaagacacgagagaagatgtccacggtcccaggtggttaacaaagttctggcagctaaaagatgaccgcgttgaaggccacctccttctggctgggaggggcagaactgtggacagattctcaatgcctttttgaagttctgacccaccaaagaccttctgccttcaccctcctccccacctgatgtccctctgtgtctgatagtgatgttggtgaaagttcgtagaccccaggagtagagaaaagcaactggactgactttcttaccagcagttacctagactgaggcaagctgtgtggactcacccaagtatatttcagtactgtcaggctgtgacatcttagctaccttgtatttcaagtgcatggccctgtctagagatatgcacagagagaaaagcagagggagggagggagggggtcttcagcaagcaccagcccccagcagagtgagctgaagctcctgaggagggttcccgaaggggggcgctcagagatgggggcagggggcggggagaggagagtctgccttatgtcccttccttgtggacttcacatggtcatgcaggaagtgaggatgggtgtccagcgggggccgaggccactagtatcctcctgcttccccctgccattctccagggctggactgaccctatggactgggagagagtgcctgaggccaccatgccacagtcaaagggggtcctatctcagaaggtggcagcatccactgagatatcctcacccgaagggaaggaggctgctgggtagcaaataagccccttcttttcttggtgagttgatgacctccaatagctcccagtgtcatgggtacccagtacgcattagctggtgttgggttgattgagacctggggcagttcctggggcaagaagccagatgggagatgagatagaaagtgttaggagttatcctctttgcctggcctttgagaataacttactgtgtgactttgggcaagttccttccccactctgggcctcagtttctcacttgggaaagcaaggagtttgaccagatgatcacaatgggccttcctagctctggccaccaagaatttgtgaacattagagctcctggtctggtgggtagagccagagctgctgactggtctctctgcctccagaggggatttattggacctcagaggtggcagggccctatggagcaccaactgccctcaaccccaccctgtgcccaagactgggaagggattgatgtcaggctgtggccataggtagcatgagttgcccaaggagggacagagcatatctttgctgaggcttggctgaggggcttatgatagggcttgcagtacctcacagccccctgtgggcacagacaccctgaggtttacccaggcaaatatattgattagcagg

SEQ ID NO: 9110 - protein, 410 aa, Homo sapiens; identical to SEQ ID NO: 1392

SEQ ID NO: 9111 - DNA, 3334 bp, Homo sapiens
gcgctgccctgcctcgctgggcggcgcgcgcacacgcagacgcgcacacacacacacatacacacacgcacacaccccgcgcggttccacgcccctggccgcggcccgggcgctgcgctgctcgacgcggcgggcggcgggcggggaccgggggcgggggcggcggcggcggccgggagagcggaggaggcggagcagggagccgggagcgggctggcccgcgctcctcctgctggctggggattttccagcctgggcgctgacgccgcggacctccctgcgaccgtcgcggaccatgggcgacaaagggacccgagtgttcaagaaggccagtccaaatggaaagctcaccgtctacctgggaaagcgggactttgtggaccacatcgacctcgtggaccctgtggatggtgtggtcctggtggatcctgagtatctcaaagagcggagagtctatgtgacgctgacctgcgccttccgctatggccgggaggacctggatgtcctgggcctgacctttcgcaaggacctgtttgtggccaacgtacagtcgttcccaccggcccccgaggacaagaagcccctgacgcggctgcaggaacgcctcatcaagaagctgggcgagcacgcttaccctttcacctttgagatccctccaaaccttccatgttctgtgacactgcagccggggcccgaagacacggggaaggcttgcggtgtggactatgaagtcaaagccttctgcgcggagaatttggaggagaagatccacaagcggaattctgtgcgtctggtcatccggaaggttcagtatgccccagagaggcctggcccccagcccacagccgagaccaccaggcagttcctcatgtcggacaagcccttgcacctagaagcctctctggataaggagatctattaccatggagaacccatcagcgtcaacgtccacgtcaccaacaacaccaacaagacggtgaagaagatcaagatctcagtgcgccagtatgcagacatctgccttttcaacacagctcagtacaagtgccctgttgccatggaagaggctgatgacactgtggcacccagctcgacgttctgcaaggtctacacactgacccccttcctagccaataaccgagagaagcggggcctcgccttggacgggaagctcaagcacgaagacacgaacttggcctctagcaccctgttgagggaaggtgccaaccgtgagatcctggggatcattgtttcctacaaagtgaaagtgaagctggtggtgtctcggggcggcctgttgggagatcttgcatccagcgacgtggccgtggaactgcccttcaccctaatgcaccccaagcccaaagaggaacccccgcatcgggaagttccagagaacgagacgccagtagataccaatctcatagaacttgacacaaatgatgacgacattgtatttgaggactttgctcgccagagactgaaaggcatgaaggatgacaaggaggaagaggaggatggtaccggctctccacagctcaacaacagatagacgggccggccctgcctccacgtggctccggctccactctcgtgcactcggatgcttactcgtcttcttcctgttctggtttcttttcccctttgttcttccagtttctaccagggggccccgtgggcttccagatcacggtgatgaacctctggcctcaggattggccccacatcaccacgccaacaggaccacagcgcactggctccaccccatctctgccatctccactcccctccttttcatgctgtctcccagaaaagctgccagggctctggccttggaattggacttgagatggggagcagacaggggaggatggggaatgtgggacacggtgtggtgggcatgagggcttggaggggtggggatgagggctcaagacacgagagaagatgtccacggtcccaggtggttaacaaagttctggcagctaaaagatgaccgcgttgaaggccacctccttctggctgggaggggcagaactgtggacagattctcaatgcctttttgaagttctgacccaccaaagaccttctgccttcaccctcctccccacctgatgtccctctgtgtctgatagtgatgttggtgaaagttcgtagaccccaggagtagagaaaagcaactggactgactttcttaccagcagttacctagactgaggcaagctgtgtggactcacccaagtatatttcagtactgtcaggctgtgacatcttagctaccttgtatttcaagtgcatggccctgtctagagatatgcacagagagaaaagcagagggagggagggagggggtcttcagcaagcaccagcccccagcagagtgagctgaagctcctgaggagggttcccgaaggggggcgctcagagatgggggcagggggcggggagaggagagtctgccttatgtcccttccttgtggacttcacatggtcatgcaggaagtgaggatgggtgtccagcgggggccgaggccactagtatcctcctgcttccccctgccattctccagggctggactgaccctatggactgggagagagtgcctgaggccaccatgccacagtcaaagggggtcctatctcagaaggtggcagcatccactgagatatcctcacccgaagggaaggaggctgctgggtagcaaataagccccttcttttcttggtgagttgatgacctccaatagctcccagtgtcatgggtacccagtacgcattagctggtgttgggttgattgagacctggggcagttcctggggcaagaagccagatgggagatgagatagaaagtgttaggagttatcctctttgcctggcctttgagaataacttactgtgtgactttgggcaagttccttccccactctgggcctcagtttctcacttgggaaagcaaggagtttgaccagatgatcacaatgggccttcctagctctggccaccaagaatttgtgaacattagagctcctggtctggtgggtagagccagagctgctgactggtctctctgcctccagaggggatttattggacctcagaggtggcagggccctatggagcaccaactgccctcaaccccaccctgtgcccaagactgggaagggattgatgtcaggctgtggccataggtagcatgagttgcccaaggagggacagagcatatctttgctgaggcttggctgaggggcttatgatagggcttgcagtacctcacagccccctgtgggcacagacaccctgaggtttacccaggcaaatatattgattagcagg

SEQ ID NO: 9112 - protein, 418 aa, Homo sapiens; identical to SEQ ID NO: 1390

SEQ ID NO: 9113 - DNA, 2092 bp, Homo sapiens
gggagagctgagcctgcggggctggccctggcctggctgctgctgcctgcagcccccagctcaggctccctccacctcacagtccactgctttggcgctgcttctgggctggcctcttcactccactgaatctttgggctctcatctgtaaaatgggagtgttcaagaaggccagtccaaatggaaagctcaccgtctacctgggaaagcgggactttgtggaccacatcgacctcgtggaccctgtggatggtgtggtcctggtggatcctgagtatctcaaagagcggagagtctatgtgacgctgacctgcgccttccgctatggccgggaggacctggatgtcctgggcctgacctttcgcaaggacctgtttgtggccaacgtacagtcgttcccaccggcccccgaggacaagaagcccctgacgcggctgcaggaacgcctcatcaagaagctgggcgagcacgcttaccctttcacctttgagatccctccaaaccttccatgttctgtgacactgcagccggggcccgaagacacggggaaggcttgcggtgtggactatgaagtcaaagccttctgcgcggagaatttggaggagaagatccacaagcggaattctgtgcgtctggtcatccggaaggttcagtatgccccagagaggcctggcccccagcccacagccgagaccaccaggcagttcctcatgtcggacaagcccttgcacctagaagcctctctggataaggagatctattaccatggagaacccatcagcgtcaacgtccacgtcaccaacaacaccaacaagacggtgaagaagatcaagatctcagtgcgccagtatgcagacatctgccttttcaacacagctcagtacaagtgccctgttgccatggaagaggctgatgacactgtggcacccagctcgacgttctgcaaggtctacacactgacccccttcctagccaataaccgagagaagcggggcctcgccttggacgggaagctcaagcacgaagacacgaacttggcctctagcaccctgttgagggaaggtgccaaccgtgagatcctggggatcattgtttcctacaaagtgaaagtgaagctggtggtgtctcggggcggcgacgtggccgtggaactgcccttcaccctaatgcaccccaagcccaaagaggaacccccgcatcgggaagttccagagaacgagacgccagtagataccaatctcatagaacttgacacaaatgatgacgacattgtatttgaggactttgctcgccagagactgaaaggcatgaaggatgacaaggaggaagaggaggatggtaccggctctccacagctcaacaacagatagacgggccggccctgcctccacgtggctccggctccactctcgtgcactcggatgcttactcgtcttcttcctgttctggtttcttttcccctttgttcttccagtttctaccagggggccccgtgggcttccagatcacggtgatgaacctctggcctcaggattggccccacatcaccacgccaacaggaccacagcgcactggctccaccccatctctgccatctccactcccctccttttcatgctgtctcccagaaaagctgccagggctctggccttggaattggacttgagatggggagcagacaggggaggatggggaatgtgggacacggtgtggtgggcatgagggcttggaggggtggggatgagggctcaagacacgagagaagatgtccacggtcccaggtggttaacaaagttctggcagctaaaagatgaccgcgttgaaggccacctccttctggctgggaggggcagaactgtggacagattctcaatgcctttttgaagttctgacccaccaaagaccttctgccttcaccctcctccccacctgatgtccctctgtgtctgatagtgatgttggtgaaagttcgtagaccccaggagtagagaaaagcaactggactgactttcttaccagcagttacctagactgaggcaagctgtgtggactcacccaagtatatttcagtactgtcaggctgtgacatctt

SEQ ID NO: 9114 - protein, 405 aa, Homo sapiens; identical to SEQ ID NO: 9090

SEQ ID NO: 9115 - DNA, 2116 bp, Homo sapiens
gggagagctgagcctgcggggctggccctggcctggctgctgctgcctgcagcccccagctcaggctccctccacctcacagtccactgctttggcgctgcttctgggctggcctcttcactccactgaatctttgggctctcatctgtaaaatgggagtgttcaagaaggccagtccaaatggaaagctcaccgtctacctgggaaagcgggactttgtggaccacatcgacctcgtggaccctgtggatggtgtggtcctggtggatcctgagtatctcaaagagcggagagtctatgtgacgctgacctgcgccttccgctatggccgggaggacctggatgtcctgggcctgacctttcgcaaggacctgtttgtggccaacgtacagtcgttcccaccggcccccgaggacaagaagcccctgacgcggctgcaggaacgcctcatcaagaagctgggcgagcacgcttaccctttcacctttgagatccctccaaaccttccatgttctgtgacactgcagccggggcccgaagacacggggaaggcttgcggtgtggactatgaagtcaaagccttctgcgcggagaatttggaggagaagatccacaagcggaattctgtgcgtctggtcatccggaaggttcagtatgccccagagaggcctggcccccagcccacagccgagaccaccaggcagttcctcatgtcggacaagcccttgcacctagaagcctctctggataaggagatctattaccatggagaacccatcagcgtcaacgtccacgtcaccaacaacaccaacaagacggtgaagaagatcaagatctcagtgcgccagtatgcagacatctgccttttcaacacagctcagtacaagtgccctgttgccatggaagaggctgatgacactgtggcacccagctcgacgttctgcaaggtctacacactgacccccttcctagccaataaccgagagaagcggggcctcgccttggacgggaagctcaagcacgaagacacgaacttggcctctagcaccctgttgagggaaggtgccaaccgtgagatcctggggatcattgtttcctacaaagtgaaagtgaagctggtggtgtctcggggcggcctgttgggagatcttgcatccagcgacgtggccgtggaactgcccttcaccctaatgcaccccaagcccaaagaggaacccccgcatcgggaagttccagagaacgagacgccagtagataccaatctcatagaacttgacacaaatgatgacgacattgtatttgaggactttgctcgccagagactgaaaggcatgaaggatgacaaggaggaagaggaggatggtaccggctctccacagctcaacaacagatagacgggccggccctgcctccacgtggctccggctccactctcgtgcactcggatgcttactcgtcttcttcctgttctggtttcttttcccctttgttcttccagtttctaccagggggccccgtgggcttccagatcacggtgatgaacctctggcctcaggattggccccacatcaccacgccaacaggaccacagcgcactggctccaccccatctctgccatctccactcccctccttttcatgctgtctcccagaaaagctgccagggctctggccttggaattggacttgagatggggagcagacaggggaggatggggaatgtgggacacggtgtggtgggcatgagggcttggaggggtggggatgagggctcaagacacgagagaagatgtccacggtcccaggtggttaacaaagttctggcagctaaaagatgaccgcgttgaaggccacctccttctggctgggaggggcagaactgtggacagattctcaatgcctttttgaagttctgacccaccaaagaccttctgccttcaccctcctccccacctgatgtccctctgtgtctgatagtgatgttggtgaaagttcgtagaccccaggagtagagaaaagcaactggactgactttcttaccagcagttacctagactgaggcaagctgtgtggactcacccaagtatatttcagtactgtcaggctgtgacatctt

SEQ ID NO: 9116 - protein, 413 aa, Homo sapiens; identical to SEQ ID NO: 9088

SEQ ID NO: 9117 - DNA, 2250 bp, Homo sapiens
gcgctgccctgcctcgctgggcggcgcgcgcacacgcagacgcgcacacacacacacatacacacacgcacacaccccgcgcggttccacgcccctggccgcggcccgggcgctgcgctgctcgacgcggcgggcggcgggcggggaccgggggcgggggcggcggcggcggccgggagagcggaggaggcggagcagggagccgggagcgggctggcccgcgctcctcctgctggctggggattttccagcctgggcgctgacgccgcggacctccctgcgaccgtcgcggaccatgggcgacaaagggacccgagtgttcaagaaggccagtccaaatggaaagctcaccgtctacctgggaaagcgggactttgtggaccacatcgacctcgtggaccctgtggatggtgtggtcctggtggatcctgagtatctcaaagagcggagagtctatgtgacgctgacctgcgccttccgctatggccgggaggacctggatgtcctgggcctgacctttcgcaaggacctgtttgtggccaacgtacagtcgttcccaccggcccccgaggacaagaagcccctgacgcggctgcaggaacgcctcatcaagaagctgggcgagcacgcttaccctttcacctttgagatccctccaaaccttccatgttctgtgacactgcagccggggcccgaagacacggggaaggcttgcggtgtggactatgaagtcaaagccttctgcgcggagaatttggaggagaagatccacaagcggaattctgtgcgtctggtcatccggaaggttcagtatgccccagagaggcctggcccccagcccacagccgagaccaccaggcagttcctcatgtcggacaagcccttgcacctagaagcctctctggataaggagatctattaccatggagaacccatcagcgtcaacgtccacgtcaccaacaacaccaacaagacggtgaagaagatcaagatctcagtgcgccagtatgcagacatctgccttttcaacacagctcagtacaagtgccctgttgccatggaagaggctgatgacactgtggcacccagctcgacgttctgcaaggtctacacactgacccccttcctagccaataaccgagagaagcggggcctcgccttggacgggaagctcaagcacgaagacacgaacttggcctctagcaccctgttgagggaaggtgccaaccgtgagatcctggggatcattgtttcctacaaagtgaaagtgaagctggtggtgtctcggggcggcgacgtggccgtggaactgcccttcaccctaatgcaccccaagcccaaagaggaacccccgcatcgggaagttccagagaacgagacgccagtagataccaatctcatagaacttgacacaaatgatgacgacattgtatttgaggactttgctcgccagagactgaaaggcatgaaggatgacaaggaggaagaggaggatggtaccggctctccacagctcaacaacagatagacgggccggccctgcctccacgtggctccggctccactctcgtgcactcggatgcttactcgtcttcttcctgttctggtttcttttcccctttgttcttccagtttctaccagggggccccgtgggcttccagatcacggtgatgaacctctggcctcaggattggccccacatcaccacgccaacaggaccacagcgcactggctccaccccatctctgccatctccactcccctccttttcatgctgtctcccagaaaagctgccagggctctggccttggaattggacttgagatggggagcagacaggggaggatggggaatgtgggacacggtgtggtgggcatgagggcttggaggggtggggatgagggctcaagacacgagagaagatgtccacggtcccaggtggttaacaaagttctggcagctaaaagatgaccgcgttgaaggccacctccttctggctgggaggggcagaactgtggacagattctcaatgcctttttgaagttctgacccaccaaagaccttctgccttcaccctcctccccacctgatgtccctctgtgtctgatagtgatgttggtgaaagttcgtagaccccaggagtagagaaaagcaactggactgactttcttaccagcagttacctagactgaggcaagctgtgtggactcacccaagtatatttcagtactgtcaggctgtgacatctt

SEQ ID NO: 9118 - protein, 410 aa, Homo sapiens; identical to SEQ ID NO: 1392

SEQ ID NO: 9119 - DNA, 2274 bp, Homo sapiens
gcgctgccctgcctcgctgggcggcgcgcgcacacgcagacgcgcacacacacacacatacacacacgcacacaccccgcgcggttccacgcccctggccgcggcccgggcgctgcgctgctcgacgcggcgggcggcgggcggggaccgggggcgggggcggcggcggcggccgggagagcggaggaggcggagcagggagccgggagcgggctggcccgcgctcctcctgctggctggggattttccagcctgggcgctgacgccgcggacctccctgcgaccgtcgcggaccatgggcgacaaagggacccgagtgttcaagaaggccagtccaaatggaaagctcaccgtctacctgggaaagcgggactttgtggaccacatcgacctcgtggaccctgtggatggtgtggtcctggtggatcctgagtatctcaaagagcggagagtctatgtgacgctgacctgcgccttccgctatggccgggaggacctggatgtcctgggcctgacctttcgcaaggacctgtttgtggccaacgtacagtcgttcccaccggcccccgaggacaagaagcccctgacgcggctgcaggaacgcctcatcaagaagctgggcgagcacgcttaccctttcacctttgagatccctccaaaccttccatgttctgtgacactgcagccggggcccgaagacacggggaaggcttgcggtgtggactatgaagtcaaagccttctgcgcggagaatttggaggagaagatccacaagcggaattctgtgcgtctggtcatccggaaggttcagtatgccccagagaggcctggcccccagcccacagccgagaccaccaggcagttcctcatgtcggacaagcccttgcacctagaagcctctctggataaggagatctattaccatggagaacccatcagcgtcaacgtccacgtcaccaacaacaccaacaagacggtgaagaagatcaagatctcagtgcgccagtatgcagacatctgccttttcaacacagctcagtacaagtgccctgttgccatggaagaggctgatgacactgtggcacccagctcgacgttctgcaaggtctacacactgacccccttcctagccaataaccgagagaagcggggcctcgccttggacgggaagctcaagcacgaagacacgaacttggcctctagcaccctgttgagggaaggtgccaaccgtgagatcctggggatcattgtttcctacaaagtgaaagtgaagctggtggtgtctcggggcggcctgttgggagatcttgcatccagcgacgtggccgtggaactgcccttcaccctaatgcaccccaagcccaaagaggaacccccgcatcgggaagttccagagaacgagacgccagtagataccaatctcatagaacttgacacaaatgatgacgacattgtatttgaggactttgctcgccagagactgaaaggcatgaaggatgacaaggaggaagaggaggatggtaccggctctccacagctcaacaacagatagacgggccggccctgcctccacgtggctccggctccactctcgtgcactcggatgcttactcgtcttcttcctgttctggtttcttttcccctttgttcttccagtttctaccagggggccccgtgggcttccagatcacggtgatgaacctctggcctcaggattggccccacatcaccacgccaacaggaccacagcgcactggctccaccccatctctgccatctccactcccctccttttcatgctgtctcccagaaaagctgccagggctctggccttggaattggacttgagatggggagcagacaggggaggatggggaatgtgggacacggtgtggtgggcatgagggcttggaggggtggggatgagggctcaagacacgagagaagatgtccacggtcccaggtggttaacaaagttctggcagctaaaagatgaccgcgttgaaggccacctccttctggctgggaggggcagaactgtggacagattctcaatgcctttttgaagttctgacccaccaaagaccttctgccttcaccctcctccccacctgatgtccctctgtgtctgatagtgatgttggtgaaagttcgtagaccccaggagtagagaaaagcaactggactgactttcttaccagcagttacctagactgaggcaagctgtgtggactcacccaagtatatttcagtactgtcaggctgtgacatctt

SEQ ID NO: 9120 - protein, 418 aa, Homo sapiens; identical to SEQ ID NO: 1390

SEQ ID NO: 9121 - DNA, 2020 bp, Homo sapiens
gggagagctgagcctgcggggctggccctggcctggctgctgctgcctgcagcccccagctcaggctccctccacctcacagtccactgctttggcgctgcttctgggctggcctcttcactccactgaatctttgggctctcatctgtaaaatgggagtgttcaagaaggccagtccaaatggaaagctcaccgtctacctgggaaagcgggactttgtggaccacatcgacctcgtggaccctgtggatggtgtggtcctggtggatcctgagtatctcaaagagcggagagtctatgtgacgctgacctgcgccttccgctatggccgggaggacctggatgtcctgggcctgacctttcgcaaggacctgtttgtggccaacgtacagtcgttcccaccggcccccgaggacaagaagcccctgacgcggctgcaggaacgcctcatcaagaagctgggcgagcacgcttaccctttcacctttgagatccctccaaaccttccatgttctgtgacactgcagccggggcccgaagacacggggaaggcttgcggtgtggactatgaagtcaaagccttctgcgcggagaatttggaggagaagatccacaagcggaattctgtgcgtctggtcatccggaaggttcagtatgccccagagaggcctggcccccagcccacagccgagaccaccaggcagttcctcatgtcggacaagcccttgcacctagaagcctctctggataaggagatctattaccatggagaacccatcagcgtcaacgtccacgtcaccaacaacaccaacaagacggtgaagaagatcaagatctcagtgcgccagtatgcagacatctgccttttcaacacagctcagtacaagtgccctgttgccatggaagaggctgatgacactgtggcacccagctcgacgttctgcaaggtctacacactgacccccttcctagccaataaccgagagaagcggggcctcgccttggacgggaagctcaagcacgaagacacgaacttggcctctagcaccctgttgagggaaggtgccaaccgtgagatcctggggatcattgtttcctacaaagtgaaagtgaagctggtggtgtctcggggcggcctgttgggagatcttgcatccagcgacgtggccgtggaactgcccttcaccctaatgcaccccaagcccaaagaggaacccccgcatcgggaagttccagagaacgagacgccagtagataccaatctcatagaacttgacacaaatgatgacgacattgtatttgaggactttgctcgccagagactgaaaggcatgaaggatgacaaggaggaagaggaggatggtaccggctctccacagctcaacaacagatagacgggccggccctgcctccacgtggctccggctccactctcgtgcactcggatgcttactcgtcttcttcctgttctggtttcttttcccctttgttcttccagtttctaccagggggccccgtgggcttccagatcacggtgatgaacctctggcctcaggattggccccacatcaccacgccaacaggaccacagcgcactggctccaccccatctctgccatctccactcccctccttttcatgctgtctcccagaaaagctgccagggctctggccttggaattggacttgagatggggagcagacaggggaggatggggaatgtgggacacggtgtggtgggcatgagggcttggaggggtggggatgagggctcaagacacgagagaagatgtccacggtcccaggtggttaacaaagttctggcagctaaaagatgaccgcgttgaaggccacctccttctggctgggaggggcagaactgtggacagattctcaatgcctttttgaagttctgacccaccaaagaccttctgccttcaccctcctccccacctgatgtccctctgtgtctgatagtgatgttggtgaaagttcgtagaccccaggagtagagaaaagc

SEQ ID NO: 9122 - protein, 413 aa, Homo sapiens; identical to SEQ ID NO: 9088

SEQ ID NO: 9123 - DNA, 1996 bp, Homo sapiens
gggagagctgagcctgcggggctggccctggcctggctgctgctgcctgcagcccccagctcaggctccctccacctcacagtccactgctttggcgctgcttctgggctggcctcttcactccactgaatctttgggctctcatctgtaaaatgggagtgttcaagaaggccagtccaaatggaaagctcaccgtctacctgggaaagcgggactttgtggaccacatcgacctcgtggaccctgtggatggtgtggtcctggtggatcctgagtatctcaaagagcggagagtctatgtgacgctgacctgcgccttccgctatggccgggaggacctggatgtcctgggcctgacctttcgcaaggacctgtttgtggccaacgtacagtcgttcccaccggcccccgaggacaagaagcccctgacgcggctgcaggaacgcctcatcaagaagctgggcgagcacgcttaccctttcacctttgagatccctccaaaccttccatgttctgtgacactgcagccggggcccgaagacacggggaaggcttgcggtgtggactatgaagtcaaagccttctgcgcggagaatttggaggagaagatccacaagcggaattctgtgcgtctggtcatccggaaggttcagtatgccccagagaggcctggcccccagcccacagccgagaccaccaggcagttcctcatgtcggacaagcccttgcacctagaagcctctctggataaggagatctattaccatggagaacccatcagcgtcaacgtccacgtcaccaacaacaccaacaagacggtgaagaagatcaagatctcagtgcgccagtatgcagacatctgccttttcaacacagctcagtacaagtgccctgttgccatggaagaggctgatgacactgtggcacccagctcgacgttctgcaaggtctacacactgacccccttcctagccaataaccgagagaagcggggcctcgccttggacgggaagctcaagcacgaagacacgaacttggcctctagcaccctgttgagggaaggtgccaaccgtgagatcctggggatcattgtttcctacaaagtgaaagtgaagctggtggtgtctcggggcggcgacgtggccgtggaactgcccttcaccctaatgcaccccaagcccaaagaggaacccccgcatcgggaagttccagagaacgagacgccagtagataccaatctcatagaacttgacacaaatgatgacgacattgtatttgaggactttgctcgccagagactgaaaggcatgaaggatgacaaggaggaagaggaggatggtaccggctctccacagctcaacaacagatagacgggccggccctgcctccacgtggctccggctccactctcgtgcactcggatgcttactcgtcttcttcctgttctggtttcttttcccctttgttcttccagtttctaccagggggccccgtgggcttccagatcacggtgatgaacctctggcctcaggattggccccacatcaccacgccaacaggaccacagcgcactggctccaccccatctctgccatctccactcccctccttttcatgctgtctcccagaaaagctgccagggctctggccttggaattggacttgagatggggagcagacaggggaggatggggaatgtgggacacggtgtggtgggcatgagggcttggaggggtggggatgagggctcaagacacgagagaagatgtccacggtcccaggtggttaacaaagttctggcagctaaaagatgaccgcgttgaaggccacctccttctggctgggaggggcagaactgtggacagattctcaatgcctttttgaagttctgacccaccaaagaccttctgccttcaccctcctccccacctgatgtccctctgtgtctgatagtgatgttggtgaaagttcgtagaccccaggagtagagaaaagc

SEQ ID NO: 9124 - protein, 405 aa, Homo sapiens; identical to SEQ ID NO: 9090

SEQ ID NO: 9125 - DNA, 2154 bp, Homo sapiens
gcgctgccctgcctcgctgggcggcgcgcgcacacgcagacgcgcacacacacacacatacacacacgcacacaccccgcgcggttccacgcccctggccgcggcccgggcgctgcgctgctcgacgcggcgggcggcgggcggggaccgggggcgggggcggcggcggcggccgggagagcggaggaggcggagcagggagccgggagcgggctggcccgcgctcctcctgctggctggggattttccagcctgggcgctgacgccgcggacctccctgcgaccgtcgcggaccatgggcgacaaagggacccgagtgttcaagaaggccagtccaaatggaaagctcaccgtctacctgggaaagcgggactttgtggaccacatcgacctcgtggaccctgtggatggtgtggtcctggtggatcctgagtatctcaaagagcggagagtctatgtgacgctgacctgcgccttccgctatggccgggaggacctggatgtcctgggcctgacctttcgcaaggacctgtttgtggccaacgtacagtcgttcccaccggcccccgaggacaagaagcccctgacgcggctgcaggaacgcctcatcaagaagctgggcgagcacgcttaccctttcacctttgagatccctccaaaccttccatgttctgtgacactgcagccggggcccgaagacacggggaaggcttgcggtgtggactatgaagtcaaagccttctgcgcggagaatttggaggagaagatccacaagcggaattctgtgcgtctggtcatccggaaggttcagtatgccccagagaggcctggcccccagcccacagccgagaccaccaggcagttcctcatgtcggacaagcccttgcacctagaagcctctctggataaggagatctattaccatggagaacccatcagcgtcaacgtccacgtcaccaacaacaccaacaagacggtgaagaagatcaagatctcagtgcgccagtatgcagacatctgccttttcaacacagctcagtacaagtgccctgttgccatggaagaggctgatgacactgtggcacccagctcgacgttctgcaaggtctacacactgacccccttcctagccaataaccgagagaagcggggcctcgccttggacgggaagctcaagcacgaagacacgaacttggcctctagcaccctgttgagggaaggtgccaaccgtgagatcctggggatcattgtttcctacaaagtgaaagtgaagctggtggtgtctcggggcggcgacgtggccgtggaactgcccttcaccctaatgcaccccaagcccaaagaggaacccccgcatcgggaagttccagagaacgagacgccagtagataccaatctcatagaacttgacacaaatgatgacgacattgtatttgaggactttgctcgccagagactgaaaggcatgaaggatgacaaggaggaagaggaggatggtaccggctctccacagctcaacaacagatagacgggccggccctgcctccacgtggctccggctccactctcgtgcactcggatgcttactcgtcttcttcctgttctggtttcttttcccctttgttcttccagtttctaccagggggccccgtgggcttccagatcacggtgatgaacctctggcctcaggattggccccacatcaccacgccaacaggaccacagcgcactggctccaccccatctctgccatctccactcccctccttttcatgctgtctcccagaaaagctgccagggctctggccttggaattggacttgagatggggagcagacaggggaggatggggaatgtgggacacggtgtggtgggcatgagggcttggaggggtggggatgagggctcaagacacgagagaagatgtccacggtcccaggtggttaacaaagttctggcagctaaaagatgaccgcgttgaaggccacctccttctggctgggaggggcagaactgtggacagattctcaatgcctttttgaagttctgacccaccaaagaccttctgccttcaccctcctccccacctgatgtccctctgtgtctgatagtgatgttggtgaaagttcgtagaccccaggagtagagaaaagc

SEQ ID NO: 9126 - protein, 410 aa, Homo sapiens; identical to SEQ ID NO: 1392

SEQ ID NO: 9127 - DNA, 2178 bp, Homo sapiens
gcgctgccctgcctcgctgggcggcgcgcgcacacgcagacgcgcacacacacacacatacacacacgcacacaccccgcgcggttccacgcccctggccgcggcccgggcgctgcgctgctcgacgcggcgggcggcgggcggggaccgggggcgggggcggcggcggcggccgggagagcggaggaggcggagcagggagccgggagcgggctggcccgcgctcctcctgctggctggggattttccagcctgggcgctgacgccgcggacctccctgcgaccgtcgcggaccatgggcgacaaagggacccgagtgttcaagaaggccagtccaaatggaaagctcaccgtctacctgggaaagcgggactttgtggaccacatcgacctcgtggaccctgtggatggtgtggtcctggtggatcctgagtatctcaaagagcggagagtctatgtgacgctgacctgcgccttccgctatggccgggaggacctggatgtcctgggcctgacctttcgcaaggacctgtttgtggccaacgtacagtcgttcccaccggcccccgaggacaagaagcccctgacgcggctgcaggaacgcctcatcaagaagctgggcgagcacgcttaccctttcacctttgagatccctccaaaccttccatgttctgtgacactgcagccggggcccgaagacacggggaaggcttgcggtgtggactatgaagtcaaagccttctgcgcggagaatttggaggagaagatccacaagcggaattctgtgcgtctggtcatccggaaggttcagtatgccccagagaggcctggcccccagcccacagccgagaccaccaggcagttcctcatgtcggacaagcccttgcacctagaagcctctctggataaggagatctattaccatggagaacccatcagcgtcaacgtccacgtcaccaacaacaccaacaagacggtgaagaagatcaagatctcagtgcgccagtatgcagacatctgccttttcaacacagctcagtacaagtgccctgttgccatggaagaggctgatgacactgtggcacccagctcgacgttctgcaaggtctacacactgacccccttcctagccaataaccgagagaagcggggcctcgccttggacgggaagctcaagcacgaagacacgaacttggcctctagcaccctgttgagggaaggtgccaaccgtgagatcctggggatcattgtttcctacaaagtgaaagtgaagctggtggtgtctcggggcggcctgttgggagatcttgcatccagcgacgtggccgtggaactgcccttcaccctaatgcaccccaagcccaaagaggaacccccgcatcgggaagttccagagaacgagacgccagtagataccaatctcatagaacttgacacaaatgatgacgacattgtatttgaggactttgctcgccagagactgaaaggcatgaaggatgacaaggaggaagaggaggatggtaccggctctccacagctcaacaacagatagacgggccggccctgcctccacgtggctccggctccactctcgtgcactcggatgcttactcgtcttcttcctgttctggtttcttttcccctttgttcttccagtttctaccagggggccccgtgggcttccagatcacggtgatgaacctctggcctcaggattggccccacatcaccacgccaacaggaccacagcgcactggctccaccccatctctgccatctccactcccctccttttcatgctgtctcccagaaaagctgccagggctctggccttggaattggacttgagatggggagcagacaggggaggatggggaatgtgggacacggtgtggtgggcatgagggcttggaggggtggggatgagggctcaagacacgagagaagatgtccacggtcccaggtggttaacaaagttctggcagctaaaagatgaccgcgttgaaggccacctccttctggctgggaggggcagaactgtggacagattctcaatgcctttttgaagttctgacccaccaaagaccttctgccttcaccctcctccccacctgatgtccctctgtgtctgatagtgatgttggtgaaagttcgtagaccccaggagtagagaaaagc

SEQ ID NO: 9128 - protein, 418 aa, Homo sapiens; identical to SEQ ID NO: 1390

SEQ ID NO: 9129 - DNA, 1892 bp, Homo sapiens
ttgtagcgatggggtcttgctatgttgcccaggctggtctcaaactcctagcctcaagcaatcctcctgtcagcctctcaagttgctgggattacaggcatgagcaactgtgcctgctgtggctgtactttttttttttttttttttgagatggagtcttgctctgtcacccaggctggagtgcagtggagcaatctcggctcactgtaagctccacctcccaggttcatgccattctcctggctcagcctcctgagtagctggaactacaggcgtccaccaccatgcccggctaatttttttgtatttttagtagagacggggtttcaccttgttagccaggatggtctccaactcctgacctcgtgatctacccgcctcggcctcccaaaatgctgggattacaggcgtgagccactgcacccggctggctgtaattctttaaataaatgtgctttttagcactgtgctgcttgactaggataatcttttagaatatccgagattcagtcctgtttgtgcgtagaatgtagatgtgcctcttttgagtggcagtggtctccttgcccgagctgggctggcccaagtggtccgtgtgtctgggggacagaggttgggagagggagacttggagcaggctcagactagatattctgctgggctggagatcagggctggggttggctctggggagggccatctccacagctgcttcctttcttcccagtgacactgtggcacccagctcgacgttctgcaaggtctacacactgacccccttcctagccaataaccgagagaagcggggcctcgccttggacgggaagctcaagcacgaagacacgaacttggcctctagcaccctgttgagggaaggtgccaaccgtgagatcctggggatcattgtttcctacaaagtgaaagtgaagctggtggtgtctcggggcggcctgttgggagatcttgcatccaggtaaattcctcccttccacctggttcacccaccttcctggagggcctggagcccattggcttgactgaccagaatcacagggcactgggttggaaggaatcttagtggtcatttcagatagccaggttcaggtgtgagctgggagacacaatttctccttaacaaacctcaccttgctcttccatcccacctgagtgacagggatctttacagagagcaaagcctgattacactgatacagggagtggcccccaagagagctgtctgaattactgatcacctgaattataggagcttttggagaaatgcagacttcatggctttcaaacttctacactagtgaggagggaactgctggccaagtgttgctaaggagaggtcctcaggagatcctattttgtaaacaaggtctccttgcagccagctggatgcacttatattccaaaaatgcatgtaccccaaacacagcagtttggcctccttctgtcacaagatggcagtgtggctcatcctaagaaatcttaaactaatttgacaggtgaaattcattcaattcaattcagttccatatcattcagcaaagatttcctcaacccaggcttgcgtccaggctggtgctgagtgccagagtcccagagaggaatcagatgtggtccctgaccttatcgttcctggcccggtagaaggttaagatccagattcttccactaaaatgttggcaaacccagtcttccaccagctccattctgaagcaatccccaaagcaaaaggaaaaaaaaaagagaaggaaaaaaaggccaaatagctctgacagccttataaaacccccaggttcccaatgaggggacttaagtaacgattctggcaggcacaagcttcacatttttatttttattttttattctgagacaaggtctga

SEQ ID NO: 9130 - protein, 69 aa, Homo sapiens
MQTSWLSNFYTSEEGTAGQVLLRRGPQEILFCKQGLLAASWMHLYSKNACTPNTAVWPPSVTRWQCGSS

SEQ ID NO: 9131 - DNA, 308 bp, Homo sapiens
gtcccctggggcccttggtctgatgggtgtatgggagtgtctgggctgcaatacatgagacaggacagtggtggatgtgacaggtggctcgttctgtcctcttcttgacagatccctccaaaccttccatgttctgtgacactgcagccggggcccgaagacacggggaaggcttgcggtgtggactatgaagtcaaagccttctgcgcggagaatttggaggagaagatccacaagcggtgagtaggatgccagggtgtgggccgcctgctgggtgagggagggagacaggatgggcaaagtccaag

SEQ ID NO: 9132 - protein, 44 aa, Homo sapiens
QIPPNLPCSVTLQPGPEDTGKACGVDYEVKAFCAENLEEKIHKR

SEQ ID NO: 9133 - DNA, 692 bp, Homo sapiens
accaggttgggagaggccgcttactctctgtcctttccccagatggtgtggtcctggtggatcctgagtatctcaaagagcggagagtctatgtgacgctgacctgcgccttccgctatggccgggaggacctggatgtcctgggcctgacctttcgcaaggacctgtttgtggccaacgtacagtcgttcccaccggcccccgaggacaagaagcccctgacgcggctgcaggaacgcctcatcaagaagctgggcgagcacgcttaccctttcacctttgagatccctccaaaccttccatgttctgtgacactgcagccggggcccgaagacacggggaaggtaggtcaccccaaggggaccatctctctggctccaggagtctcatgtccccaggtccctggctttctccctgggaggtgctggacacacaggaccactctccctgttgaacagtctttgtgtctaggctaagctggtcccaccttggacaaccagtctctcttcagacagggcagcaggtacggggtcagcctcactctcccattcagtgatgggtctggaggctctcctgggtggcgttggctgcaacaggaccaaagtgttctgaggacctacacctggcctcatgtaacccctggcaacctggaatcaaagtgcgatcatccccatttcacagatggggaaact

SEQ ID NO: 9134 - protein, 50 aa, Homo sapiens
MFCDTAAGARRHGEGRSPQGDHLSGSRSLMSPGPWLSPWEVLDTQDHSPC

SEQ ID NO: 9135 - DNA, 9076 bp, Homo sapiens
gtaaaaatgatgccaactgtgattgtttttctggagacgatggttatgccaaggatgcaaagttaaataccccatcttccttggctgtgtgtgctgatggggagctctacgtggccgaccttgggaacatccgaattcggtttatccggaagaacaagcctttcctcaacacccagaacatgtatgagctgtcttcaccaattgaccaggagctctatctgtttgataccaccggcaagcacctgtacacccaaagcctgcccacaggagactacctgtacaacttcacctacactggggacggcgacatcacactcatcacagacaacaatggcaacatggtaaatgtccgccgagactctactgggatgcccctctggctggtggtcccagatggccaggtgtactgggtgaccatgggcaccaacagtgcactcaagagtgtgaccacacaaggacacgagttggccatgatgacataccatggcaattccggccttctggcaaccaaaagcaatgaaaacggatggacaacattttatgacaacctcagatggcaggaattatcatccacattttttacatatgaagtacagagagattagataacaagcctgaaaccacacagtacgacagctttggccgcctgacaaatgtgaccttccctactggccaggtgagcagtttccgaagtgatacagacagttcagtgcatgtccaggtagagacctccagcaaggatgatgtcaccataaccaccaacctgtctgcctcaggcgccttctacacactgctgcaagaccaagtccggaacagctactacatcggggccgatggctccttgcggctgctgctggccaacggcatggaggtggcgctgcagactgagccccacttgctggctggcaccgtcaaccccaccgtgggcaagaggaatgtcacgctgcccatcgacaacggcctcaacctggtggagtggcgccagcgcaaagagcaggctcggggccaggtcactgtctttgggcgccggctgcgggttcacaaccgaaatctcctatctctggactttgatcgcgtaacacgcacagagaagatctatgatgaccaccgcaagttcacccttcggattctgtacgaccaggcggggcggcccagcctctggtcacccagcagcaggctgaatggtgtcaacgtgacatactcccctgggggttacattgctggcatccagaggggcatcatgtctgaaagaatggaatacgaccaggcgggccgcatcacatccaggatcttcgctgatgggaagacatggagctacacatacttagagaagtccatggtgctgctactacacagccagaggcagtatatctttgagttcgacaagaatgaccgcctctcttctgtgacgatgcccaacgtggcgcggcagacactagagaccatccgctcagtgggctactacagaaacatctatcagccccctgagggcaatgcctcagtcatacaggacttcactgaggatgggcacctccttcacaccttctacctgggcactggccgcagggtgatatacaagtatggcaaactgtcaaagctggcagagacgctctatgacaccaccaaggtcagtttcacctatgacgagacggcaggcatgctgaagaccatcaacctacagaatgagggcttcacctgcaccatccgctaccgtcagattgggcccctgattgaccgacagatcttccgcttcactgaggaaggcatggtcaacgcccgttttgactacaactatgacaacagcttccgggtgaccagcatgcaggctgtgatcaacgagaccccactgcccattgatctctatcgctatgatgatgtgtcaggcaagacagagcagtttgggaagtttggtgtcatttactatgacattaaccagatcatcaccacagctgtcatgacccacaccaagcattttgatgcatatggcaggatgaaggaagtgcagtatgagatcttccgctcgctcatgtactggatgaccgtccagtatgataacatggggcgagtagtgaagaaggagctgaaggtaggaccctacgccaataccactcgctactcctatgagtatgatgctgacggccagctgcagacagtctccatcaatgacaagccactctggcgctacagctacgacctcaatgggaacctgcacttactgagccctgggaacagtgcacggctcacaccactacggtatgacatccgcgaccgcatcactcggctgggtgacgtgcaatacaagatggatgaggatggcttcctgaggcagcggggcggtgatatctttgagtacaactcagctggcctgctcatcaaggcctacaaccgggctggcagctggagtgtcaggtaccgctacgatggcctggggcggcgcgtgtccagcaagagcagccacagccaccacctgcagttcttctatgcagacctgaccaaccccaccaaggtcacccacctgtacaaccactccagctctgagatcacctccctctactacgacttgcaaggacacctctttgccatggagctgagcagtggtgatgagttttacatagcttgtgacaacatcgggacccctcttgctgtctttagtggaacaggtttgatgatcaagcaaatcctgtacacagcctatggggagatctacatggataccaaccccaactttcagatcatcataggctaccatggtggcctctatgatccactcaccaagcttgtccacatgggccggcgagattatgatgtgctggccggacgctggactagcccagaccacgagctgtggaagcaccttagtagcagcaacgtcatgccttttaatctctatatgttcaaaaacaacaaccccatcagcaactcccaggacatcaagtgcttcatgacagatgttaacagctggctgctcacctttggattccagctacacaacgtgatccctggttatcccaaaccagacatggatgccatggaaccctcctacgagctcatccacacacagatgaaaacgcaggagtgggacaacagcaagtctatcctcggggtacagtgtgaagtacagaagcagctcaaggcctttgtcaccttagaacggtttgaccagctctatggctccacaatcaccagctgccagcaggctccaaagaccaagaagtttgcatccagcggctcagtctttggcaagggggtcaagtttgccttgaaggatggccgagtgaccacagacatcatcagtgtggccaatgaggatgggcgaagggttgctgccatcttgaaccatgcccactacctagagaacctgcacttcaccattgatggggtggatacccattactttgtgaaaccaggaccttcagaaggtgacctggccatcctgggcctcagtggggggcggcgaaccctggagaatggggtcaacgtcactgtgtcccagatcaacacagtacttaatggcaggactagacgctacacagacatccagctccagtacggggcactgtgcttgaacacacgctacgggacaacgttggatgaggagaaggcacgggtcctggagctggcccggcagagagccgtgcgccaagcgtgggcccgcgagcagcagagactgcgggaaggggaggaaggcctgcgggcctggacagagggggagaagcagcaggtgctgagcacagggcgggtgcaaggctacgacggctttttcgtgatctctgtcgagcagtacccagaactgtcagacagcgccaacaacatccacttcatgagacagagcgagatgggccggaggtgacagagaggaccaaggacttcttgccaaagacagctactcttttgtggccgcatacctgactgtgttgtacttttaaaaaaatgattttttaacaagtgcagaaacaaaaagatactggttgcattgtaactcatgcaacatccttttttttagaaaagaaaaacacagatttggccttcgcacattttttgcaaagaacagaaggtatttttttctgtagtgtgatcacaatgaaaactttattgtcttttgttccctttttccttgaggatttttcccttgtcgtttggggtatgtatctcctctctgagatgcatctcctggggtgtgtcctcgtctgtccctaggtacccagtgtgatgtgggacatgaatgtctgtgctaacttgtctcatgtgcaaccctttcttcttcgactggggtcgggcaggagtaaagggagtgatgggccagtacaacaccccttccaagggggcctgggaggagggtctgtaggacctgaggctccttggcagggctcctgcagaagagtggtggatttcttctcaccttgttctctgcctccagaggatcatagatggcttcatcttgctccagggaatttcatggtgttgttcagcaccttttttaagctgccccaaactcctgttcaagctttctattttgatgctgaatgaaaccccctaccacttttgcaaatcctgtgtagttgtcggtgccacccccatgctgggatagagaaagtgtctcccaggtcctttcccccagaccagtgacataacatcctgggctcagagtcccatcctcccgggagggaaagcacccaggatgcctgtgattggttggtcctccatgatgttcctgttcatctcctcctttctcccaaagccagatgtgagaacgagcactgcacagcaagccttcaatgtgggcaccatgtccacagaacagaaggccacccatggcaaaggcatggcagtggtggcgagggcaccagcctgccttccgaggcaaagccctctctctatgactttgagtatcttccctccaccactcagccgccaccactgagacgtaggaatgtggagggaggtgcttggtggcctttgattctggaaaaatgcttaacaaaaaaagccagccaaagagaggaaggcataagctaagcatccttctaaccagttcccaaagtcccatctgcctccatgtaccagctgatcgcagagctggactggggcaggctgggcttccaggaaattcctgaagttctgaaacagcttcccctctagagaagcccacccaatgtgttttttagtgacaggaagaaaggagggaagagctgatgtggtgtggcctgcccatatcatacaaccccaccaggagcagggcagttcccaaggtgggtgcccgtagatctgggaggccaggctggcatgattcctgtgaagaactgtgcctgtgtcgtcagggagaggcctgagccctctcagaagcagggacagcccacacctgaagagcacgcccaagctgaggcagcagccagcaggctgggggagcagtgagggcagggggagtcacagccagagctgggagccccttgttcaaggattccattcctggttcatccgcctaattaccattgtcattaccactcacaggaggctctgggagatgggaggggaagccaaatgcttccttttaagctgggcttcttagaaaatggaacttttatgggttacatttacattaagtgtggaaaatgaattctgagtctgagctattccccgtggaaaccttgttggactgataagctcatggcacctctatagccttactcacatagtcttcagaatattacacaagttaatgaaactgagaaggtctgactgcatgaggatcggagcagcatgtagtctgggttctgcctggcagagggaggcaaccaaaacttcttggggagaggagatttcgccttaacgtcatcccactgggattagaggatgtgtttcgctaagtgctcttcctgtttccaaaaaaaaagccaccctgctgcagcagtgcgctttggcctgcttgtccactggttgcccattgcccctggatccagagctctactgagtcagatacagtgctctgcaggcctgctgtgggaggcatgagctggagatgggggctcccatctggcaggatcattcttggatgagatggaaaacagtttggcctgaagaacacaagttttgtcctccagaagggacttacgcctctcaaaatgtactcttcataccaagggcccttgggcaaagtgctcctgcccagttgatcagtcccatcctggctgcctgacatcagtgaagacctgctggggatgtctgctcagaggtcaggaacggcatgcggtccacaggaaccagctccctacgcttcccccacgccctgtccctcctccacagccccctccccaaaggaatagggtggacttttagggatcaaaaacagaattattgggtgtttcatttatttttttctttctttcttttttttttcatagagatggggtctcactatgttgcccaggctgttctcaaactcctggcctcaggcgatccaccttggcctcctgaagtgctggggttacaggtgtgagccactgcgcctggactgagtgtttgtttctttaaaggatcttatatttttcctgtgctacataccaccacagcagcccagcttctgtggggagagaagttgaaggatcccgaagctttagaaaaaggatctcagctgtggcacaggcagtgttatgcgcctcactgccacattggtgctgttgtattgaaggtggtgcttctggccttggcccttttgagttggtttccatttgggctgcaggtgactcagtgactccctcctcaagctgtcctcctgctaagaccagcagtcacaaacccatggcaagggtgagtgtgaaggcctaaccctgtgcctatgtaataggctccaagcatcgactcccatcctgagaggaccggcccttttgacactcaccaaccaaatctgttcattcgatagagtgaccaggcctccctcacctgcccaggtgtatgatcctacagttcctgccttctctcctaccccgcacagctgccaactggtcctacatcctcagcccctctgccaccaccttaaataggactttactgattccccaactttgtttttttgtaggatgagatttcctttttatcccacccccccacaccccaaacagacattgctggagggcagactggaggaaggggaaggcatgcaggtaaattactgccttgtcagcctctgaccctcatctctcagaattgttggctgagaattaacccaaggaccacaccagtgcctgatttctacttagggagagaggattggaaacgatccctaagaaactgactgagggtgagaatggccaggaggtgtgtgtccaaataaccaggagggggcacagaagatgatggcaaggcagactgggcagtgttttgtagacacagaacaaagaatcagaatttgaaaaaagaagaaaaacaaatcttcgcagctgcaactttaaagtatcacctttatagatggcagggatttccattatgcaaatggaatctaagatttcaatgtgaaatcttagaatgcagttttaccacttgcagtcttgtatttgtggtggccatgtggtgagggcggtgatgctgagctttctgcccaggaggaatgagctttcaagctctcagcagggtgtcaggcttggggatttgagcatccactgctcaaagtccaggctattctccagtcctcacggcagccactaagcccaggagccagacctggcccggggacacatctcctgagggatcccagaaagaacccagtctttcctttcccttggggtccttgttagaatgaaaacctctctatttaaggcacatcattcccagctaggtttatacacttgtctatattttactggaggaaagggaattaaaaaagaactctgcagttcaaggccctttcatttaaccttccaaaaacagcaaactcattttaaagactcattgctgaggtgatagagagaaaccttatcctctccaaccttcacattcacaaaaaccatccttgtgtacttgactgccctagacagtggtgactcttaggtttcattacgaatgtggaatatcagagtgtgggaaggcccaggcgagggccaatgttgtgtttcttaccccctctggaatgccaaaggcaaggtactaggtgacctcctggtccccaagaaaatgtgatttattctgagggcgaacagccaagggaggactagtctggagcacgctcggccgtcctggcaggagctgagcctcaggtgtctggcggtgccccagcagccctggattcacccaacaccagaatcccacttttctaaatccacctgttgttctgagcacctctgaacccgcagcttcggcaaaaggagtctgtaccaagctgcttctggatgaccaacactggagactctggccttaccatgtggaaatcattttcctgaagtctggaactaattttgagaagtttttttctcaacacttttgtgtttctaacactgtatcttgactgtgtaaataccaacaaggctgtaaataaatgcagatgtagataccttctagaaaaaaaaaagcataaaaacaaaaccagaagtgatcccgtgtagccttcgttgacaaataaagactattttgtgtttacaggtgtctggtggcctttgcttggagataaaggcttcctcttgcctgtcccagcccccgagccatcctgggtttgcacttccctgctggctgctatcaggatgacctgggagaggactcagtcctaggccccagggtccctctaaatccctccaggctgcagctctgtcaagagggatgtccagagggtctctaagaccctgaagcttgactttgcaattgcatgacaggaataaatatcacagctcctctgacatcactagtgcagcgtggctccccatcccactgctgccctcgttcagggacaggctgaaggggccaacgaacccaaccctcccagaggagggagccttgctccaccactgggcacacagagtcatccaccatgccactgccttccacaagggatgtgagccgttgcactttaaaaataaatgactgtatattcatc

SEQ ID NO: 9136 - protein, 994 aa, Homo sapiens
MEVALQTEPHLLAGTVNPTVGKRNVTLPIDNGLNLVEWRQRKEQARGQVTVFGRRLRVHNRNLLSLDFDRVTRTEKIYDDHRKFTLRILYDQAGRPSLWSPSSRLNGVNVTYSPGGYIAGIQRGIMSERMEYDQAGRITSRIFADGKTWSYTYLEKSMVLLLHSQRQYIFEFDKNDRLSSVTMPNVARQTLETIRSVGYYRNIYQPPEGNASVIQDFTEDGHLLHTFYLGTGRRVIYKYGKLSKLAETLYDTTKVSFTYDETAGMLKTINLQNEGFTCTIRYRQIGPLIDRQIFRFTEEGMVNARFDYNYDNSFRVTSMQAVINETPLPIDLYRYDDVSGKTEQFGKFGVIYYDINQIITTAVMTHTKHFDAYGRMKEVQYEIFRSLMYWMTVQYDNMGRVVKKELKVGPYANTTRYSYEYDADGQLQTVSINDKPLWRYSYDLNGNLHLLSPGNSARLTPLRYDIRDRITRLGDVQYKMDEDGFLRQRGGDIFEYNSAGLLIKAYNRAGSWSVRYRYDGLGRRVSSKSSHSHHLQFFYADLTNPTKVTHLYNHSSSEITSLYYDLQGHLFAMELSSGDEFYIACDNIGTPLAVFSGTGLMIKQILYTAYGEIYMDTNPNFQIIIGYHGGLYDPLTKLVHMGRRDYDVLAGRWTSPDHELWKHLSSSNVMPFNLYMFKNNNPISNSQDIKCFMTDVNSWLLTFGFQLHNVIPGYPKPDMDAMEPSYELIHTQMKTQEWDNSKSILGVQCEVQKQLKAFVTLERFDQLYGSTITSCQQAPKTKKFASSGSVFGKGVKFALKDGRVTTDIISVANEDGRRVAAILNHAHYLENLHFTIDGVDTHYFVKPGPSEGDLAILGLSGGRRTLENGVNVTVSQINTVLNGRTRRYTDIQLQYGALCLNTRYGTTLDEEKARVLELARQRAVRQAWAREQQRLREGEEGLRAWTEGEKQQVLSTGRVQGYDGFFVISVEQYPELSDSANNIHFMRQSEMGRR

SEQ ID NO: 9137 - DNA, 8624 bp, Homo sapiens
gtaaaaatgatgccaactgtgattgtttttctggagacgatggttatgccaaggatgcaaagttaaataccccatcttccttggctgtgtgtgctgatggggagctctacgtggccgaccttgggaacatccgaattcggtttatccggaagaacaagcctttcctcaacacccagaacatgtatgagctgtcttcaccaattgaccaggagctctatctgtttgataccaccggcaagcacctgtacacccaaagcctgcccacaggagactacctgtacaacttcacctacactggggacggcgacatcacactcatcacagacaacaatggcaacatggtaaatgtccgccgagactctactgggatgcccctctggctggtggtcccagatggccaggtgtactgggtgaccatgggcaccaacagtgcactcaagagtgtgaccacacaaggacacgagttggccatgatgacataccatggcaattccggccttctggcaaccaaaagcaatgaaaacggatggacaacattttatgacaacctcagatggcaggaattatcatccacattttttacatatgaagtacagagagattagataacaagcctgaaaccacacagtacgacagctttggccgcctgacaaatgtgaccttccctactggccaggtgagcagtttccgaagtgatacagacagttcagtgcatgtccaggtagagacctccagcaaggatgatgtcaccataaccaccaacctgtctgcctcaggcgccttctacacactgctgcaagaccaagtccggaacagctactacatcggggccgatggctccttgcggctgctgctggccaacggcatggaggtggcgctgcagactgagccccacttgctggctggcaccgtcaaccccaccgtgggcaagaggaatgtcacgctgcccatcgacaacggcctcaacctggtggagtggcgccagcgcaaagagcaggctcggggccaggtcactgtctttgggcgccggctgcgggttcacaaccgaaatctcctatctctggactttgatcgcgtaacacgcacagagaagatctatgatgaccaccgcaagttcacccttcggattctgtacgaccaggcggggcggcccagcctctggtcacccagcagcaggctgaatggtgtcaacgtgacatactcccctgggggttacattgctggcatccagaggggcatcatgtctgaaagaatggaatacgaccaggcgggccgcatcacatccaggatcttcgctgatgggaagacatggagctacacatacttagagaagtccatggtgctgctactacacagccagaggcagtatatctttgagttcgacaagaatgaccgcctctcttctgtgacgatgcccaacgtggcgcggcagacactagagaccatccgctcagtgggctactacagaaacatctatcagccccctgagggcaatgcctcagtcatacaggacttcactgaggatgggcacctccttcacaccttctacctgggcactggccgcagggtgatatacaagtatggcaaactgtcaaagctggcagagacgctctatgacaccaccaaggtcagtttcacctatgacgagacggcaggcatgctgaagaccatcaacctacagaatgagggcttcacctgcaccatccgctaccgtcagattgggcccctgattgaccgacagatcttccgcttcactgaggaaggcatggtcaacgcccgttttgactacaactatgacaacagcttccgggtgaccagcatgcaggctgtgatcaacgagaccccactgcccattgatctctatcgctatgatgatgtgtcaggcaagacagagcagtttgggaagtttggtgtcatttactatgacattaaccagatcatcaccacagctgtcatgacccacaccaagcattttgatgcatatggcaggatgaaggaagtgcagtatgagatcttccgctcgctcatgtactggatgaccgtccagtatgataacatggggcgagtagtgaagaaggagctgaaggtaggaccctacgccaataccactcgctactcctatgagtatgatgctgacggccagctgcagacagtctccatcaatgacaagccactctggcgctacagctacgacctcaatgggaacctgcacttactgagccctgggaacagtgcacggctcacaccactacggtatgacatccgcgaccgcatcactcggctgggtgacgtgcaatacaagatggatgaggatggcttcctgaggcagcggggcggtgatatctttgagtacaactcagctggcctgctcatcaaggcctacaaccgggctggcagctggagtgtcaggtaccgctacgatggcctggggcggcgcgtgtccagcaagagcagccacagccaccacctgcagttcttctatgcagacctgaccaaccccaccaaggtcacccacctgtacaaccactccagctctgagatcacctccctctactacgacttgcaaggacacctctttgccatggagctgagcagtggtgatgagttttacatagcttgtgacaacatcgggacccctcttgctgtctttagtggaacaggtttgatgatcaagcaaatcctgtacacagcctatggggagatctacatggataccaaccccaactttcagatcatcataggctaccatggtggcctctatgatccactcaccaagcttgtccacatgggccggcgagattatgatgtgctggccggacgctggactagcccagaccacgagctgtggaagcaccttagtagcagcaacgtcatgccttttaatctctatatgttcaaaaacaacaaccccatcagcaactcccaggacatcaagtgcttcatgacagatgttaacagctggctgctcacctttggattccagctacacaacgtgatccctggttatcccaaaccagacatggatgccatggaaccctcctacgagctcatccacacacagatgaaaacgcaggagtgggacaacagcaagtctatcctcggggtacagtgtgaagtacagaagcagctcaaggcctttgtcaccttagaacggtttgaccagctctatggctccacaatcaccagctgccagcaggctccaaagaccaagaagtttgcatccagcggctcagtctttggcaagggggtcaagtttgccttgaaggatggccgagtgaccacagacatcatcagtgtggccaatgaggatgggcgaagggttgctgccatcttgaaccatgcccactacctagagaacctgcacttcaccattgatggggtggatacccattactttgtgaaaccaggaccttcagaaggtgacctggccatcctgggcctcagtggggggcggcgaaccctggagaatggggtcaacgtcactgtgtcccagatcaacacagtacttaatggcaggactagacgctacacagacatccagctccagtacggggcactgtgcttgaacacacgctacgggacaacgttggatgaggagaaggcacgggtcctggagctggcccggcagagagccgtgcgccaagcgtgggcccgcgagcagcagagactgcgggaaggggaggaaggcctgcgggcctggacagagggggagaagcagcaggtgctgagcacagggcgggtgcaaggctacgacggctttttcgtgatctctgtcgagcagtacccagaactgtcagacagcgccaacaacatccacttcatgagacagagcgagatgggccggaggtgacagagaggaccaaggacttcttgccaaagacagctactcttttgtggccgcatacctgactgtgttgtacttttaaaaaaatgattttttaacaagtgcagaaacaaaaagatactggttgcattgtaactcatgcaacatccttttttttagaaaagaaaaacacagatttggccttcgcacattttttgcaaagaacagaaggtatttttttctgtagtgtgatcacaatgaaaactttattgtcttttgttccctttttccttgaggatttttcccttgtcgtttggggtatgtatctcctctctgagatgcatctcctggggtgtgtcctcgtctgtccctaggtacccagtgtgatgtgggacatgaatgtctgtgctaacttgtctcatgtgcaaccctttcttcttcgactggggtcgggcaggagtaaagggagtgatgggccagtacaacaccccttccaagggggcctgggaggagggtctgtaggacctgaggctccttggcagggctcctgcagaagagtggtggatttcttctcaccttgttctctgcctccagaggatcatagatggcttcatcttgctccagggaatttcatggtgttgttcagcaccttttttaagctgccccaaactcctgttcaagctttctattttgatgctgaatgaaaccccctaccacttttgcaaatcctgtgtagttgtcggtgccacccccatgctgggatagagaaagtgtctcccaggtcctttcccccagaccagtgacataacatcctgggctcagagtcccatcctcccgggagggaaagcacccaggatgcctgtgattggttggtcctccatgatgttcctgttcatctcctcctttctcccaaagccagatgtgagaacgagcactgcacagcaagccttcaatgtgggcaccatgtccacagaacagaaggccacccatggcaaaggcatggcagtggtggcgagggcaccagcctgccttccgaggcaaagccctctctctatgactttgagtatcttccctccaccactcagccgccaccactgagacgtaggaatgtggagggaggtgcttggtggcctttgattctggaaaaatgcttaacaaaaaaagccagccaaagagaggaaggcataagctaagcatccttctaaccagttcccaaagtcccatctgcctccatgtaccagctgatcgcagagctggactggggcaggctgggcttccaggaaattcctgaagttctgaaacagcttcccctctagagaagcccacccaatgtgttttttagtgacaggaagaaaggagggaagagctgatgtggtgtggcctgcccatatcatacaaccccaccaggagcagggcagttcccaaggtgggtgcccgtagatctgggaggccaggctggcatgattcctgtgaagaactgtgcctgtgtcgtcagggagaggcctgagccctctcagaagcagggacagcccacacctgaagagcacgcccaagctgaggcagcagccagcaggctgggggagcagtgagggcagggggagtcacagccagagctgggagccccttgttcaaggattccattcctggttcatccgcctaattaccattgtcattaccactcacaggaggctctgggagatgggaggggaagccaaatgcttccttttaagctgggcttcttagaaaatggaacttttatgggttacatttacattaagtgtggaaaatgaattctgagtctgagctattccccgtggaaaccttgttggactgataagctcatggcacctctatagccttactcacatagtcttcagaatattacacaagttaatgaaactgagaaggtctgactgcatgaggatcggagcagcatgtagtctgggttctgcctggcagagggaggcaaccaaaacttcttggggagaggagatttcgccttaacgtcatcccactgggattagaggatgtgtttcgctaagtgctcttcctgtttccaaaaaaaaagccaccctgctgcagcagtgcgctttggcctgcttgtccactggttgcccattgcccctggatccagagctctactgagtcagatacagtgctctgcaggcctgctgtgggaggcatgagctggagatgggggctcccatctggcaggatcattcttggatgagatggaaaacagtttggcctgaagaacacaagttttgtcctccagaagggacttacgcctctcaaaatgtactcttcataccaagggcccttgggcaaagtgctcctgcccagttgatcagtcccatcctggctgcctgacatcagtgaagacctgctggggatgtctgctcagaggtcaggaacggcatgcggtccacaggaaccagctccctacgcttcccccacgccctgtccctcctccacagccccctccccaaaggaatagggtggacttttagggatcaaaaacagaattattgggtgtttcatttatttttttctttctttcttttttttttcatagagatggggtctcactatgttgcccaggctgttctcaaactcctggcctcaggcgatccaccttggcctcctgaagtgctggggttacaggtgtgagccactgcgcctggactgagtgtttgtttctttaaaggatcttatatttttcctgtgctacataccaccacagcagcccagcttctgtggggagagaagttgaaggatcccgaagctttagaaaaaggatctcagctgtggcacaggcagtgttatgcgcctcactgccacattggtgctgttgtattgaaggtggtgcttctggccttggcccttttgagttggtttccatttgggctgcaggtgactcagtgactccctcctcaagctgtcctcctgctaagaccagcagtcacaaacccatggcaagggtgagtgtgaaggcctaaccctgtgcctatgtaataggctccaagcatcgactcccatcctgagaggaccggcccttttgacactcaccaaccaaatctgttcattcgatagagtgaccaggcctccctcacctgcccaggtgtatgatcctacagttcctgccttctctcctaccccgcacagctgccaactggtcctacatcctcagcccctctgccaccaccttaaataggactttactgattccccaactttgtttttttgtaggatgagatttcctttttatcccacccccccacaccccaaacagacattgctggagggcagactggaggaaggggaaggcatgcaggtaaattactgccttgtcagcctctgaccctcatctctcagaattgttggctgagaattaacccaaggaccacaccagtgcctgatttctacttagggagagaggattggaaacgatccctaagaaactgactgagggtgagaatggccaggaggtgtgtgtccaaataaccaggagggggcacagaagatgatggcaaggcagactgggcagtgttttgtagacacagaacaaagaatcagaatttgaaaaaagaagaaaaacaaatcttcgcagctgcaactttaaagtatcacctttatagatggcagggatttccattatgcaaatggaatctaagatttcaatgtgaaatcttagaatgcagttttaccacttgcagtcttgtatttgtggtggccatgtggtgagggcggtgatgctgagctttctgcccaggaggaatgagctttcaagctctcagcagggtgtcaggcttggggatttgagcatccactgctcaaagtccaggctattctccagtcctcacggcagccactaagcccaggagccagacctggcccggggacacatctcctgagggatcccagaaagaacccagtctttcctttcccttggggtccttgttagaatgaaaacctctctatttaaggcacatcattcccagctaggtttatacacttgtctatattttactggaggaaagggaattaaaaaagaactctgcagttcaaggccctttcatttaaccttccaaaaacagcaaactcattttaaagactcattgctgaggtgatagagagaaaccttatcctctccaaccttcacattcacaaaaaccatccttgtgtacttgactgccctagacagtggtgactcttaggtttcattacgaatgtggaatatcagagtgtgggaaggcccaggcgagggccaatgttgtgtttcttaccccctctggaatgccaaaggcaaggtactaggtgacctcctggtccccaagaaaatgtgatttattctgagggcgaacagccaagggaggactagtctggagcacgctcggccgtcctggcaggagctgagcctcaggtgtctggcggtgccccagcagccctggattcacccaacaccagaatcccacttttctaaatccacctgttgttctgagcacctctgaacccgcagcttcggcaaaaggagtctgtaccaagctgcttctggatgaccaacactggagactctggccttaccatgtggaaatcattttcctgaagtctggaactaattttgagaagtttttttctcaacacttttgtgtttctaacactgtatcttgactgtgtaaataccaacaaggctgtaaataaatgcagatgtagataccttctagaaaaaaaaaagcataaaaacaaaaccagaagtgatcccgtgtagccttcgttgacaaataaagactattttgtgttt

SEQ ID NO: 9138 - protein, 994 aa, Homo sapiens; identical to SEQ ID NO: 9136

SEQ ID NO: 9139 - DNA, 8974 bp, Homo sapiens
cgcatcgatcagaatgggatcatctccaccctgctcggctctaatgatctcacatcagcccggccactcagctgtgattctgtcatggatatttcccaggttcacctggagtggcccacagacttagccatcaacccaatggacaactcactttatgtcctcgacaacaatgtggtcctgcaaatctctgaaaaccaccaggtgcgcattgtcgccgggaggcccatgcactgccaggtccctggcattgaccacttcctgctaagcaaggtggccatccacgcaaccctggagtcagccaccgctttggctgtttcacacaatggggtcctgtatattgctgagactgatgagaaaaagatcaaccgcatcaggcaggtcaccactagtggagagatctcactcgttgctggggcccccagtggctgtgactgtaaaaatgatgccaactgtgattgtttttctggagacgatggttatgccaaggatgcaaagttaaataccccatcttccttggctgtgtgtgctgatggggagctctacgtggccgaccttgggaacatccgaattcggtttatccggaagaacaagcctttcctcaacacccagaacatgtatgagctgtcttcaccaattgaccaggagctctatctgtttgataccaccggcaagcacctgtacacccaaagcctgcccacaggagactacctgtacaacttcacctacactggggacggcgacatcacactcatcacagacaacaatggcaacatggtaaatgtccgccgagactctactgggatgcccctctggctggtggtcccagatggccaggtgtactgggtgaccatgggcaccaacagtgcactcaagagtgtgaccacacaaggacacgagttggccatgatgacataccatggcaattccggccttctggcaaccaaaagcaatgaaaacggatggacaacattttatgagtacgacagctttggccgcctgacaaatgtgaccttccctactggccaggtgagcagtttccgaagtgatacagacagttcagtgcatgtccaggtagagacctccagcaaggatgatgtcaccataaccaccaacctgtctgcctcaggcgccttctacacactgctgcaagaccaagtccggaacagctactacatcggggccgatggctccttgcggctgctgctggccaacggcatggaggtggcgctgcagactgagccccacttgctggctggcaccgtcaaccccaccgtgggcaagaggaatgtcacgctgcccatcgacaacggcctcaacctggtggagtggcgccagcgcaaagagcaggctcggggccaggtcactgtctttgggcgccggctgcgggttcacaaccgaaatctcctatctctggactttgatcgcgtaacacgcacagagaagatctatgatgaccaccgcaagttcacccttcggattctgtacgaccaggcggggcggcccagcctctggtcacccagcagcaggctgaatggtgtcaacgtgacatactcccctgggggttacattgctggcatccagaggggcatcatgtctgaaagaatggaatacgaccaggcgggccgcatcacatccaggatcttcgctgatgggaagacatggagctacacatacttagagaagtccatggtgctgctactacacagccagaggcagtatatctttgagttcgacaagaatgaccgcctctcttctgtgacgatgcccaacgtggcgcggcagacactagagaccatccgctcagtgggctactacagaaacatctatcagccccctgagggcaatgcctcagtcatacaggacttcactgaggatgggcacctccttcacaccttctacctgggcactggccgcagggtgatatacaagtatggcaaactgtcaaagctggcagagacgctctatgacaccaccaaggtcagtttcacctatgacgagacggcaggcatgctgaagaccatcaacctacagaatgagggcttcacctgcaccatccgctaccgtcagattgggcccctgattgaccgacagatcttccgcttcactgaggaaggcatggtcaacgcccgttttgactacaactatgacaacagcttccgggtgaccagcatgcaggctgtgatcaacgagaccccactgcccattgatctctatcgctatgatgatgtgtcaggcaagacagagcagtttgggaagtttggtgtcatttactatgacattaaccagatcatcaccacagctgtcatgacccacaccaagcattttgatgcatatggcaggatgaaggaagtgcagtatgagatcttccgctcgctcatgtactggatgaccgtccagtatgataacatggggcgagtagtgaagaaggagctgaaggtaggaccctacgccaataccactcgctactcctatgagtatgatgctgacggccagctgcagacagtctccatcaatgacaagccactctggcgctacagctacgacctcaatgggaacctgcacttactgagccctgggaacagtgcacggctcacaccactacggtatgacatccgcgaccgcatcactcggctgggtgacgtgcaatacaagatggatgaggatggcttcctgaggcagcggggcggtgatatctttgagtacaactcagctggcctgctcatcaaggcctacaaccgggctggcagctggagtgtcaggtaccgctacgatggcctggggcggcgcgtgtccagcaagagcagccacagccaccacctgcagttcttctatgcagacctgaccaaccccaccaaggtcacccacctgtacaaccactccagctctgagatcacctccctctactacgacttgcaaggacacctctttgccatggagctgagcagtggtgatgagttttacatagcttgtgacaacatcgggacccctcttgctgtctttagtggaacaggtttgatgatcaagcaaatcctgtacacagcctatggggagatctacatggataccaaccccaactttcagatcatcataggctaccatggtggcctctatgatccactcaccaagcttgtccacatgggccggcgagattatgatgtgctggccggacgctggactagcccagaccacgagctgtggaagcaccttagtagcagcaacgtcatgccttttaatctctatatgttcaaaaacaacaaccccatcagcaactcccaggacatcaagtgcttcatgacagatgttaacagctggctgctcacctttggattccagctacacaacgtgatccctggttatcccaaaccagacatggatgccatggaaccctcctacgagctcatccacacacagatgaaaacgcaggagtgggacaacagcaagtctatcctcggggtacagtgtgaagtacagaagcagctcaaggcctttgtcaccttagaacggtttgaccagctctatggctccacaatcaccagctgccagcaggctccaaagaccaagaagtttgcatccagcggctcagtctttggcaagggggtcaagtttgccttgaaggatggccgagtgaccacagacatcatcagtgtggccaatgaggatgggcgaagggttgctgccatcttgaaccatgcccactacctagagaacctgcacttcaccattgatggggtggatacccattactttgtgaaaccaggaccttcagaaggtgacctggccatcctgggcctcagtggggggcggcgaaccctggagaatggggtcaacgtcactgtgtcccagatcaacacagtacttaatggcaggactagacgctacacagacatccagctccagtacggggcactgtgcttgaacacacgctacgggacaacgttggatgaggagaaggcacgggtcctggagctggcccggcagagagccgtgcgccaagcgtgggcccgcgagcagcagagactgcgggaaggggaggaaggcctgcgggcctggacagagggggagaagcagcaggtgctgagcacagggcgggtgcaaggctacgacggctttttcgtgatctctgtcgagcagtacccagaactgtcagacagcgccaacaacatccacttcatgagacagagcgagatgggccggaggtgacagagaggaccaaggacttcttgccaaagacagctactcttttgtggccgcatacctgactgtgttgtacttttaaaaaaatgattttttaacaagtgcagaaacaaaaagatactggttgcattgtaactcatgcaacatccttttttttagaaaagaaaaacacagatttggccttcgcacattttttgcaaagaacagaaggtatttttttctgtagtgtgatcacaatgaaaactttattgtcttttgttccctttttccttgaggatttttcccttgtcgtttggggtatgtatctcctctctgagatgcatctcctggggtgtgtcctcgtctgtccctaggtacccagtgtgatgtgggacatgaatgtctgtgctaacttgtctcatgtgcaaccctttcttcttcgactggggtcgggcaggagtaaagggagtgatgggccagtacaacaccccttccaagggggcctgggaggagggtctgtaggacctgaggctccttggcagggctcctgcagaagagtggtggatttcttctcaccttgttctctgcctccagaggatcatagatggcttcatcttgctccagggaatttcatggtgttgttcagcaccttttttaagctgccccaaactcctgttcaagctttctattttgatgctgaatgaaaccccctaccacttttgcaaatcctgtgtagttgtcggtgccacccccatgctgggatagagaaagtgtctcccaggtcctttcccccagaccagtgacataacatcctgggctcagagtcccatcctcccgggagggaaagcacccaggatgcctgtgattggttggtcctccatgatgttcctgttcatctcctcctttctcccaaagccagatgtgagaacgagcactgcacagcaagccttcaatgtgggcaccatgtccacagaacagaaggccacccatggcaaaggcatggcagtggtggcgagggcaccagcctgccttccgaggcaaagccctctctctatgactttgagtatcttccctccaccactcagccgccaccactgagacgtaggaatgtggagggaggtgcttggtggcctttgattctggaaaaatgcttaacaaaaaaagccagccaaagagaggaaggcataagctaagcatccttctaaccagttcccaaagtcccatctgcctccatgtaccagctgatcgcagagctggactggggcaggctgggcttccaggaaattcctgaagttctgaaacagcttcccctctagagaagcccacccaatgtgttttttagtgacaggaagaaaggagggaagagctgatgtggtgtggcctgcccatatcatacaaccccaccaggagcagggcagttcccaaggtgggtgcccgtagatctgggaggccaggctggcatgattcctgtgaagaactgtgcctgtgtcgtcagggagaggcctgagccctctcagaagcagggacagcccacacctgaagagcacgcccaagctgaggcagcagccagcaggctgggggagcagtgagggcagggggagtcacagccagagctgggagccccttgttcaaggattccattcctggttcatccgcctaattaccattgtcattaccactcacaggaggctctgggagatgggaggggaagccaaatgcttccttttaagctgggcttcttagaaaatggaacttttatgggttacatttacattaagtgtggaaaatgaattctgagtctgagctattccccgtggaaaccttgttggactgataagctcatggcacctctatagccttactcacatagtcttcagaatattacacaagttaatgaaactgagaaggtctgactgcatgaggatcggagcagcatgtagtctgggttctgcctggcagagggaggcaaccaaaacttcttggggagaggagatttcgccttaacgtcatcccactgggattagaggatgtgtttcgctaagtgctcttcctgtttccaaaaaaaaagccaccctgctgcagcagtgcgctttggcctgcttgtccactggttgcccattgcccctggatccagagctctactgagtcagatacagtgctctgcaggcctgctgtgggaggcatgagctggagatgggggctcccatctggcaggatcattcttggatgagatggaaaacagtttggcctgaagaacacaagttttgtcctccagaagggacttacgcctctcaaaatgtactcttcataccaagggcccttgggcaaagtgctcctgcccagttgatcagtcccatcctggctgcctgacatcagtgaagacctgctggggatgtctgctcagaggtcaggaacggcatgcggtccacaggaaccagctccctacgcttcccccacgccctgtccctcctccacagccccctccccaaaggaatagggtggacttttagggatcaaaaacagaattattgggtgtttcatttatttttttctttctttcttttttttttcatagagatggggtctcactatgttgcccaggctgttctcaaactcctggcctcaggcgatccaccttggcctcctgaagtgctggggttacaggtgtgagccactgcgcctggactgagtgtttgtttctttaaaggatcttatatttttcctgtgctacataccaccacagcagcccagcttctgtggggagagaagttgaaggatcccgaagctttagaaaaaggatctcagctgtggcacaggcagtgttatgcgcctcactgccacattggtgctgttgtattgaaggtggtgcttctggccttggcccttttgagttggtttccatttgggctgcaggtgactcagtgactccctcctcaagctgtcctcctgctaagaccagcagtcacaaacccatggcaagggtgagtgtgaaggcctaaccctgtgcctatgtaataggctccaagcatcgactcccatcctgagaggaccggcccttttgacactcaccaaccaaatctgttcattcgatagagtgaccaggcctccctcacctgcccaggtgtatgatcctacagttcctgccttctctcctaccccgcacagctgccaactggtcctacatcctcagcccctctgccaccaccttaaataggactttactgattccccaactttgtttttttgtaggatgagatttcctttttatcccacccccccacaccccaaacagacattgctggagggcagactggaggaaggggaaggcatgcaggtaaattactgccttgtcagcctctgaccctcatctctcagaattgttggctgagaattaacccaaggaccacaccagtgcctgatttctacttagggagagaggattggaaacgatccctaagaaactgactgagggtgagaatggccaggaggtgtgtgtccaaataaccaggagggggcacagaagatgatggcaaggcagactgggcagtgttttgtagacacagaacaaagaatcagaatttgaaaaaagaagaaaaacaaatcttcgcagctgcaactttaaagtatcacctttatagatggcagggatttccattatgcaaatggaatctaagatttcaatgtgaaatcttagaatgcagttttaccacttgcagtcttgtatttgtggtggccatgtggtgagggcggtgatgctgagctttctgcccaggaggaatgagctttcaagctctcagcagggtgtcaggcttggggatttgagcatccactgctcaaagtccaggctattctccagtcctcacggcagccactaagcccaggagccagacctggcccggggacacatctcctgagggatcccagaaagaacccagtctttcctttcccttggggtccttgttagaatgaaaacctctctatttaaggcacatcattcccagctaggtttatacacttgtctatattttactggaggaaagggaattaaaaaagaactctgcagttcaaggccctttcatttaaccttccaaaaacagcaaactcattttaaagactcattgctgaggtgatagagagaaaccttatcctctccaaccttcacattcacaaaaaccatccttgtgtacttgactgccctagacagtggtgactcttaggtttcattacgaatgtggaatatcagagtgtgggaaggcccaggcgagggccaatgttgtgtttcttaccccctctggaatgccaaaggcaaggtactaggtgacctcctggtccccaagaaaatgtgatttattctgagggcgaacagccaagggaggactagtctggagcacgctcggccgtcctggcaggagctgagcctcaggtgtctggcggtgccccagcagccctggattcacccaacaccagaatcccacttttctaaatccacctgttgttctgagcacctctgaacccgcagcttcggcaaaaggagtctgtaccaagctgcttctggatgaccaacactggagactctggccttaccatgtggaaatcattttcctgaagtctggaactaattttgagaagtttttttctcaacacttttgtgtttctaacactgtatcttgactgtgtaaataccaacaaggctgtaaataaatgcagatgtagataccttctagaaaaaaaaaagcataaaaacaaaaccagaagtgatcccgtgtagccttcgttgacaaataaagactattttgtgttt

SEQ ID NO: 9140 - protein, 1371 aa, Homo sapiens
MDISQVHLEWPTDLAINPMDNSLYVLDNNVVLQISENHQVRIVAGRPMHCQVPGIDHFLLSKVAIHATLESATALAVSHNGVLYIAETDEKKINRIRQVTTSGEISLVAGAPSGCDCKNDANCDCFSGDDGYAKDAKLNTPSSLAVCADGELYVADLGNIRIRFIRKNKPFLNTQNMYELSSPIDQELYLFDTTGKHLYTQSLPTGDYLYNFTYTGDGDITLITDNNGNMVNVRRDSTGMPLWLVVPDGQVYWVTMGTNSALKSVTTQGHELAMMTYHGNSGLLATKSNENGWTTFYEYDSFGRLTNVTFPTGQVSSFRSDTDSSVHVQVETSSKDDVTITTNLSASGAFYTLLQDQVRNSYYIGADGSLRLLLANGMEVALQTEPHLLAGTVNPTVGKRNVTLPIDNGLNLVEWRQRKEQARGQVTVFGRRLRVHNRNLLSLDFDRVTRTEKIYDDHRKFTLRILYDQAGRPSLWSPSSRLNGVNVTYSPGGYIAGIQRGIMSERMEYDQAGRITSRIFADGKTWSYTYLEKSMVLLLHSQRQYIFEFDKNDRLSSVTMPNVARQTLETIRSVGYYRNIYQPPEGNASVIQDFTEDGHLLHTFYLGTGRRVIYKYGKLSKLAETLYDTTKVSFTYDETAGMLKTINLQNEGFTCTIRYRQIGPLIDRQIFRFTEEGMVNARFDYNYDNSFRVTSMQAVINETPLPIDLYRYDDVSGKTEQFGKFGVIYYDINQIITTAVMTHTKHFDAYGRMKEVQYEIFRSLMYWMTVQYDNMGRVVKKELKVGPYANTTRYSYEYDADGQLQTVSINDKPLWRYSYDLNGNLHLLSPGNSARLTPLRYDIRDRITRLGDVQYKMDEDGFLRQRGGDIFEYNSAGLLIKAYNRAGSWSVRYRYDGLGRRVSSKSSHSHHLQFFYADLTNPTKVTHLYNHSSSEITSLYYDLQGHLFAMELSSGDEFYIACDNIGTPLAVFSGTGLMIKQILYTAYGEIYMDTNPNFQIIIGYHGGLYDPLTKLVHMGRRDYDVLAGRWTSPDHELWKHLSSSNVMPFNLYMFKNNNPISNSQDIKCFMTDVNSWLLTFGFQLHNVIPGYPKPDMDAMEPSYELIHTQMKTQEWDNSKSILGVQCEVQKQLKAFVTLERFDQLYGSTITSCQQAPKTKKFASSGSVFGKGVKFALKDGRVTTDIISVANEDGRRVAAILNHAHYLENLHFTIDGVDTHYFVKPGPSEGDLAILGLSGGRRTLENGVNVTVSQINTVLNGRTRRYTDIQLQYGALCLNTRYGTTLDEEKARVLELARQRAVRQAWAREQQRLREGEEGLRAWTEGEKQQVLSTGRVQGYDGFFVISVEQYPELSDSANNIHFMRQSEMGRR

SEQ ID NO: 9141 - DNA, 3133 bp, Homo sapiens
aataccccatcttccttggctgtgtgtgctgatggggagctctacgtggccgaccttgggaacatccgaattcggtttatccggaagaacaagcctttcctcaacacccagaacatgtatgagctgtcttcaccaattgaccaggagctctatctgtttgataccaccggcaagcacctgtacacccaaagcctgcccacaggagactacctgtacaacttcacctacactggggacggcgacatcacactcatcacagacaacaatggcaacatggtaaatgtccgccgagactctactgggatgcccctctggctggtggtcccagatggccaggtgtactgggtgaccatgggcaccaacagtgcactcaagagtgtgaccacacaaggacacgagttggccatgatgacataccatggcaattccggccttctggcaaccaaaagcaatgaaaacggatggacaacattttatgagtacgacagctttggccgcctgacaaatgtgaccttccctactggccaggtgagcagtttccgaagtgatacagacagttcagtgcatgtccaggtagagacctccagcaaggatgatgtcaccataaccaccaacctgtctgcctcaggcgccttctacacactgctgcaagaccaagtccggaacagctactacatcggggccgatggctccttgcggctgctgctggccaacggcatggaggtggcgctgcagactgagccccacttgctggctggcaccgtcaaccccaccgtgggcaagaggaatgtcacgctgcccatcgacaacggcctcaacctggtggagtggcgccagcgcaaagagcaggctcggggccaggtcactgtctttgggcgccggctgcgggttcacaaccgaaatctcctatctctggactttgatcgcgtaacacgcacagagaagatctatgatgaccaccgcaagttcacccttcggattctgtacgaccaggcggggcggcccagcctctggtcacccagcagcaggctgaatggtgtcaacgtgacatactcccctgggggttacattgctggcatccagaggggcatcatgtctgaaagaatggaatacgaccaggcgggccgcatcacatccaggatcttcgctgatgggaagacatggagctacacatacttagagaagtccatggtgctgctactacacagccagaggcagtatatctttgagttcgacaagaatgaccgcctctcttctgtgacgatgcccaacgtggcgcggcagacactagagaccatccgctcagtgggctactacagaaacatctatcagccccctgagggcaatgcctcagtcatacaggacttcactgaggatgggcacctccttcacaccttctacctgggcactggccgcagggtgatatacaagtatggcaaactgtcaaagctggcagagacgctctatgacaccaccaaggtcagtttcacctatgacgagacggcaggcatgctgaagaccatcaacctacagaatgagggcttcacctgcaccatccgctaccgtcagattgggcccctgattgaccgacagatcttccgcttcactgaggaaggcatggtcaacgcccgttttgactacaactatgacaacagcttccgggtgaccagcatgcaggctgtgatcaacgagaccccactgcccattgatctctatcgctatgatgatgtgtcaggcaagacagagcagtttgggaagtttggtgtcatttactatgacattaaccagatcatcaccacagctgtcatgacccacaccaagcattttgatgcatatggcaggatgaaggaagtgcagtatgagatcttccgctcgctcatgtactggatgaccgtccagtatgataacatggggcgagtagtgaagaaggagctgaaggtaggaccctacgccaataccactcgctactcctatgagtatgatgctgacggccagctgcagacagtctccatcaatgacaagccactctggcgctacagctacgacctcaatgggaacctgcacttactgagccctgggaacagtgcacggctcacaccactacggtatgacatccgcgaccgcatcactcggctgggtgacgtgcaatacaagatggatgaggatggcttcctgaggcagcggggcggtgatatctttgagtacaactcagctggcctgctcatcaaggcctacaaccgggctggcagctggagtgtcaggtaccgctacgatggcctggggcggcgcgtgtccagcaagagcagccacagccaccacctgcagttcttctatgcagacctgaccaaccccaccaaggtcacccacctgtacaaccactccagctctgagatcacctccctctactacgacttgcaaggacacctctttgccatggagctgagcagtggtgatgagttttacatagcttgtgacaacatcgggacccctcttgctgtctttagtggaacaggtttgatgatcaagcaaatcctgtacacagcctatggggagatctacatggataccaaccccaactttcagatcatcataggctaccatggtggcctctatgatccactcaccaagcttgtccacatgggccggcgagattatgatgtgctggccggacgctggactagcccagaccacgagctgtggaagcaccttagtagcagcaacgtcatgccttttaatctctatatgttcaaaaacaacaaccccatcagcaactcccaggacatcaagtgcttcatgacagagaggaccaaggacttcttgccaaagacagctactcttttgtggccgcatacctgactgtgttgtacttttaaaaaaatgattttttaacaagtgcagaaacaaaaagatactggttgcattgtaactcatgcaacatccttttttttagaaaagaaaaacacagatttggccttcgcacattttttgcaaagaacagaaggtatttttttctgtagtgtgatcacaatgaaaactttattgtcttttgttccctttttccttgaggatttttcccttgtcgtttggggtatgtatctcctctctgagatgcatctcctggggtgtgtcctcg

SEQ ID NO: 9142 - protein, 913 aa, Homo sapiens
MYELSSPIDQELYLFDTTGKHLYTQSLPTGDYLYNFTYTGDGDITLITDNNGNMVNVRRDSTGMPLWLVVPDGQVYWVTMGTNSALKSVTTQGHELAMMTYHGNSGLLATKSNENGWTTFYEYDSFGRLTNVTFPTGQVSSFRSDTDSSVHVQVETSSKDDVTITTNLSASGAFYTLLQDQVRNSYYIGADGSLRLLLANGMEVALQTEPHLLAGTVNPTVGKRNVTLPIDNGLNLVEWRQRKEQARGQVTVFGRRLRVHNRNLLSLDFDRVTRTEKIYDDHRKFTLRILYDQAGRPSLWSPSSRLNGVNVTYSPGGYIAGIQRGIMSERMEYDQAGRITSRIFADGKTWSYTYLEKSMVLLLHSQRQYIFEFDKNDRLSSVTMPNVARQTLETIRSVGYYRNIYQPPEGNASVIQDFTEDGHLLHTFYLGTGRRVIYKYGKLSKLAETLYDTTKVSFTYDETAGMLKTINLQNEGFTCTIRYRQIGPLIDRQIFRFTEEGMVNARFDYNYDNSFRVTSMQAVINETPLPIDLYRYDDVSGKTEQFGKFGVIYYDINQIITTAVMTHTKHFDAYGRMKEVQYEIFRSLMYWMTVQYDNMGRVVKKELKVGPYANTTRYSYEYDADGQLQTVSINDKPLWRYSYDLNGNLHLLSPGNSARLTPLRYDIRDRITRLGDVQYKMDEDGFLRQRGGDIFEYNSAGLLIKAYNRAGSWSVRYRYDGLGRRVSSKSSHSHHLQFFYADLTNPTKVTHLYNHSSSEITSLYYDLQGHLFAMELSSGDEFYIACDNIGTPLAVFSGTGLMIKQILYTAYGEIYMDTNPNFQIIIGYHGGLYDPLTKLVHMGRRDYDVLAGRWTSPDHELWKHLSSSNVMPFNLYMFKNNNPISNSQDIKCFMTERTKDFLPKTATLLWPHT

SEQ ID NO: 9143 - DNA, 3476 bp, Homo sapiens
cagctttggccgcctgacaaatgtgaccttccctactggccaggtgagcagtttccgaagtgatacagacagttcagtgcatgtccaggtagagacctccagcaaggatgatgtcaccataaccaccaacctgtctgcctcaggcgccttctacacactgctgcaagaccaagtccggaacagctactacatcggggccgatggctccttgcggctgctgctggccaacggcatggaggtggcgctgcagactgagccccacttgctggctggcaccgtcaaccccaccgtgggcaagaggaatgtcacgctgcccatcgacaacggcctcaacctggtggagtggcgccagcgcaaagagcaggctcggggccaggtcactgtctttgggcgccggctgcgggttcacaaccgaaatctcctatctctggactttgatcgcgtaacacgcacagagaagatctatgatgaccaccgcaagttcacccttcggattctgtacgaccaggcggggcggcccagcctctggtcacccagcagcaggctgaatggtgtcaacgtgacatactcccctgggggttacattgctggcatccagaggggcatcatgtctgaaagaatggaatacgaccaggcgggccgcatcacatccaggatcttcgctgatgggaagacatggagctacacatacttagagaagtccatggtgctgctactacacagccagaggcagtatatctttgagttcgacaagaatgaccgcctctcttctgtgacgatgcccaacgtggcgcggcagacactagagaccatccgctcagtgggctactacagaaacatctatcagccccctgagggcaatgcctcagtcatacaggacttcactgaggatgggcacctccttcacaccttctacctgggcactggccgcagggtgatatacaagtatggcaaactgtcaaagctggcagagacgctctatgacaccaccaaggtcagtttcacctatgacgagacggcaggcatgctgaagaccatcaacctacagaatgagggcttcacctgcaccatccgctaccgtcagattgggcccctgattgaccgacagatcttccgcttcactgaggaaggcatggtcaacgcccgttttgactacaactatgacaacagcttccgggtgaccagcatgcaggctgtgatcaacgagaccccactgcccattgatctctatcgctatgatgatgtgtcaggcaagacagagcagtttgggaagtttggtgtcatttactatgacattaaccagatcatcaccacagctgtcatgacccacaccaagcattttgatgcatatggcaggatgaaggaagtgcagtatgagatcttccgctcgctcatgtactggatgaccgtccagtatgataacatggggcgagtagtgaagaaggagctgaaggtaggaccctacgccaataccactcgctactcctatgagtatgatgctgacggccagctgcagacagtctccatcaatgacaagccactctggcgctacagctacgacctcaatgggaacctgcacttactgagccctgggaacagtgcacggctcacaccactacggtatgacatccgcgaccgcatcactcggctgggtgacgtgcaatacaagatggatgaggatggcttcctgaggcagcggggcggtgatatctttgagtacaactcagctggcctgctcatcaaggcctacaaccgggctggcagctggagtgtcaggtaccgctacgatggcctggggcggcgcgtgtccagcaagagcagccacagccaccacctgcagttcttctatgcagacctgaccaaccccaccaaggtcacccacctgtacaaccactccagctctgagatcacctccctctactacgacttgcaaggacacctctttgccatggagctgagcagtggtgatgagttttacatagcttgtgacaacatcgggacccctcttgctgtctttagtggaacaggtttgatgatcaagcaaatcctgtacacagcctatggggagatctacatggataccaaccccaactttcagatcatcataggctaccatggtggcctctatgatccactcaccaagcttgtccacatgggccggcgagattatgatgtgctggccggacgctggactagcccagaccacgagctgtggaagcaccttagtagcagcaacgtcatgccttttaatctctatatgttcaaaaacaacaaccccatcagcaactcccaggacatcaagtgcttcatgacagatgttaacagctggctgctcacctttggattccagctacacaacgtgatccctggttatcccaaaccagacatggatgccatggaaccctcctacgagctcatccacacacagatgaaaacgcaggagtgggacaacagcaagtctatcctcggggtacagtgtgaagtacagaagcagctcaaggcctttgtcaccttagaacggtttgaccagctctatggctccacaatcaccagctgccagcaggctccaaagaccaagaagtttgcatccagcggctcagtctttggcaagggggtcaagtttgccttgaaggatggccgagtgaccacagacatcatcagtgtggccaatgaggatgggcgaagggttgctgccatcttgaaccatgcccactacctagagaacctgcacttcaccattgatggggtggatacccattactttgtgaaaccaggaccttcagaaggtgacctggccatcctgggcctcagtggggggcggcgaaccctggagaatggggtcaacgtcactgtgtcccagatcaacacagtacttaatggcaggactagacgctacacagacatccagctccagtacggggcactgtgcttgaacacacgctacgggacaacgttggatgaggagaaggcacgggtcctggagctggcccggcagagagccgtgcgccaagcgtgggcccgcgagcagcagagactgcgggaaggggaggaaggcctgcgggcctggacagagggggagaagcagcaggtgctgagcacagggcgggtgcaaggctacgacggctttttcgtgatctctgtcgagcagtacccagaactgtcagacagcgccaacaacatccacttcatgagacagagcgagatgggccggaggtgacagagaggaccaaggacttcttgccaaagacagctactcttttgtggccgcatacctgactgtgttgtacttttaaaaaaatgattttttaacaagtgcagaaacaaaaagatactggttgcattgtaactcatgcaacatccttttttttagaaaagaaaaacacagatttggccttcgcacattttttgcaaagaacagaaggtatttttttctgtagtgtgatcacaatgaaaactttattgtcttttgttccctt

SEQ ID NO: 9144 - protein, 994 aa, Homo sapiens; identical to SEQ ID NO: 9136

SEQ ID NO: 9145 - DNA, 854 bp, Homo sapiens
aggcatccacccagccgagagcacgatggctactggggagctcggggacttgggtggctactacttcaggttcttgcctcagaaaaccttccagtctctgagctctaaggagatcaccagccggctccgccagtggtccatgctgggcagaatcaaggcgcaggcgttcggctttgaccagacctttcagtcctatcggaaggatgatttcgttatggcttttttcaaagacccaaatgttattcccaatttgaagttactttcagattcttctggacaatggatcatattaggaactgaagtgaaaaaaattgaagctataaatgttccttgcacacagctttcaatgtcattttttcatcggttatatgatgaagatattgtacgagacagtggacatattgttaaatgtttagattctttttgtgatccatttctcatttctgatgagttacgaagagttttgctagtggaagactcagaaaaatatgaaatattcagccaaccagatagagaagagttcctgttttgtcttttcaaacatctttgccttggtggagccctttgtcaatatgaggatgtgattagcccatatctggaaacaacaaagcttatctataaggatctggtgagtgttcgaaagaatcctcaaaccaagaaaatacagattacctcttctgtctttaaagtttcagcttatgtaagtgtgagagaacttttgcaaccaaagaatttaattactttttattaatagagttgttacaactggagttaacaatcaggacaatgttatgcctaggagaaaagacaatgttatttagagttttgttaaaattaaaagttgatagagtatg

SEQ ID NO: 9146 - protein, 241 aa, Homo sapiens
MATGELGDLGGYYFRFLPQKTFQSLSSKEITSRLRQWSMLGRIKAQAFGFDQTFQSYRKDDFVMAFFKDPNVIPNLKLLSDSSGQWIILGTEVKKIEAINVPCTQLSMSFFHRLYDEDIVRDSGHIVKCLDSFCDPFLISDELRRVLLVEDSEKYEIFSQPDREEFLFCLFKHLCLGGALCQYEDVISPYLETTKLIYKDLVSVRKNPQTKKIQITSSVFKVSAYVSVRELLQPKNLITFY

SEQ ID NO: 9147 - DNA, 1043 bp, Homo sapiens
aggcatccacccagccgagagcacgatggctactggggagctcggggacttgggtggctactacttcaggttcttgcctcagaaaaccttccagtctctgagctctaaggagatcaccagccggctccgccagtggtccatgctgggcagaatcaaggcgcaggcgttcggctttgaccagacctttcagtcctatcggaaggatgatttcgttatggcttttttcaaagacccaaatgttattcccaatttgaagttactttcagattcttctggacaatggatcatattaggaactgaagtgaaaaaaattgaagctataaatgttccttgcacacagctttcaatgtcattttttcatcggttatatgatgaagatattgtacgagacagtggacatattgttaaatgtttagattctttttgtgatccatttctcatttctgatgagttacgaagagttttgctagtggaagactcagaaaaatatgaaatattcagccaaccagatagagaagagttcctgttttgtcttttcaaacatctttgccttggtggagccctttgtcaatatgaggatgtgattagcccatatctggaaacaacaaagcttatctataaggatctggtgagtgttcgaaagaatcctcaaaccaagaaaatacagattacctcttctgtctttaaagtttcagcttatgattctgctggtatgtgctatccttcagcaaagaatcatgaacagacattttcttactttattgtggatcctatcaggcgtcaccttcatgttttataccactgttatggtgtgggagacatgtcttaatgttctttcagattatgtacctctactattttgtatttatcatttttctatcttaatactaacttatagataaacatatactttgcaaattaattcaagaaaaatgtaaggagcctacttagagcagaagaaagcaaacaccaagatgcctttttaaaaatttgtgtggaatactaaccggggatcaaatttcatccataataaaatctatacc

SEQ ID NO: 9148 - protein, 267 aa, Homo sapiens
MATGELGDLGGYYFRFLPQKTFQSLSSKEITSRLRQWSMLGRIKAQAFGFDQTFQSYRKDDFVMAFFKDPNVIPNLKLLSDSSGQWIILGTEVKKIEAINVPCTQLSMSFFHRLYDEDIVRDSGHIVKCLDSFCDPFLISDELRRVLLVEDSEKYEIFSQPDREEFLFCLFKHLCLGGALCQYEDVISPYLETTKLIYKDLVSVRKNPQTKKIQITSSVFKVSAYDSAGMCYPSAKNHEQTFSYFIVDPIRRHLHVLYHCYGVGDMS

SEQ ID NO: 9149 - DNA, 2190 bp, Homo sapiens
aggcatccacccagccgagagcacgatggctactggggagctcggggacttgggtggctactacttcaggttcttgcctcagaaaaccttccagtctctgagctctaaggagatcaccagccggctccgccagtggtccatgctgggcagaatcaaggcgcaggcgttcggctttgaccagacctttcagtcctatcggaaggatgatttcgttatggcttttttcaaagacccaaatgttattcccaatttgaagttactttcagattcttctggacaatggatcatattaggaactgaagtgaaaaaaattgaagctataaatgttccttgcacacagctttcaatgtcattttttcatcggttatatgatgaagatattgtacgagacagtggacatattgttaaatgtttagattctttttgtgatccatttctcatttctgatgagttacgaagagttttgctagtggaagactcagaaaaatatgaaatattcagccaaccagatagagaagagttcctgttttgtcttttcaaacatctttgccttggtggagccctttgtcaatatgaggatgtgattagcccatatctggaaacaacaaagcttatctataaggatctggtgagtgttcgaaagaatcctcaaaccaagaaaatacagattacctcttctgtctttaaagtttcagcttatgattctgctggtatgtgctatccttcagcaaagaatcatgaacagacattttcttactttattgtggatcctatcaggcgtcaccttcatgttttataccactgttatggtgtgggagacatgtcttaatgttctttcagattatgtacctctactattttgtatttatcatttttctatcttaatactaacttatagataaacatatactttgcaaattaattcaagaaaaatgtaaggagcctacttagagcagaagaaagcaaacaccaagatgcctttttaaaaatttgtgtggaatactaaccggggatcaaatttcatccataataaaatctataccaaaaaagttgtggaatttttacagaaagttacaaggaattagaaatctagttcatatttgttgcattgtgattcaagtgaatcctcaattttccatgtattttaatttataagctaattaattatggattgaaaatgtagcagaaaactaaacatgtctaccactgatcattaatatgaattgttagtttatttaacttgtttcatttaattacatttcttcattgcacaagcgtttacatctgtaaagctaggcaaagcataacaattcttttgcttcatttgttccacttataagcctcagtaaagaagtaacgttctggggcctggcacggtggctcacgcctgtaatctcagcactttgggaggccaaggcgggcggatcacgaggtcaagagatcgagaccatcctggccaacatggtgaaaccccgtctctaccaaaagtacaaaaattagctggctgtggtggtgtgtgcctgtagtcccagctactcaggaggctgaggcaagagaatcacttgaacccgggaagtgaggttgcagtgagccgaggctgtgccactgtactctagctctggcaacagagcaagactccgtctcagaaaaaaaaaaggttctgaaagtggttgtaaactcttgtatcacataataaattaaaactgcagctgtcccacggctaatacaagagctacatgtaaacagagaaagttgcctgatggcattagtaagtcgttcaaagagtgagaagcaggttatcttagtactgttccttatttcattcatagaatgaatgtataacctagattgtttttggtttattttgatggcaaaaatcattgacatatatcccatgggtcatgggaagcctgtaagaaatgttgaggtttgaggaggagcaagtttgaaagatgtgtttctgtgttgtgggataaagacgataatcttggacttgaacctggatttgaatctggaatgcagctggcaatttgggtatagagctcaggagaaagagtatgttttacttctaatacctaacacaatgacttggcatattaaatgtttattgaatgaataactactttctagatatcctcataatacccatagatttttttaaattacataaaaacataaaatcaagaactg

SEQ ID NO: 9150 - protein, 267 aa, Homo sapiens; identical to SEQ ID NO: 9148

SEQ ID NO: 9151 - DNA, 582 bp, Homo sapiens
agccgagagcacgatggctactggggagctcggggacttgggtggctactacttcaggttcttgcctcagaaaaccttccagtctctgagctctaaggagatcaccagccggctccgccagtggtccatgctgggcagaatcaaggcgcaggcgttcggctttgaccagacctttcagtcctatcggaaggatgatttcgttatggcttttttcaaagacccaaatgttattcccaatttgaagttactttcagattcttctggacaatggatcatattaggaactgaagtgaaaaaaattgaagctataaatgttccttgcacacagctttcaatgtcattttttcatcggttatatgatgaagatattgtacgagacagtggacatattgttaaatgtttagattctttttgtgatccatttctcatttctgatgagttacgaagactgcctggaaggctgaagtcccagctgctcggaaggctgaagtgagaagattgagtctgggaagtcaaggctgcaatgagctgtgatcatgccactgcactccaacctgggcgacagagcaagaccttgtctca

SEQ ID NO: 9152 - protein, 159 aa, Homo sapiens
MATGELGDLGGYYFRFLPQKTFQSLSSKEITSRLRQWSMLGRIKAQAFGFDQTFQSYRKDDFVMAFFKDPNVIPNLKLLSDSSGQWIILGTEVKKIEAINVPCTQLSMSFFHRLYDEDIVRDSGHIVKCLDSFCDPFLISDELRRLPGRLKSQLLGRLK

SEQ ID NO: 9153 - DNA, 519 bp, Homo sapiens
agccgagagcacgatggctactggggagctcggggacttgggtggctactacttcaggttcttgcctcagaaaaccttccagtctctgagctctaaggagatcaccagccggctccgccagtggtccatgctgggcagaatcaaggcgcaggcgttcggctttgaccagacctttcagtcctatcggaaggatgatttcgttatggcttttttcaaagacccaaatgttattcccaatttgaagttactttcagattcttctggacaatggatcatattaggttttgctagtggaagactcagaaaaatatgaaatattcagccaaccagatagagaagagttcctgttttgtcttttcaaacatctttgccttggtggagccctttgtcaatatgaggatgtgattagcccatatctggaaacaacaaagcttatctataaggatctggtgaggtaatgttgctagatcacaatatgtaaatctctagttaatagaataaattatttgcttaaccttg

SEQ ID NO: 9154 - protein, 99 aa, Homo sapiens
MATGELGDLGGYYFRFLPQKTFQSLSSKEITSRLRQWSMLGRIKAQAFGFDQTFQSYRKDDFVMAFFKDPNVIPNLKLLSDSSGQWIILGFASGRLRKI

SEQ ID NO: 9155 - DNA, 1264 bp, Homo sapiens
gccgagagcacgatggctactggggagctcggggacttgggtggctactacttcaggttcttgcctcagaaaaccttccagtctctgagctctaaggagatcaccagccggctccgccagtggtgaggaaccgaggcacagggagagaagaggcccttggtcttcgcggctgtggaggcgcaggccgggcgtcgaggggcccgcgcgggtcggcgccattctgagtgaaccctgaggcttcctgagtgaaccccgaaccacccgggaagggcggatgctgtgggtgggatcggttatcggtgcgctctgagagggtgccagcccccagatgatttctttttcctcctctgccccaggtccatgctgggcagaatcaaggcgcaggcgttcggctttgaccagacctttcagtcctatcggaaggatgatttcgttatggcttttttcaaagacccaaatgttattcccaatttgaagttactttcagattcttctggacaatggatcatattaggaactgaagtgaaaaaaattgaagctataaatgttccttgcacacagctttcaatgtcattttttcatcggttatatgatgaagatattgtacgagacagtggacatattgttaaatgtttagattctttttgtgatccatttctcatttctgatgagttacgaagagttttgctagtggaagactcagaaaaatatgaaatattcagccaaccagatagagaagagttcctgttttgtcttttcaaacatctttgccttggtggagccctttgtcaatatgaggatgtgattagcccatatctggaaacaacaaagcttatctataaggatctggtgagtgttcgaaagaatcctcaaaccaagaaaatacagattacctcttctgtctttaaagtttcagcttatgattctgctggtatgtgctatccttcagcaaagaatcatgaacagacattttcttactttattgtggatcctatcaggcgtcaccttcatgttttataccactgttatggtgtgggagacatgtcttaatgttctttcagattatgtacctctactattttgtatttatcatttttctatcttaatactaacttatagataaacatatactttgcaaattaattcaagaaaaatgtaaggagcctacttagagcagaagaaagcaaacaccaagatgcctttttaaaaatttgtgtggaatactaaccggggatcaaatttcatccataataaaatctatacc

SEQ ID NO: 9156 - protein, 229 aa, Homo sapiens; identical to SEQ ID NO: 1396

SEQ ID NO: 9157 - DNA, 577 bp, Homo sapiens
atggcttctgcctcccccgacgcgcaccccctgacccaggcgagcgagggctacgcccggacgccccggctccacgggccgagcgcagggaaacttttcgctgcaagttgctacattcctgcacactcccggcccgcggcgcctctcccggccgcacgtgacccgctcgccctggcccggtccgcccttcgcccgcgctcagccgggcaggggcccgaagcgtgccccgtattctgccccgcgaaccgcaaacgatgggtccaatccgggtccgaactgtggtgtctgcggagaacgcgggcgcccttggctgcaggaagttcttccgctccgctcggccccttttccccgcccgtgctcgggaaaggcgcttccagttcgcctggacctgcgaaagggccaaggccgaaagaagtggagagaggatgtgcgaacccacctcctcctcctcgcgttaccccggcttgaccgagcggagcgcctgtgcgagcttaaagccgcgaggatagattggagttaaaatagataccgtgagccggcattgatgttaataaagatccattgttttcagcattaa

SEQ ID NO: 9158 - protein, 155 aa, Homo sapiens
MASASPDAHPLTQASEGYARTPRLHGPSAGKLFAASCYIPAHSRPAAPLPAARDPLALARSALRPRSAGQGPEACPVFCPANRKRWVQSGSELWCLRRTRAPLAAGSSSAPLGPFSPPVLGKGASSSPGPAKGPRPKEVERGCANPPPPPRVTPA

SEQ ID NO: 9159 - DNA, 2362 bp, Homo sapiens
agtcgggcgcagccgccgccagggaaaagaaagggaggaaggaaggaacaagaaaaggaaataaagagaaaggggaggcggggaaaggcaacgagctgtccggcctccgtcaagggagttggagggaaaaagttctcaggcgccgcaggtccgagtgcctcgcagcccctcccgaggcgcagccgccagaccagtggagccggggcgcagggcgggggcggaggcgccggggcgggggatgcggggccgcggcgcagccccccggccctgagagcgaggacagcgccgcccggcccgcagccgtcgccgcttctccacctcggcccgtggagccggggcgtccgggcgtagccctcgctcgcctgggtcagggggtgcgcgtcgggggaggcagaagccatggatcccgggcagcagccgccgcctcaaccggccccccagggccaagggcagccgccttcgcagcccccgcaggggcagggcccgccgtccggacccgggcaaccggcacccgcggcgacccaggcggcgccgcaggcaccccccgccgggcatcagatcgtgcacgtccgcggggactcggagaccgacctggaggcgctcttcaacgccgtcatgaaccccaagacggccaacgtgccccagaccgtgcccatgaggctccggaagctgcccgactccttcttcaagccgccggagcccaaatcccactcccgacaggccagtactgatgcaggcactgcaggagccctgactccacagcatgttcgagctcattcctctccagcttctctgcagttgggagctgtttctcctgggacactgacccccactggagtagtctctggcccagcagctacacccacagctcagcatcttcgacagtcttcttttgagatacctgatgatgtacctctgccagcaggttgggagatggcaaagacatcttctggtcagagatacttcttaaatcacatcgatcagacaacaacatggcaggaccccaggaaggccatgctgtcccagatgaacgtcacagcccccaccagtccaccagtgcagcagaatatgatgaactcggcttcaggtcctcttcctgatggatgggaacaagccatgactcaggatggagaaatttactatataaaccataagaacaagaccacctcttggctagacccaaggcttgaccctcgttttgccatgaaccagagaatcagtcagagtgctccagtgaaacagccaccacccctggctccccagagcccacagggaggcgtcatgggtggcagcaactccaaccagcagcaacagatgcgactgcagcaactgcagatggagaaggagaggctgcggctgaaacagcaagaactgcttcggcaggagttagccctgcgtagccagttaccaacactggagcaggatggtgggactcaaaatccagtgtcttctcccgggatgtctcaggaattgagaacaatgacgaccaatagctcagatcctttccttaacagtggcacctatcactctcgagatgagagtacagacagtggactaagcatgagcagctacagtgtccctcgaaccccagatgacttcctgaacagtgtggatgagatggatacaggtgatactatcaaccaaagcaccctgccctcacagcagaaccgtttcccagactaccttgaagccattcctgggacaaatgtggaccttggaacactggaaggagatggaatgaacatagaaggagaggagctgatgccaagtctgcaggaagctttgagttctgacatccttaatgacatggagtctgttttggctgccaccaagctagataaagaaagctttcttacatggttatagagccctcaggcagactgaattctaaatctgtgaaggatctaaggagacacatgcaccggaaatttccataagccagttgcagttttcaggctaatacagaaaaagatgaacaaacgtccagcaagatactttaatcctctattttgctcttccttgtccattgctgctgttaatgtattgctgacctctttcacagttggctctaaagaatcaaaagaaaaaaactttttatttcttttgctattaaaactactgttcattttgggggctgggggaagtgagcctgtttggatgatggatgccattccttttgcccagttaaatgttcaccaatcattttaactaaatactcagacttagaagtcagatgcttcatgtcacagcatttagtttgttcaacagttgtttcttcagcttcctttgtccagtggaaaaacatgatttactggtctgacaagccaaaaatgttatatctgatattaaatacttaatgctg

SEQ ID NO: 9160 - protein, 488 aa, Homo sapiens
MDPGQQPPPQPAPQGQGQPPSQPPQGQGPPSGPGQPAPAATQAAPQAPPAGHQIVHVRGDSETDLEALFNAVMNPKTANVPQTVPMRLRKLPDSFFKPPEPKSHSRQASTDAGTAGALTPQHVRAHSSPASLQLGAVSPGTLTPTGVVSGPAATPTAQHLRQSSFEIPDDVPLPAGWEMAKTSSGQRYFLNHIDQTTTWQDPRKAMLSQMNVTAPTSPPVQQNMMNSASGPLPDGWEQAMTQDGEIYYINHKNKTTSWLDPRLDPRFAMNQRISQSAPVKQPPPLAPQSPQGGVMGGSNSNQQQQMRLQQLQMEKERLRLKQQELLRQELALRSQLPTLEQDGGTQNPVSSPGMSQELRTMTTNSSDPFLNSGTYHSRDESTDSGLSMSSYSVPRTPDDFLNSVDEMDTGDTINQSTLPSQQNRFPDYLEAIPGTNVDLGTLEGDGMNIEGEELMPSLQEALSSDILNDMESVLAATKLDKESFLTWL

SEQ ID NO: 9161 - DNA, 2427 bp, Homo sapiens
agtcgggcgcagccgccgccagggaaaagaaagggaggaaggaaggaacaagaaaaggaaataaagagaaaggggaggcggggaaaggcaacgagctgtccggcctccgtcaagggagttggagggaaaaagttctcaggcgccgcaggtccgagtgcctcgcagcccctcccgaggcgcagccgccagaccagtggagccggggcgcagggcgggggcggaggcgccggggcgggggatgcggggccgcggcgcagccccccggccctgagagcgaggacagcgccgcccggcccgcagccgtcgccgcttctccacctcggcccgtggagccggggcgtccgggcgtagccctcgctcgcctgggtcagggggtgcgcgtcgggggaggcagaagccatggatcccgggcagcagccgccgcctcaaccggccccccagggccaagggcagccgccttcgcagcccccgcaggggcagggcccgccgtccggacccgggcaaccggcacccgcggcgacccaggcggcgccgcaggcaccccccgccgggcatcagatcgtgcacgtccgcggggactcggagaccgacctggaggcgctcttcaacgccgtcatgaaccccaagacggccaacgtgccccagaccgtgcccatgaggctccggaagctgcccgactccttcttcaagccgccggagcccaaatcccactcccgacaggccagtactgatgcaggcactgcaggagccctgactccacagcatgttcgagctcattcctctccagcttctctgcagttgggagctgtttctcctgggacactgacccccactggagtagtctctggcccagcagctacacccacagctcagcatcttcgacagtcttcttttgagatacctgatgatgtacctctgccagcaggttgggagatggcaaagacatcttctggtcagagatacttcttaaatcacatcgatcagacaacaacatggcaggaccccaggaaggccatgctgtcccagatgaacgtcacagcccccaccagtccaccagtgcagcagaatatgatgaactcggcttcaggtcctcttcctgatggatgggaacaagccatgactcaggatggagaaatttactatataaaccataagaacaagaccacctcttggctagacccaaggcttgaccctcgttttgccatgaaccagagaatcagtcagagtgctccagtgaaacagccaccacccctggctccccagagcccacagggaggcgtcatgggtggcagcaactccaaccagcagcaacagatgcgactgcagcaactgcagatggagaaggagaggctgcggctgaaacagcaagaactgcttcggcaggcaatgcggaatatcaatcccagcacagcaaattctccaaaatgtcaggagttagccctgcgtagccagttaccaacactggagcaggatggtgggactcaaaatccagtgtcttctcccgggatgtctcaggaattgagaacaatgacgaccaatagctcagatcctttccttaacagtggcacctatcactctcgagatgagagtacagacagtggactaagcatgagcagctacagtgtccctcgaaccccagatgacttcctgaacagtgtggatgagatggatacaggtgatactatcaaccaaagcaccctgccctcacagcagaaccgtttcccagactaccttgaagccattcctgggacaaatgtggaccttggaacactggaaggagatggaatgaacatagaaggagaggagctgatgccaagtctgcaggaagctttgagttctgacatccttaatgacatggagtctgttttggctgccaccaagctagataaagaaagctttcttacatggttatagagccctcaggcagactgaattctaaatctgtgaaggatctaaggagacacatgcaccggaaatttccataagccagttgcagttttcaggctaatacagaaaaagatgaacaaacgtccagcaagatactttaatcctctattttgctcttccttgtccattgctgctgttaatgtattgctgacctctttcacagttggctctaaagaatcaaaagaaaaaaactttttatttcttttgctattaaaactactgttcattttgggggctgggggaagtgagcctgtttggatgatggatgccattccttttgcccagttaaatgttcaccaatcattttaactaaatactcagacttagaagtcagatgcttcatgtcacagcatttagtttgttcaacagttgtttcttcagcttcctttgtccagtggaaaaacatgatttactggtctgacaagccaaaaatgttatatctgatattaaatacttaatgctgatttgaagagatagctg

SEQ ID NO: 9162 - protein, 504 aa, Homo sapiens
MDPGQQPPPQPAPQGQGQPPSQPPQGQGPPSGPGQPAPAATQAAPQAPPAGHQIVHVRGDSETDLEALFNAVMNPKTANVPQTVPMRLRKLPDSFFKPPEPKSHSRQASTDAGTAGALTPQHVRAHSSPASLQLGAVSPGTLTPTGVVSGPAATPTAQHLRQSSFEIPDDVPLPAGWEMAKTSSGQRYFLNHIDQTTTWQDPRKAMLSQMNVTAPTSPPVQQNMMNSASGPLPDGWEQAMTQDGEIYYINHKNKTTSWLDPRLDPRFAMNQRISQSAPVKQPPPLAPQSPQGGVMGGSNSNQQQQMRLQQLQMEKERLRLKQQELLRQAMRNINPSTANSPKCQELALRSQLPTLEQDGGTQNPVSSPGMSQELRTMTTNSSDPFLNSGTYHSRDESTDSGLSMSSYSVPRTPDDFLNSVDEMDTGDTINQSTLPSQQNRFPDYLEAIPGTNVDLGTLEGDGMNIEGEELMPSLQEALSSDILNDMESVLAATKLDKESFLTWL

SEQ ID NO: 9163 - DNA, 2547 bp, Homo sapiens
agtcgggcgcagccgccgccagggaaaagaaagggaggaaggaaggaacaagaaaaggaaataaagagaaaggggaggcggggaaaggcaacgagctgtccggcctccgtcaagggagttggagggaaaaagttctcaggcgccgcaggtccgagtgcctcgcagcccctcccgaggcgcagccgccagaccagtggagccggggcgcagggcgggggcggaggcgccggggcgggggatgcggggccgcggcgcagccccccggccctgagagcgaggacagcgccgcccggcccgcagccgtcgccgcttctccacctcggcccgtggagccggggcgtccgggcgtagccctcgctcgcctgggtcagggggtgcgcgtcgggggaggcagaagccatggatcccgggcagcagccgccgcctcaaccggccccccagggccaagggcagccgccttcgcagcccccgcaggggcagggcccgccgtccggacccgggcaaccggcacccgcggcgacccaggcggcgccgcaggcaccccccgccgggcatcagatcgtgcacgtccgcggggactcggagaccgacctggaggcgctcttcaacgccgtcatgaaccccaagacggccaacgtgccccagaccgtgcccatgaggctccggaagctgcccgactccttcttcaagccgccggagcccaaatcccactcccgacaggccagtactgatgcaggcactgcaggagccctgactccacagcatgttcgagctcattcctctccagcttctctgcagttgggagctgtttctcctgggacactgacccccactggagtagtctctggcccagcagctacacccacagctcagcatcttcgacagtcttcttttgagatacctgatgatgtacctctgccagcaggttgggagatggcaaagacatcttctggtcagagatacttcttaaatcacatcgatcagacaacaacatggcaggaccccaggaaggccatgctgtcccagatgaacgtcacagcccccaccagtccaccagtgcagcagaatatgatgaactcggcttcaggtcctcttcctgatggatgggaacaagccatgactcaggatggagaaatttactatataaaccataagaacaagaccacctcttggctagacccaaggcttgaccctcgttttgccatgaaccagagaatcagtcagagtgctccagtgaaacagccaccacccctggctccccagagcccacagggaggcgtcatgggtggcagcaactccaaccagcagcaacagatgcgactgcagcaactgcagatggagaaggagaggctgcggctgaaacagcaagaactgcttcggcaggagttagccctgcgtagccagttaccaacactggagcaggatggtgggactcaaaatccagtgtcttctcccgggatgtctcaggaattgagaacaatgacgaccaatagctcagatcctttccttaacagtggcacctatcactctcgagatgagagtacagacagtggactaagcatgagcagctacagtgtccctcgaaccccagatgacttcctgaacagtgtggatgagatggatacaggtgatactatcaaccaaagcaccctgccctcacagcagaaccgtttcccagactaccttgaagccattcctgggacaaatgtggaccttggaacactggaaggagatggaatgaacatagaaggagaggagctgatgccaagtctgcaggaagctttgagttctgacatccttaatgacatggagtctgttttggctgccaccaagctagataaagaaagctttcttacatggttatagagccctcaggcagactgaattctaaatctgtgaaggatctaaggagacacatgcaccggaaatttccataagccagttgcagttttcaggctaatacagaaaaagatgaacaaacgtccagcaagatactttaatcctctattttgctcttccttgtccattgctgctgttaatgtattgctgacctctttcacagttggctctaaagaatcaaaagaaaaaaactttttatttcttttgctattaaaactactgttcattttgggggctgggggaagtgagcctgtttggatgatggatgccattccttttgcccagttaaatgttcaccaatcattttaactaaatactcagacttagaagtcagatgcttcatgtcacagcatttagtttgttcaacagttgtttcttcagcttcctttgtccagtggaaaaacatgatttactggtctgacaagccaaaaatgttatatctgatattaaatacttaatgctgatttgaagagatagctgaaaccaaggctgaagactgttttactttcagtattttcttttcctcctagtgctatcattagtcacataatgaccttgattttattttaggagcttataaggcatgagacaatttccatataaatatattaattattgccacatactctaatatagattttggtggat

SEQ ID NO: 9164 - protein, 488 aa, Homo sapiens; identical to SEQ ID NO: 9160

SEQ ID NO: 9165 - DNA, 4668 bp, Homo sapiens
agtcgggcgcagccgccgccagggaaaagaaagggaggaaggaaggaacaagaaaaggaaataaagagaaaggggaggcggggaaaggcaacgagctgtccggcctccgtcaagggagttggagggaaaaagttctcaggcgccgcaggtccgagtgcctcgcagcccctcccgaggcgcagccgccagaccagtggagccggggcgcagggcgggggcggaggcgccggggcgggggatgcggggccgcggcgcagccccccggccctgagagcgaggacagcgccgcccggcccgcagccgtcgccgcttctccacctcggcccgtggagccggggcgtccgggcgtagccctcgctcgcctgggtcagggggtgcgcgtcgggggaggcagaagccatggatcccgggcagcagccgccgcctcaaccggccccccagggccaagggcagccgccttcgcagcccccgcaggggcagggcccgccgtccggacccgggcaaccggcacccgcggcgacccaggcggcgccgcaggcaccccccgccgggcatcagatcgtgcacgtccgcggggactcggagaccgacctggaggcgctcttcaacgccgtcatgaaccccaagacggccaacgtgccccagaccgtgcccatgaggctccggaagctgcccgactccttcttcaagccgccggagcccaaatcccactcccgacaggccagtactgatgcaggcactgcaggagccctgactccacagcatgttcgagctcattcctctccagcttctctgcagttgggagctgtttctcctgggacactgacccccactggagtagtctctggcccagcagctacacccacagctcagcatcttcgacagtcttcttttgagatacctgatgatgtacctctgccagcaggttgggagatggcaaagacatcttctggtcagagatacttcttaaatcacatcgatcagacaacaacatggcaggaccccaggaaggccatgctgtcccagatgaacgtcacagcccccaccagtccaccagtgcagcagaatatgatgaactcggcttcaggtcctcttcctgatggatgggaacaagccatgactcaggatggagaaatttactatataaaccataagaacaagaccacctcttggctagacccaaggcttgaccctcgttttgccatgaaccagagaatcagtcagagtgctccagtgaaacagccaccacccctggctccccagagcccacagggaggcgtcatgggtggcagcaactccaaccagcagcaacagatgcgactgcagcaactgcagatggagaaggagaggctgcggctgaaacagcaagaactgcttcggcaggagttagccctgcgtagccagttaccaacactggagcaggatggtgggactcaaaatccagtgtcttctcccgggatgtctcaggaattgagaacaatgacgaccaatagctcagatcctttccttaacagtggcacctatcactctcgagatgagagtacagacagtggactaagcatgagcagctacagtgtccctcgaaccccagatgacttcctgaacagtgtggatgagatggatacaggtgatactatcaaccaaagcaccctgccctcacagcagaaccgtttcccagactaccttgaagccattcctgggacaaatgtggaccttggaacactggaaggagatggaatgaacatagaaggagaggagctgatgccaagtctgcaggaagctttgagttctgacatccttaatgacatggagtctgttttggctgccaccaagctagataaagaaagctttcttacatggttatagagccctcaggcagactgaattctaaatctgtgaaggatctaaggagacacatgcaccggaaatttccataagccagttgcagttttcaggctaatacagaaaaagatgaacaaacgtccagcaagatactttaatcctctattttgctcttccttgtccattgctgctgttaatgtattgctgacctctttcacagttggctctaaagaatcaaaagaaaaaaactttttatttcttttgctattaaaactactgttcattttgggggctgggggaagtgagcctgtttggatgatggatgccattccttttgcccagttaaatgttcaccaatcattttaactaaatactcagacttagaagtcagatgcttcatgtcacagcatttagtttgttcaacagttgtttcttcagcttcctttgtccagtggaaaaacatgatttactggtctgacaagccaaaaatgttatatctgatattaaatacttaatgctgatttgaagagatagctgaaaccaaggctgaagactgttttactttcagtattttcttttcctcctagtgctatcattagtcacataatgaccttgattttattttaggagcttataaggcatgagacaatttccatataaatatattaattattgccacatactctaatatagattttggtggataattttgtgggtgtgcattttgttctgttttgttgggttttttgttttttttgtttttggcagggtcggtgggggggttggttggttggttggttttgtcggaacctaggcaaatgaccatattagtgaatctgttaatagttgtagcttgggatggttattgtagttgttttggtaaaatcttcatttcctggttttttttaccaccttatttaaatctcgattatctgctctctcttttatatacatacacacacccaaacataacatttataatagtgtggtagtggaatgtatccttttttaggtttccctgctttccagttaatttttaaaatggtagcgctttgtatgcatttagaatacatgactagtagtttatatttcactggtagtttaaatctggttggggcagtctgcagatgtttgaagtagtttagtgttctagaaagagctattactgtggatagtgcctaggggagtgctccacgccctctgggcatacggtagatattatctgatgaattggaaaggagcaaaccagaaatggctttattttctcccttggactaatttttaagtctcgattggaattcagtgagtaggttcataatgtgcatgacagaaataagctttatagtggtttaccttcatttagctttggaagttttctttgccttagttttggaagtaaattctagtttgtagttctcatttgtaatgaacacattaacgactagattaaaatattgccttcaagattgttcttacttacaagacttgctcctacttctatgctgaaaattgaccctggatagaatactataaggttttgagttagctggaaaagtgatcagattaataaatgtatattggtagttgaatttagcaaagaaatagagataatcatgattatacctttatttttacaggaagagatgatgtaactagagtatgtgtctacaggagtaataatggtttccaaagagtattttttaaaggaacaaaacgagcatgaattaactcttcaatataagctatgaagtaatagttggttgtgaattaaagtggcaccagctagcacctctgtgttttaagggtctttcaatgtttctagaataagcccttattttcaagggttcataacaggcataaaatctcttctcctggcaaaagctgctatgaaaagcctcagcttgggaagatagatttttttccccccaattacaaaatctaagtattttggcccttcaatttggaggagggcaaaagttggaagtaagaagttttattttaagtactttcagtgctcaaaaaaatgcaatcactgtgttgtatataatagttcataggttgatcactcataataattgactctaaggcttttattaagaaaacagcagaaagattaaatcttgaattaagtctggggggaaatggccactgcagatggagttttagagtagtaatgaaattctacctagaatgcaaaattgggtatatgaattacatagcatgttgttgggattttttttaatgtgcagaagatcaaagctacttggaaggagtgcctataatttgccagtagccacagattaagattatatcttatatatcagcagattagctttagcttagggggagggtgggaaagtttggggggggggttgtgaagatttagggggaccttgatagagaactttataaacttctttctctttaataaagacttgtcttacaccgtgctgccattaaaggcagctgttctagagtttcagtcacctaagtacacccacaaaacaatatgaatatggagatcttcctttacccctcaactttaatttgcccagttatacctcagtgttgtagcagtactgtgatacctggcacagtgctttgatcttacgatgccctctgtactgacctgaaggagacctaagagtcctttccctttttgagtttgaatcatagccttgatgtggtctcttgttttatgtccttgttcctaatgtaaaagtgcttaactgcttcttggttgtattgggtagcattgggataagattttaactgggtattcttgaattgcttttacaataaaccaattttataatctttaaattt

SEQ ID NO: 9166 - protein, 488 aa, Homo sapiens; identical to SEQ ID NO: 9160

SEQ ID NO: 9167 - DNA, 5349 bp, Homo sapiens
agtcgggcgcagccgccgccagggaaaagaaagggaggaaggaaggaacaagaaaaggaaataaagagaaaggggaggcggggaaaggcaacgagctgtccggcctccgtcaagggagttggagggaaaaagttctcaggcgccgcaggtccgagtgcctcgcagcccctcccgaggcgcagccgccagaccagtggagccggggcgcagggcgggggcggaggcgccggggcgggggatgcggggccgcggcgcagccccccggccctgagagcgaggacagcgccgcccggcccgcagccgtcgccgcttctccacctcggcccgtggagccggggcgtccgggcgtagccctcgctcgcctgggtcagggggtgcgcgtcgggggaggcagaagccatggatcccgggcagcagccgccgcctcaaccggccccccagggccaagggcagccgccttcgcagcccccgcaggggcagggcccgccgtccggacccgggcaaccggcacccgcggcgacccaggcggcgccgcaggcaccccccgccgggcatcagatcgtgcacgtccgcggggactcggagaccgacctggaggcgctcttcaacgccgtcatgaaccccaagacggccaacgtgccccagaccgtgcccatgaggctccggaagctgcccgactccttcttcaagccgccggagcccaaatcccactcccgacaggccagtactgatgcaggcactgcaggagccctgactccacagcatgttcgagctcattcctctccagcttctctgcagttgggagctgtttctcctgggacactgacccccactggagtagtctctggcccagcagctacacccacagctcagcatcttcgacagtcttcttttgagatacctgatgatgtacctctgccagcaggttgggagatggcaaagacatcttctggtcagagatacttcttaaatcacatcgatcagacaacaacatggcaggaccccaggaaggccatgctgtcccagatgaacgtcacagcccccaccagtccaccagtgcagcagaatatgatgaactcggcttcaggtcctcttcctgatggatgggaacaagccatgactcaggatggagaaatttactatataaaccataagaacaagaccacctcttggctagacccaaggcttgaccctcgttttgccatgaaccagagaatcagtcagagtgctccagtgaaacagccaccacccctggctccccagagcccacagggaggcgtcatgggtggcagcaactccaaccagcagcaacagatgcgactgcagcaactgcagatggagaaggagaggctgcggctgaaacagcaagaactgcttcggcaggagttagccctgcgtagccagttaccaacactggagcaggatggtgggactcaaaatccagtgtcttctcccgggatgtctcaggaattgagaacaatgacgaccaatagctcagatcctttccttaacagtggcacctatcactctcgagatgagagtacagacagtggactaagcatgagcagctacagtgtccctcgaaccccagatgacttcctgaacagtgtggatgagatggatacaggtgatactatcaaccaaagcaccctgccctcacagcagaaccgtttcccagactaccttgaagccattcctgggacaaatgtggaccttggaacactggaaggagatggaatgaacatagaaggagaggagctgatgccaagtctgcaggaagctttgagttctgacatccttaatgacatggagtctgttttggctgccaccaagctagataaagaaagctttcttacatggttatagagccctcaggcagactgaattctaaatctgtgaaggatctaaggagacacatgcaccggaaatttccataagccagttgcagttttcaggctaatacagaaaaagatgaacaaacgtccagcaagatactttaatcctctattttgctcttccttgtccattgctgctgttaatgtattgctgacctctttcacagttggctctaaagaatcaaaagaaaaaaactttttatttcttttgctattaaaactactgttcattttgggggctgggggaagtgagcctgtttggatgatggatgccattccttttgcccagttaaatgttcaccaatcattttaactaaatactcagacttagaagtcagatgcttcatgtcacagcatttagtttgttcaacagttgtttcttcagcttcctttgtccagtggaaaaacatgatttactggtctgacaagccaaaaatgttatatctgatattaaatacttaatgctgatttgaagagatagctgaaaccaaggctgaagactgttttactttcagtattttcttttcctcctagtgctatcattagtcacataatgaccttgattttattttaggagcttataaggcatgagacaatttccatataaatatattaattattgccacatactctaatatagattttggtggataattttgtgggtgtgcattttgttctgttttgttgggttttttgttttttttgtttttggcagggtcggtgggggggttggttggttggttggttttgtcggaacctaggcaaatgaccatattagtgaatctgttaatagttgtagcttgggatggttattgtagttgttttggtaaaatcttcatttcctggttttttttaccaccttatttaaatctcgattatctgctctctcttttatatacatacacacacccaaacataacatttataatagtgtggtagtggaatgtatccttttttaggtttccctgctttccagttaatttttaaaatggtagcgctttgtatgcatttagaatacatgactagtagtttatatttcactggtagtttaaatctggttggggcagtctgcagatgtttgaagtagtttagtgttctagaaagagctattactgtggatagtgcctaggggagtgctccacgccctctgggcatacggtagatattatctgatgaattggaaaggagcaaaccagaaatggctttattttctcccttggactaatttttaagtctcgattggaattcagtgagtaggttcataatgtgcatgacagaaataagctttatagtggtttaccttcatttagctttggaagttttctttgccttagttttggaagtaaattctagtttgtagttctcatttgtaatgaacacattaacgactagattaaaatattgccttcaagattgttcttacttacaagacttgctcctacttctatgctgaaaattgaccctggatagaatactataaggttttgagttagctggaaaagtgatcagattaataaatgtatattggtagttgaatttagcaaagaaatagagataatcatgattatacctttatttttacaggaagagatgatgtaactagagtatgtgtctacaggagtaataatggtttccaaagagtattttttaaaggaacaaaacgagcatgaattaactcttcaatataagctatgaagtaatagttggttgtgaattaaagtggcaccagctagcacctctgtgttttaagggtctttcaatgtttctagaataagcccttattttcaagggttcataacaggcataaaatctcttctcctggcaaaagctgctatgaaaagcctcagcttgggaagatagatttttttccccccaattacaaaatctaagtattttggcccttcaatttggaggagggcaaaagttggaagtaagaagttttattttaagtactttcagtgctcaaaaaaatgcaatcactgtgttgtatataatagttcataggttgatcactcataataattgactctaaggcttttattaagaaaacagcagaaagattaaatcttgaattaagtctggggggaaatggccactgcagatggagttttagagtagtaatgaaattctacctagaatgcaaaattgggtatatgaattacatagcatgttgttgggattttttttaatgtgcagaagatcaaagctacttggaaggagtgcctataatttgccagtagccacagattaagattatatcttatatatcagcagattagctttagcttagggggagggtgggaaagtttggggggggggttgtgaagatttagggggaccttgatagagaactttataaacttctttctctttaataaagacttgtcttacaccgtgctgccattaaaggcagctgttctagagtttcagtcacctaagtacacccacaaaacaatatgaatatggagatcttcctttacccctcaactttaatttgcccagttatacctcagtgttgtagcagtactgtgatacctggcacagtgctttgatcttacgatgccctctgtactgacctgaaggagacctaagagtcctttccctttttgagtttgaatcatagccttgatgtggtctcttgttttatgtccttgttcctaatgtaaaagtgcttaactgcttcttggttgtattgggtagcattgggataagattttaactgggtattcttgaattgcttttacaataaaccaattttataatctttaaatttatcaactttttacatttgtgttattttcagtcagggcttcttagatctacttatggttgatggagcacattgatttggagtttcagatcttccaaagcactatttgttgtaataacttttctaaatgtagtgcctttaaaggaaaaatgaacacagggaagtgactttgctacaaataatgttgctgtgttaagtattcatattaaatacatgccttctatatggaacatggcagaaagactgaaaaataacagtaattaattgtgtaattcagaattcataccaatcagtgttgaaactcaaacattgcaaaagtgggtggcaatattcagtgcttaacacttttctagcgttggtacatctgagaaatgagtgctcaggtggattttatcctcgcaagcatgttgttataagaattgtgggtgtgcctatcataacaattgttttctgtatcttgaaaaagtattctccacattttaaatgttttatattagagaattctttaatgcacacttgtcaaatatatatatatagtaccaatgttacctttttattttttgttttagatgtaagagcatgctcatatgttaggtacttacataaattgttacattattttttcttatgtaatacctttttgtttgtttatgtggttcaaatatattctttccttaaactctt

SEQ ID NO: 9168 - protein, 488 aa, Homo sapiens; identical to SEQ ID NO: 9160

SEQ ID NO: 9169 - DNA, 5235 bp, Homo sapiens
agtcgggcgcagccgccgccagggaaaagaaagggaggaaggaaggaacaagaaaaggaaataaagagaaaggggaggcggggaaaggcaacgagctgtccggcctccgtcaagggagttggagggaaaaagttctcaggcgccgcaggtccgagtgcctcgcagcccctcccgaggcgcagccgccagaccagtggagccggggcgcagggcgggggcggaggcgccggggcgggggatgcggggccgcggcgcagccccccggccctgagagcgaggacagcgccgcccggcccgcagccgtcgccgcttctccacctcggcccgtggagccggggcgtccgggcgtagccctcgctcgcctgggtcagggggtgcgcgtcgggggaggcagaagccatggatcccgggcagcagccgccgcctcaaccggccccccagggccaagggcagccgccttcgcagcccccgcaggggcagggcccgccgtccggacccgggcaaccggcacccgcggcgacccaggcggcgccgcaggcaccccccgccgggcatcagatcgtgcacgtccgcggggactcggagaccgacctggaggcgctcttcaacgccgtcatgaaccccaagacggccaacgtgccccagaccgtgcccatgaggctccggaagctgcccgactccttcttcaagccgccggagcccaaatcccactcccgacaggccagtactgatgcaggcactgcaggagccctgactccacagcatgttcgagctcattcctctccagcttctctgcagttgggagctgtttctcctgggacactgacccccactggagtagtctctggcccagcagctacacccacagctcagcatcttcgacagtcttcttttgagatacctgatgatgtacctctgccagcaggttgggagatggcaaagacatcttctggtcagagatacttcttaaatcacatcgatcagacaacaacatggcaggaccccaggaaggccatgctgtcccagatgaacgtcacagcccccaccagtccaccagtgcagcagaatatgatgaactcggcttcagccatgaaccagagaatcagtcagagtgctccagtgaaacagccaccacccctggctccccagagcccacagggaggcgtcatgggtggcagcaactccaaccagcagcaacagatgcgactgcagcaactgcagatggagaaggagaggctgcggctgaaacagcaagaactgcttcggcaggagttagccctgcgtagccagttaccaacactggagcaggatggtgggactcaaaatccagtgtcttctcccgggatgtctcaggaattgagaacaatgacgaccaatagctcagatcctttccttaacagtggcacctatcactctcgagatgagagtacagacagtggactaagcatgagcagctacagtgtccctcgaaccccagatgacttcctgaacagtgtggatgagatggatacaggtgatactatcaaccaaagcaccctgccctcacagcagaaccgtttcccagactaccttgaagccattcctgggacaaatgtggaccttggaacactggaaggagatggaatgaacatagaaggagaggagctgatgccaagtctgcaggaagctttgagttctgacatccttaatgacatggagtctgttttggctgccaccaagctagataaagaaagctttcttacatggttatagagccctcaggcagactgaattctaaatctgtgaaggatctaaggagacacatgcaccggaaatttccataagccagttgcagttttcaggctaatacagaaaaagatgaacaaacgtccagcaagatactttaatcctctattttgctcttccttgtccattgctgctgttaatgtattgctgacctctttcacagttggctctaaagaatcaaaagaaaaaaactttttatttcttttgctattaaaactactgttcattttgggggctgggggaagtgagcctgtttggatgatggatgccattccttttgcccagttaaatgttcaccaatcattttaactaaatactcagacttagaagtcagatgcttcatgtcacagcatttagtttgttcaacagttgtttcttcagcttcctttgtccagtggaaaaacatgatttactggtctgacaagccaaaaatgttatatctgatattaaatacttaatgctgatttgaagagatagctgaaaccaaggctgaagactgttttactttcagtattttcttttcctcctagtgctatcattagtcacataatgaccttgattttattttaggagcttataaggcatgagacaatttccatataaatatattaattattgccacatactctaatatagattttggtggataattttgtgggtgtgcattttgttctgttttgttgggttttttgttttttttgtttttggcagggtcggtgggggggttggttggttggttggttttgtcggaacctaggcaaatgaccatattagtgaatctgttaatagttgtagcttgggatggttattgtagttgttttggtaaaatcttcatttcctggttttttttaccaccttatttaaatctcgattatctgctctctcttttatatacatacacacacccaaacataacatttataatagtgtggtagtggaatgtatccttttttaggtttccctgctttccagttaatttttaaaatggtagcgctttgtatgcatttagaatacatgactagtagtttatatttcactggtagtttaaatctggttggggcagtctgcagatgtttgaagtagtttagtgttctagaaagagctattactgtggatagtgcctaggggagtgctccacgccctctgggcatacggtagatattatctgatgaattggaaaggagcaaaccagaaatggctttattttctcccttggactaatttttaagtctcgattggaattcagtgagtaggttcataatgtgcatgacagaaataagctttatagtggtttaccttcatttagctttggaagttttctttgccttagttttggaagtaaattctagtttgtagttctcatttgtaatgaacacattaacgactagattaaaatattgccttcaagattgttcttacttacaagacttgctcctacttctatgctgaaaattgaccctggatagaatactataaggttttgagttagctggaaaagtgatcagattaataaatgtatattggtagttgaatttagcaaagaaatagagataatcatgattatacctttatttttacaggaagagatgatgtaactagagtatgtgtctacaggagtaataatggtttccaaagagtattttttaaaggaacaaaacgagcatgaattaactcttcaatataagctatgaagtaatagttggttgtgaattaaagtggcaccagctagcacctctgtgttttaagggtctttcaatgtttctagaataagcccttattttcaagggttcataacaggcataaaatctcttctcctggcaaaagctgctatgaaaagcctcagcttgggaagatagatttttttccccccaattacaaaatctaagtattttggcccttcaatttggaggagggcaaaagttggaagtaagaagttttattttaagtactttcagtgctcaaaaaaatgcaatcactgtgttgtatataatagttcataggttgatcactcataataattgactctaaggcttttattaagaaaacagcagaaagattaaatcttgaattaagtctggggggaaatggccactgcagatggagttttagagtagtaatgaaattctacctagaatgcaaaattgggtatatgaattacatagcatgttgttgggattttttttaatgtgcagaagatcaaagctacttggaaggagtgcctataatttgccagtagccacagattaagattatatcttatatatcagcagattagctttagcttagggggagggtgggaaagtttggggggggggttgtgaagatttagggggaccttgatagagaactttataaacttctttctctttaataaagacttgtcttacaccgtgctgccattaaaggcagctgttctagagtttcagtcacctaagtacacccacaaaacaatatgaatatggagatcttcctttacccctcaactttaatttgcccagttatacctcagtgttgtagcagtactgtgatacctggcacagtgctttgatcttacgatgccctctgtactgacctgaaggagacctaagagtcctttccctttttgagtttgaatcatagccttgatgtggtctcttgttttatgtccttgttcctaatgtaaaagtgcttaactgcttcttggttgtattgggtagcattgggataagattttaactgggtattcttgaattgcttttacaataaaccaattttataatctttaaatttatcaactttttacatttgtgttattttcagtcagggcttcttagatctacttatggttgatggagcacattgatttggagtttcagatcttccaaagcactatttgttgtaataacttttctaaatgtagtgcctttaaaggaaaaatgaacacagggaagtgactttgctacaaataatgttgctgtgttaagtattcatattaaatacatgccttctatatggaacatggcagaaagactgaaaaataacagtaattaattgtgtaattcagaattcataccaatcagtgttgaaactcaaacattgcaaaagtgggtggcaatattcagtgcttaacacttttctagcgttggtacatctgagaaatgagtgctcaggtggattttatcctcgcaagcatgttgttataagaattgtgggtgtgcctatcataacaattgttttctgtatcttgaaaaagtattctccacattttaaatgttttatattagagaattctttaatgcacacttgtcaaatatatatatatagtaccaatgttacctttttattttttgttttagatgtaagagcatgctcatatgttaggtacttacataaattgttacattattttttcttatgtaatacctttttgtttgtttatgtggttcaaatatattctttccttaaactctt

SEQ ID NO: 9170 - protein, 450 aa, Homo sapiens
MDPGQQPPPQPAPQGQGQPPSQPPQGQGPPSGPGQPAPAATQAAPQAPPAGHQIVHVRGDSETDLEALFNAVMNPKTANVPQTVPMRLRKLPDSFFKPPEPKSHSRQASTDAGTAGALTPQHVRAHSSPASLQLGAVSPGTLTPTGVVSGPAATPTAQHLRQSSFEIPDDVPLPAGWEMAKTSSGQRYFLNHIDQTTTWQDPRKAMLSQMNVTAPTSPPVQQNMMNSASAMNQRISQSAPVKQPPPLAPQSPQGGVMGGSNSNQQQQMRLQQLQMEKERLRLKQQELLRQELALRSQLPTLEQDGGTQNPVSSPGMSQELRTMTTNSSDPFLNSGTYHSRDESTDSGLSMSSYSVPRTPDDFLNSVDEMDTGDTINQSTLPSQQNRFPDYLEAIPGTNVDLGTLEGDGMNIEGEELMPSLQEALSSDILNDMESVLAATKLDKESFLTWL

SEQ ID NO: 9171 - DNA, 5471 bp, Homo sapiens
agtcgggcgcagccgccgccagggaaaagaaagggaggaaggaaggaacaagaaaaggaaataaagagaaaggggaggcggggaaaggcaacgagctgtccggcctccgtcaagggagttggagggaaaaagttctcaggcgccgcaggtccgagtgcctcgcagcccctcccgaggcgcagccgccagaccagtggagccggggcgcagggcgggggcggaggcgccggggcgggggatgcggggccgcggcgcagccccccggccctgagagcgaggacagcgccgcccggcccgcagccgtcgccgcttctccacctcggcccgtggagccggggcgtccgggcgtagccctcgctcgcctgggtcagggggtgcgcgtcgggggaggcagaagccatggatcccgggcagcagccgccgcctcaaccggccccccagggccaagggcagccgccttcgcagcccccgcaggggcagggcccgccgtccggacccgggcaaccggcacccgcggcgacccaggcggcgccgcaggcaccccccgccgggcatcagatcgtgcacgtccgcggggactcggagaccgacctggaggcgctcttcaacgccgtcatgaaccccaagacggccaacgtgccccagaccgtgcccatgaggctccggaagctgcccgactccttcttcaagccgccggagcccaaatcccactcccgacaggccagtactgatgcaggcactgcaggagccctgactccacagcatgttcgagctcattcctctccagcttctctgcagttgggagctgtttctcctgggacactgacccccactggagtagtctctggcccagcagctacacccacagctcagcatcttcgacagtcttcttttgagatacctgatgatgtacctctgccagcaggttgggagatggcaaagacatcttctggtcagagatacttcttaaatcacatcgatcagacaacaacatggcaggaccccaggaaggccatgctgtcccagatgaacgtcacagcccccaccagtccaccagtgcagcagaatatgatgaactcggcttcaggtcctcttcctgatggatgggaacaagccatgactcaggatggagaaatttactatataaaccataagaacaagaccacctcttggctagacccaaggcttgaccctcgttttgccatgaaccagagaatcagtcagagtgctccagtgaaacagccaccacccctggctccccagagcccacagggaggcgtcatgggtggcagcaactccaaccagcagcaacagatgcgactgcagcaactgcagatggagaaggagaggctgcggctgaaacagcaagaactgcttcggcaggagttagccctgcgtagccagttaccaacactggagcaggatggtgggactcaaaatccagtgtcttctcccgggatgtctcaggaattgagaacaatgacgaccaatagctcagatcctttccttaacagtggcacctatcactctcgagatgagagtacagacagtggactaagcatgagcagctacagtgtccctcgaaccccagatgacttcctgaacagtgtggatgagatggatacaggtgatactatcaaccaaagcaccctgccctcacagcagaaccgtttcccagactaccttgaagccattcctgggacaaatgtggaccttggaacactggaaggagatggaatgaacatagaaggagaggagctgatgccaagtctgcaggaagctttgagttctgacatccttaatgacatggagtctgttttggctgccaccaagctagataaagaaagctttcttacatggttatagagccctcaggcagactgaattctaaatctgtgaaggatctaaggagacacatgcaccggaaatttccataagccagttgcagttttcaggctaatacagaaaaagatgaacaaacgtccagcaagatactttaatcctctattttgctcttccttgtccattgctgctgttaatgtattgctgacctctttcacagttggctctaaagaatcaaaagaaaaaaactttttatttcttttgctattaaaactactgttcattttgggggctgggggaagtgagcctgtttggatgatggatgccattccttttgcccagttaaatgttcaccaatcattttaactaaatactcagacttagaagtcagatgcttcatgtcacagcatttagtttgttcaacagttgtttcttcagcttcctttgtccagtggaaaaacatgatttactggtctgacaagccaaaaatgttatatctgatattaaatacttaatgctgatttgaagagatagctgaaaccaaggctgaagactgttttactttcagtattttcttttcctcctagtgctatcattagtcacataatgaccttgattttattttaggagcttataaggcatgagacaatttccatataaatatattaattattgccacatactctaatatagattttggtggataattttgtgggtgtgcattttgttctgttttgttgggttttttgttttttttgtttttggcagggtcggtgggggggttggttggttggttggttttgtcggaacctaggcaaatgaccatattagtgaatctgttaatagttgtagcttgggatggttattgtagttgttttggtaaaatcttcatttcctggttttttttaccaccttatttaaatctcgattatctgctctctcttttatatacatacacacacccaaacataacatttataatagtgtggtagtggaatgtatccttttttaggtttccctgctttccagttaatttttaaaatggtagcgctttgtatgcatttagaatacatgactagtagtttatatttcactggtagtttaaatctggttggggcagtctgcagatgtttgaagtagtttagtgttctagaaagagctattactgtggatagtgcctaggggagtgctccacgccctctgggcatacggtagatattatctgatgaattggaaaggagcaaaccagaaatggctttattttctcccttggactaatttttaagtctcgattggaattcagtgagtaggttcataatgtgcatgacagaaataagctttatagtggtttaccttcatttagctttggaagttttctttgccttagttttggaagtaaattctagtttgtagttctcatttgtaatgaacacattaacgactagattaaaatattgccttcaagattgttcttacttacaagacttgctcctacttctatgctgaaaattgaccctggatagaatactataaggttttgagttagctggaaaagtgatcagattaataaatgtatattggtagttgaatttagcaaagaaatagagataatcatgattatacctttatttttacaggaagagatgatgtaactagagtatgtgtctacaggagtaataatggtttccaaagagtattttttaaaggaacaaaacgagcatgaattaactcttcaatataagctatgaagtaatagttggttgtgaattaaagtggcaccagctagcacctctgtgttttaagggtctttcaatgtttctagaataagcccttattttcaagggttcataacaggcataaaatctcttctcctggcaaaagctgctatgaaaagcctcagcttgggaagatagatttttttccccccaattacaaaatctaagtattttggcccttcaatttggaggagggcaaaagttggaagtaagaagttttattttaagtactttcagtgctcaaaaaaatgcaatcactgtgttgtatataatagttcataggttgatcactcataataattgactctaaggcttttattaagaaaacagcagaaagattaaatcttgaattaagtctggggggaaatggccactgcagatggagttttagagtagtaatgaaattctacctagaatgcaaaattgggtatatgaattacatagcatgttgttgggattttttttaatgtgcagaagatcaaagctacttggaaggagtgcctataatttgccagtagccacagattaagattatatcttatatatcagcagattagctttagcttagggggagggtgggaaagtttggggggggggttgtgaagatttagggggaccttgatagagaactttataaacttctttctctttaataaagacttgtcttacaccgtgctgccattaaaggcagctgttctagagtttcagtcacctaagtacacccacaaaacaatatgaatatggagatcttcctttacccctcaactttaatttgcccagttatacctcagtgttgtagcagtactgtgatacctggcacagtgctttgatcttacgatgccctctgtactgacctgaaggagacctaagagtcctttccctttttgagtttgaatcatagccttgatgtggtctcttgttttatgtccttgttcctaatgtaaaagtgcttaactgcttcttggttgtattgggtagcattgggataagattttaactgggtattcttgaattgcttttacaataaaccaattttataatctttaaatttatcaactttttacatttgtgttattttcagtcagggcttcttagatctacttatggttgatggagcacattgatttggagtttcagatcttccaaagcactatttgttgtaataacttttctaaatgtagtgcctttaaaggaaaaatgaacacagggaagtgactttgctacaaataatgttgctgtgttaagtattcatattaaatacatgccttctatatggaacatggcagaaagactgaaaaataacagtaattaattgtgtaattcagaattcataccaatcagtgttgaaactcaaacattgcaaaagtgggtggcaatattcagtgcttaacacttttctagcgttggtacatctgagaaatgagtgctcaggtggattttatcctcgcaagcatgttgttataagaattgtgggtgtgcctatcataacaattgttttctgtatcttgaaaaagtattctccacattttaaatgttttatattagagaattctttaatgcacacttgtcaaatatatatatatagtaccaatgttacctttttattttttgttttagatgtaagagcatgctcatatgttaggtacttacataaattgttacattattttttcttatgtaatacctttttgtttgtttatgtggttcaaatatattctttccttaaactcttctttgttgtttttaacaattgatatttgaaactttttttttttttggcttcttactggtcttccaatagaacaagaactggcaataaaaggtgattacagtagtaactgggaagacaagtta

SEQ ID NO: 9172 - protein, 488 aa, Homo sapiens; identical to SEQ ID NO: 9160

SEQ ID NO: 9173 - DNA, 3231 bp, Homo sapiens
agtcacccgctggccccggggccgcctgctgaggaaattgcctggtgcttcccctctcgctttttggatgcggcggtcgcaggccgggacgggtgcgcataacctgttgagttaccgcaagttggtttttacagcctttccctgaagttaatgtttgccgagcatctgcaaacatagagaattctgggcttccacacaactccagtgctaactcaacagagactctccaacatgtgccttctgaccatacaaatgaaacttccaacagtactgtgaaaccaccaacttcagttgcctcagactccagtaatacaacggtcaccaccatgaaacctacagcggcatctaatacaacaacaccagggatggtctcaacaaatatgacttctaccaccttaaagtctacacccaaaacaacaagtgtttcacagaacacatctcagatatcaacatccacaatgaccgtaacccacaatagttcagtgacatctgctgcttcatcagtaacaatcacaacaactatgcattctgaagcaaagaaaggatcaaaatttgatactgggagctttgttggtggtattgtattaacgctgggagttttatctattctttacattggatgcaaaatgtattactcaagaagaggcattcggtatcgaaccatagatgaacatgatgccatcatttaaggaaatccatggaccaaggatggaatacagattgatgctgccctatcaattaattttggtttattaatagtttaaaacaatattctctttttgaaaatagtataaacaggccatgcatataatgtacagtgtattacgtaaatatgtaaagattcttcaaggtaacaagggtttgggttttgaaataaacatctggatccttatagaccgttcatacaatggttttagcaagttcatagtaagacaaacaagtcctatctttttttttttggctggggtgggggcattggtcacatatgaccagtaattgaaagacgtcatcactgaaagacagaatgccatctgggcatacaaataagaagtttgtcacagcactcaggattttgggtatcttttgtagctcacataaagaacttcagtgcttttcagagctggatatatcttaattactaatgccacacagaaattatacaatcaaactagatctgaagcataatttaagaaaaacatcaacattttttgtgctttaaactgtagtagttggtctagaaacaaaatactccaagaaaaagaaaattttcaaataaaacccaaaataatagctttgcttagccctgttagggatccattggagcattaaggagcacatatttttattaacttcttttgagctttcaatgttgatgtaatttttgttctctgtgtaatttaggtaaactgcagtgtttaacataataatgttttaaagacttagttgtcagtattaaataatcctggcattatagggaaaaaacctcctagaagttagattatttgctactgtgagaatattgtcaccactggaagttactttagttcatttaattttaattttatattttgtgaatattttaagaactgtagagctgctttcaatatctagaaatttttaattgagtgtaaacacacctaactttaagaaaaagaaccgcttgtatgattttcaaaagaacatttagaattctatagagtcaaaactatagcgtaatgctgtgtttattaagccagggattgtgggacttcccccaggcaactaaacctgcaggatgaaaatgctatattttctttcatgcactgtcgatattactcagatttggggaaatgacatttttatactaaaacaaacaccaaaatattttagaataaattcttagaaagttttgagaggaatttttagagaggacatttcctccttcctgatttggatattccctcaaatccctcctcttactccatgctgaaggagaagtactctcagatgcattatgttaatggagagaaaaagcacagtattgtagagacaccaatattagctaatgtattttggagtgttttccattttacagtttatattccagcactcaaaactcagggtcaagttttaacaaaagaggtatgtagtcacagtaaatactaagatggcatttctatctcagagggccaaagtgaatcacaccagtttctgaaggtcctaaaaatagctcagatgtcctaatgaacatgcacctacatttaataggagtacaataaaactgttgtcagcttttgttttacagagaacgctagatattaagaattttgaaatggatcatttctacttgctgtgcattttaaccaataatctgatgaatatagaaaaaaatgatccaaaatatggatatgattggatgtatgtaacacatacatggagtatggaggaaattttctgaaaaatacatttagattagtttagtttgaaggagaggtgggctgatggctgagttgtatgttactaacttggccctgactggttgtgcaaccattgcttcatttctttgcaaaatgtagttaagatatactttattctaatgaaggccttttaaatttgtccactgcattcttggtatttcactacttcaagtcagtcagaacttcgtagaccgacctgaagtttctttttgaatacttgtttctttagcactttgaagatagaaaaaccactttttaagtactaagtcatcatttgccttgaaagtttcctctgcattgggtttgaagtagtttagttatgtctttttctctgtatgtaagtagtataatttgttactttcaaatacccgtactttgaatgtaggtttttttgttgttgttatctataaaaattgagggaaatggttatgcaaaaaaatattttgctttggaccatatttcttaagcataaaaaaaatgctcagttttgcttgcattccttgagaatgtatttatctgaagatcaaaacaaacaatccagatgtataagtactaggcagaagccaattttaaaatttccttgaataatccatgaaaggaataattcaaatacagataaacagagttggcagtatattatagtgataattttgtattttcacaaaaaaaaagttaaactcttcttttctttttattataatgaccagcttttggtatttcattgttaccaagttctatttttagaataaaattgttctccttctaaaagttttaa

SEQ ID NO: 9174 - protein, 120 aa, Homo sapiens
MKPTAASNTTTPGMVSTNMTSTTLKSTPKTTSVSQNTSQISTSTMTVTHNSSVTSAASSVTITTTMHSEAKKGSKFDTGSFVGGIVLTLGVLSILYIGCKMYYSRRGIRYRTIDEHDAII

SEQ ID NO: 9175 - DNA, 1862 bp, Homo sapiens
cagcgtgctcagcattcagggaggcagcggcgctcgccttcatccaggacaacaaaactgccatttccgaagagaaaggaaacggctcgcggtttctggggttcccaagcgcgcgcctgcgagggaggccgcgagccgagtcgccacgcccagaaccccgagcccgcccccgcgccacccagcccggccccgccgccccggctgcgcacgcgacgccccctccaggccccgctcctgcgccctatttggtcattcggggggcaagcggcgggaggggaaacgtgcgcggccgaaggggaagcggagccggcgccggctgcgcagaggagccgctctcgccgccgccacctcggctgggagcccacgaggctgccgcatcttcccccaggcaactaaacctgcaggatgaaaatgctatattttctttcatgcactgtcgatattactcagatttggggaaatgacatttttatactaaaacaaacaccaaaatattttagaataaattcttagaaagttttgagaggaatttttagagaggacatttcctccttcctgatttggatattccctcaaatccctcctcttactccatgctgaaggagaagtactctcagatgcattatgttaatggagagaaaaagcacagtattgtagagacaccaatattagctaatgtattttggagtgttttccattttacagtttatattccagcactcaaaactcagggtcaagttttaacaaaagaggtatgtagtcacagtaaatactaagatggcatttctatctcagagggccaaagtgaatcacaccagtttctgaaggtcctaaaaatagctcagatgtcctaatgaacatgcacctacatttaataggagtacaataaaactgttgtcagcttttgttttacagagaacgctagatattaagaattttgaaatggatcatttctacttgctgtgcattttaaccaataatctgatgaatatagaaaaaaatgatccaaaatatggatatgattggatgtatgtaacacatacatggagtatggaggaaattttctgaaaaatacatttagattagtttagtttgaaggagaggtgggctgatggctgagttgtatgttactaacttggccctgactggttgtgcaaccattgcttcatttctttgcaaaatgtagttaagatatactttattctaatgaaggccttttaaatttgtccactgcattcttggtatttcactacttcaagtcagtcagaacttcgtagaccgacctgaagtttctttttgaatacttgtttctttagcactttgaagatagaaaaaccactttttaagtactaagtcatcatttgccttgaaagtttcctctgcattgggtttgaagtagtttagttatgtctttttctctgtatgtaagtagtataatttgttactttcaaatacccgtactttgaatgtaggtttttttgttgttgttatctataaaaattgagggaaatggttatgcaaaaaaatattttgctttggaccatatttcttaagcataaaaaaaatgctcagttttgcttgcattccttgagaatgtatttatctgaagatcaaaacaaacaatccagatgtataagtactaggcagaagccaattttaaaatttccttgaataatccatgaaaggaataattcaaatacagataaacagagttggcagtatattatagtgataattttgtattttcacaaaaaaaaagttaaactcttcttttctttttattataatgaccagcttttggtatttcattgttaccaagttctatttttagaataaaattgttctccttctaaaagttttaa

SEQ ID NO: 9176 - protein, 60 aa, Homo sapiens [sequence omitted]

SEQ ID NO: 9177 - DNA, 3505 bp, Homo sapiens
cagcgtgctcagcattcagggaggcagcggcgctcgccttcatccaggacaacaaaactgccatttccgaagagaaaggaaacggctcgcggtttctggggttcccaagcgcgcgcctgcgagggaggccgcgagccgagtcgccacgcccagaaccccgagcccgcccccgcgccacccagcccggccccgccgccccggctgcgcacgcgacgccccctccaggccccgctcctgcgccctatttggtcattcggggggcaagcggcgggaggggaaacgtgcgcggccgaaggggaagcggagccggcgccggctgcgcagaggagccgctctcgccgccgccacctcggctgggagcccacgaggctgccgcatcctgccctcggaacaatgggactcggcgcgcgaggtgcttgggccgcgctgctcctggggacgctgcaggtgctagcgctgctgggggccgcccatgaaagcgcagccatggcggagactctccaacatgtgccttctgaccatacaaatgaaacttccaacagtactgtgaaaccaccaacttcagttgcctcagactccagtaatacaacggtcaccaccatgaaacctacagcggcatctaatacaacaacaccagggatggtctcaacaaatatgacttctaccaccttaaagtctacacccaaaacaacaagtgtttcacagaacacatctcagatatcaacatccacaatgaccgtaacccacaatagttcagtgacatctgctgcttcatcagtaacaatcacaacaactatgcattctgaagcaaagaaaggatcaaaatttgatactgggagctttgttggtggtattgtattaacgctgggagttttatctattctttacattggatgcaaaatgtattactcaagaagaggcattcggtatcgaaccatagatgaacatgatgccatcatttaaggaaatccatggaccaaggatggaatacagattgatgctgccctatcaattaattttggtttattaatagtttaaaacaatattctctttttgaaaatagtataaacaggccatgcatataatgtacagtgtattacgtaaatatgtaaagattcttcaaggtaacaagggtttgggttttgaaataaacatctggatccttatagaccgttcatacaatggttttagcaagttcatagtaagacaaacaagtcctatctttttttttttggctggggtgggggcattggtcacatatgaccagtaattgaaagacgtcatcactgaaagacagaatgccatctgggcatacaaataagaagtttgtcacagcactcaggattttgggtatcttttgtagctcacataaagaacttcagtgcttttcagagctggatatatcttaattactaatgccacacagaaattatacaatcaaactagatctgaagcataatttaagaaaaacatcaacattttttgtgctttaaactgtagtagttggtctagaaacaaaatactccaagaaaaagaaaattttcaaataaaacccaaaataatagctttgcttagccctgttagggatccattggagcattaaggagcacatatttttattaacttcttttgagctttcaatgttgatgtaatttttgttctctgtgtaatttaggtaaactgcagtgtttaacataataatgttttaaagacttagttgtcagtattaaataatcctggcattatagggaaaaaacctcctagaagttagattatttgctactgtgagaatattgtcaccactggaagttactttagttcatttaattttaattttatattttgtgaatattttaagaactgtagagctgctttcaatatctagaaatttttaattgagtgtaaacacacctaactttaagaaaaagaaccgcttgtatgattttcaaaagaacatttagaattctatagagtcaaaactatagcgtaatgctgtgtttattaagccagggattgtgggacttcccccaggcaactaaacctgcaggatgaaaatgctatattttctttcatgcactgtcgatattactcagatttggggaaatgacatttttatactaaaacaaacaccaaaatattttagaataaattcttagaaagttttgagaggaatttttagagaggacatttcctccttcctgatttggatattccctcaaatccctcctcttactccatgctgaaggagaagtactctcagatgcattatgttaatggagagaaaaagcacagtattgtagagacaccaatattagctaatgtattttggagtgttttccattttacagtttatattccagcactcaaaactcagggtcaagttttaacaaaagaggtatgtagtcacagtaaatactaagatggcatttctatctcagagggccaaagtgaatcacaccagtttctgaaggtcctaaaaatagctcagatgtcctaatgaacatgcacctacatttaataggagtacaataaaactgttgtcagcttttgttttacagagaacgctagatattaagaattttgaaatggatcatttctacttgctgtgcattttaaccaataatctgatgaatatagaaaaaaatgatccaaaatatggatatgattggatgtatgtaacacatacatggagtatggaggaaattttctgaaaaatacatttagattagtttagtttgaaggagaggtgggctgatggctgagttgtatgttactaacttggccctgactggttgtgcaaccattgcttcatttctttgcaaaatgtagttaagatatactttattctaatgaaggccttttaaatttgtccactgcattcttggtatttcactacttcaagtcagtcagaacttcgtagaccgacctgaagtttctttttgaatacttgtttctttagcactttgaagatagaaaaaccactttttaagtactaagtcatcatttgccttgaaagtttcctctgcattgggtttgaagtagtttagttatgtctttttctctgtatgtaagtagtataatttgttactttcaaatacccgtactttgaatgtaggtttttttgttgttgttatctataaaaattgagggaaatggttatgcaaaaaaatattttgctttggaccatatttcttaagcataaaaaaaatgctcagttttgcttgcattccttgagaatgtatttatctgaagatcaaaacaaacaatccagatgtataagtactaggcagaagccaattttaaaatttccttgaataatccatgaaaggaataattcaaatacagataaacagagttggcagtatattatagtgataattttgtattttcacaaaaaaaaagttaaactcttcttttctttttattataatgaccagcttttggtatttcattgttaccaagttctatttttagaataaaattgttctccttctaaaagttttaa

SEQ ID NO: 9178 - protein, 189 aa, Homo sapiens
MGLGARGAWAALLLGTLQVLALLGAAHESAAMAETLQHVPSDHTNETSNSTVKPPTSVASDSSNTTVTTMKPTAASNTTTPGMVSTNMTSTTLKSTPKTTSVSQNTSQISTSTMTVTHNSSVTSAASSVTITTTMHSEAKKGSKFDTGSFVGGIVLTLGVLSILYIGCKMYYSRRGIRYRTIDEHDAII

SEQ ID NO: 9179 - DNA, 3570 bp, Homo sapiens
cgcgaagccagcgtgctcagcattcagggaggcagcggcgctcgccttcatccaggacaacaaaactgccatttccgaagagaaaggaaacggctcgcggtttctggggttcccaagcgcgcgcctgcgagggaggccgcgagccgagtcgccacgcccagaaccccgagcccgcccccgcgccacccagcccggccccgccgccccggctgcgcacgcgacgccccctccaggccccgctcctgcgccctatttggtcattcggggggcaagcggcgggaggggaaacgtgcgcggccgaaggggaagcggagccggcgccggctgcgcagaggagccgctctcgccgccgccacctcggctgggagcccacgaggctgccgcatcctgccctcggaacaatgggactcggcgcgcgaggtgcttgggccgcgctgctcctggggacgctgcaggtgctagcgctgctgggggccgcccatgaaagcgcagccatggcggcatctgcaaacatagagaattctgggcttccacacaactccagtgctaactcaacagagactctccaacatgtgccttctgaccatacaaatgaaacttccaacagtactgtgaaaccaccaacttcagttgcctcagactccagtaatacaacggtcaccaccatgaaacctacagcggcatctaatacaacaacaccagggatggtctcaacaaatatgacttctaccaccttaaagtctacacccaaaacaacaagtgtttcacagaacacatctcagatatcaacatccacaatgaccgtaacccacaatagttcagtgacatctgctgcttcatcagtaacaatcacaacaactatgcattctgaagcaaagaaaggatcaaaatttgatactgggagctttgttggtggtattgtattaacgctgggagttttatctattctttacattggatgcaaaatgtattactcaagaagaggcattcggtatcgaaccatagatgaacatgatgccatcatttaaggaaatccatggaccaaggatggaatacagattgatgctgccctatcaattaattttggtttattaatagtttaaaacaatattctctttttgaaaatagtataaacaggccatgcatataatgtacagtgtattacgtaaatatgtaaagattcttcaaggtaacaagggtttgggttttgaaataaacatctggatccttatagaccgttcatacaatggttttagcaagttcatagtaagacaaacaagtcctatctttttttttttggctggggtgggggcattggtcacatatgaccagtaattgaaagacgtcatcactgaaagacagaatgccatctgggcatacaaataagaagtttgtcacagcactcaggattttgggtatcttttgtagctcacataaagaacttcagtgcttttcagagctggatatatcttaattactaatgccacacagaaattatacaatcaaactagatctgaagcataatttaagaaaaacatcaacattttttgtgctttaaactgtagtagttggtctagaaacaaaatactccaagaaaaagaaaattttcaaataaaacccaaaataatagctttgcttagccctgttagggatccattggagcattaaggagcacatatttttattaacttcttttgagctttcaatgttgatgtaatttttgttctctgtgtaatttaggtaaactgcagtgtttaacataataatgttttaaagacttagttgtcagtattaaataatcctggcattatagggaaaaaacctcctagaagttagattatttgctactgtgagaatattgtcaccactggaagttactttagttcatttaattttaattttatattttgtgaatattttaagaactgtagagctgctttcaatatctagaaatttttaattgagtgtaaacacacctaactttaagaaaaagaaccgcttgtatgattttcaaaagaacatttagaattctatagagtcaaaactatagcgtaatgctgtgtttattaagccagggattgtgggacttcccccaggcaactaaacctgcaggatgaaaatgctatattttctttcatgcactgtcgatattactcagatttggggaaatgacatttttatactaaaacaaacaccaaaatattttagaataaattcttagaaagttttgagaggaatttttagagaggacatttcctccttcctgatttggatattccctcaaatccctcctcttactccatgctgaaggagaagtactctcagatgcattatgttaatggagagaaaaagcacagtattgtagagacaccaatattagctaatgtattttggagtgttttccattttacagtttatattccagcactcaaaactcagggtcaagttttaacaaaagaggtatgtagtcacagtaaatactaagatggcatttctatctcagagggccaaagtgaatcacaccagtttctgaaggtcctaaaaatagctcagatgtcctaatgaacatgcacctacatttaataggagtacaataaaactgttgtcagcttttgttttacagagaacgctagatattaagaattttgaaatggatcatttctacttgctgtgcattttaaccaataatctgatgaatatagaaaaaaatgatccaaaatatggatatgattggatgtatgtaacacatacatggagtatggaggaaattttctgaaaaatacatttagattagtttagtttgaaggagaggtgggctgatggctgagttgtatgttactaacttggccctgactggttgtgcaaccattgcttcatttctttgcaaaatgtagttaagatatactttattctaatgaaggccttttaaatttgtccactgcattcttggtatttcactacttcaagtcagtcagaacttcgtagaccgacctgaagtttctttttgaatacttgtttctttagcactttgaagatagaaaaaccactttttaagtactaagtcatcatttgccttgaaagtttcctctgcattgggtttgaagtagtttagttatgtctttttctctgtatgtaagtagtataatttgttactttcaaatacccgtactttgaatgtaggtttttttgttgttgttatctataaaaattgagggaaatggttatgcaaaaaaatattttgctttggaccatatttcttaagcataaaaaaaatgctcagttttgcttgcattccttgagaatgtatttatctgaagatcaaaacaaacaatccagatgtataagtactaggcagaagccaattttaaaatttccttgaataatccatgaaaggaataattcaaatacagataaacagagttggcagtatattatagtgataattttgtattttcacaaaaaaaaagttaaactcttcttttctttttattataatgaccagcttttggtatttcattgttaccaagttctatttttagaataaaattgttctccttctaaaagttttaa

SEQ ID NO: 9180 - protein, 208 aa, Homo sapiens; identical to SEQ ID NO: 1400

SEQ ID NO: 9181 - DNA, 902 bp, Homo sapiens
agtcacccgctggccccggggccgcctgctgaggaaattgcctggtgcttcccctctcgctttttggatgcggcggtcgcaggccgggacgggtgcgcataacctgttgagttaccgcaagttggtttttacagcctttccctgaagttaatgtttgccgagcatctgcaaacatagagaattctgggcttccacacaactccagtgctaactcaacagagactctccaacatgtgccttctgaccatacaaatgaaacttccaacagtactgtgaaaccaccaacttcagttgcctcagactccagtaatacaacggtcaccaccatgaaacctacagcggcatctaatacaacaacaccagggatggtctcaacaaatatgacttctaccaccttaaagtctacacccaaaacaacaagtgtttcacagaacacatctcagatatcaacatccacaatgaccgtaacccacaatagttcagtgacatctgctgcttcatcagtaacaatcacaacaactatgcattctgaagcaaagaaaggatcaaaatttgatactgggagctttgttggtggtattgtattaacgctgggagttttatctattctttacattggatgcaaaatgtattactcaagaagaggcattcggtatcgaaccatagatgaacatgatgccatcatttaaggaaatccatggaccaaggatggaatacagattgatgctgccctatcaattaattttggtttattaatagtttaaaacaatattctctttttgaaaatagtataaacaggccatgcatataatgtacagtgtattacgtaaatatgtaaagattcttcaaggtaacaagggtttgggttttgaaataaacatctggatccttatagaccgttc

SEQ ID NO: 9182 - protein, 120 aa, Homo sapiens; identical to SEQ ID NO: 9174

SEQ ID NO: 9183 - DNA, 1241 bp, Homo sapiens
cgcgaagccagcgtgctcagcattcagggaggcagcggcgctcgccttcatccaggacaacaaaactgccatttccgaagagaaaggaaacggctcgcggtttctggggttcccaagcgcgcgcctgcgagggaggccgcgagccgagtcgccacgcccagaaccccgagcccgcccccgcgccacccagcccggccccgccgccccggctgcgcacgcgacgccccctccaggccccgctcctgcgccctatttggtcattcggggggcaagcggcgggaggggaaacgtgcgcggccgaaggggaagcggagccggcgccggctgcgcagaggagccgctctcgccgccgccacctcggctgggagcccacgaggctgccgcatcctgccctcggaacaatgggactcggcgcgcgaggtgcttgggccgcgctgctcctggggacgctgcaggtgctagcgctgctgggggccgcccatgaaagcgcagccatggcggcatctgcaaacatagagaattctgggcttccacacaactccagtgctaactcaacagagactctccaacatgtgccttctgaccatacaaatgaaacttccaacagtactgtgaaaccaccaacttcagttgcctcagactccagtaatacaacggtcaccaccatgaaacctacagcggcatctaatacaacaacaccagggatggtctcaacaaatatgacttctaccaccttaaagtctacacccaaaacaacaagtgtttcacagaacacatctcagatatcaacatccacaatgaccgtaacccacaatagttcagtgacatctgctgcttcatcagtaacaatcacaacaactatgcattctgaagcaaagaaaggatcaaaatttgatactgggagctttgttggtggtattgtattaacgctgggagttttatctattctttacattggatgcaaaatgtattactcaagaagaggcattcggtatcgaaccatagatgaacatgatgccatcatttaaggaaatccatggaccaaggatggaatacagattgatgctgccctatcaattaattttggtttattaatagtttaaaacaatattctctttttgaaaatagtataaacaggccatgcatataatgtacagtgtattacgtaaatatgtaaagattcttcaaggtaacaagggtttgggttttgaaataaacatctggatccttatagaccgttc

SEQ ID NO: 9184 - protein, 208 aa, Homo sapiens; identical to SEQ ID NO: 1400

SEQ ID NO: 9185 - DNA, 708 bp, Homo sapiens
cgtttcctttctcttcggaaatggcagttttgttgtcctggatgaaggcgagcgccgctgcctccctgaatgctgagcacgctggcttcgcggtgcccggaaggaagcctttgaagaccctgactccagtgtctccagctgagaggctgagcttgccagctccatttctgactgctcatggagcagaatcagtgaccaaggagaaaagggctgagtgaagaaacaagtgtgagtgccaagatgatgccaagggctgtgatttcctggtgggaagaaagaaggaatagaagccaaaggaagggggatgaaaagcaaaaccaagaatcacaaggaatcaagttcggagagaattttggcagagattttgagaggggggctttaagtcagccatggacatactgaagcaagaggaatgaagggaaaaaagaaaaggggggaaaaaaagaagaagaatggggccaaggaggatttaagactaccattataggttacaagttgaattctttttaatattcttcaagcaatgacagtaaagattcaaataacttttaaattacctttgatttctaaaccaagtttcttggaatgtgaaagtcgccaagactgggccctgcagggcctgggttgggctactactgcctatggagattctgagggtattaaccttaataatggcatgaaatcaataaaaatcatccaaaagctttt

SEQ ID NO: 9186 - protein, 65 aa, Homo sapiens; identical to SEQ ID NO: 1402

SEQ ID NO: 9187 - DNA, 490 bp, Homo sapiens
ggtcaaggtcatccagagacctgtcctcctgcatagccttgttgggaaggaccaacaggtggcttgctggtgcctgagacacaagagactggtgagatgagctgaaaatgggaggtatttaacgggtgcttactctgtgtcatgtgcccttcttgctgctgaacaaagtggataaattccttgcctgaaagtaattaaggaagaggagaatggatactggagaaaatagtgatccatcacagcccactcctttggccctccatgtagccaggctcaccattttttctcagcagtggagcgtaatcaccacataccaacaacccaaagtcctgtctgggtgctgcatccatctccaagtccaggatctctgggtgatgtgctgtcctctccatcaagtgacagggtggctcttgcctcccacacctacatccagtatgtaatgatgttgtagaatggtatatctgcaataaaatctctctttcacaaatgg

SEQ ID NO: 9188 - protein, 76 aa, Homo sapiens
MDTGENSDPSQPTPLALHVARLTIFSQQWSVITTYQQPKVLSGCCIHLQVQDLWVMCCPLHQVTGWLLPPTPTSSM

SEQ ID NO: 9189 - DNA, 1701 bp, Homo sapiens
gaacgccagcgccagggggcggggtgggggagggagcgaggccctccgagagccgggttgggctcgcggcgctgtgattggtctgcccggactccgcctccagcgcatgtcattagcatctcattagctgtccgctcgggctccggaggcagccaacgccgccagtctgaggcaggtgcccgacatggcgagtgtagtgctgccgagcggatcccagtgtgcggcggcagcggcggcggcggcgcctcccgggctccggctccggcttctgctgttgctcttctccgccgcggcactgatccccacaggtgatgggcagaatctgtttacgaaagacgtgacagtgatcgagggagaggttgcgaccatcagttgccaagtcaataagagtgacgactctgtgattcagctactgaatcccaacaggcagaccatttatttcagggacttcaggcctttgaaggacagcaggtttcagttgctgaatttttctagcagtgaactcaaagtatcattgacaaacgtctcaatttctgatgaaggaagatacttttgccagctctataccgatcccccacaggaaagttacaccaccatcacagtcctggtcccaccacgtaatctgatgatcgatatccagaaagacactgcggtggaaggtgaggagattgaagtcaactgcactgctatggccagcaagccagccacgactatcaggtggttcaaagggaacacagagctaaaaggcaaatcggaggtggaagagtggtcagacatgtacactgtgaccagtcagctgatgctgaaggtgcacaaggaggacgatggggtcccagtgatctgccaggtggagcaccctgcggtcactggaaacctgcagacccagcggtatctagaagtacagtataagcctcaagtgcacattcagatgacttatcctctacaaggcttaacccgggaaggggacgcgcttgagttaacatgtgaagccatcgggaagccccagcctgtgatggtaacttgggtgagagtcgatgatgaaatgcctcaacacgccgtactgtctgggcccaacctgttcatcaataacctaaacaaaacagataatggtacataccgctgtgaagcttcaaacatagtggggaaagctcactcggattatatgctgtatgtatacgattcccgagcaggtgaagaaggctcgatcagggcagtggatcatgccgtgatcggtggcgtcgtggcggtggtggtgttcgccatgctgtgcttgctcatcattctggggcgctattttgccagacataaaggcctgttttctctaacctcctctcccagaataaagtgatgagggcagctatagtgttgcaattaggaacatgaatcttttatcgtttggacaaggaagggaaaatgccattactgtcaactgaaatgtcctacttgggttttttgctcctacttccctgccaaagcccattgctgctgctgaaattgtataacattcacagctgttcttgatggcttgattcttaacacagccagaaatgtagcccgggagatgcttaagacagtttatggaaaataatagatttccttgcagagacaccaatgcatcgagaagggccttgagtcacgttagccccagccaagatcaccaattttctctctatctggcttcagttacaaaggctatgcctt

SEQ ID NO: 9190 - protein, 387 aa, Homo sapiens
MASVVLPSGSQCAAAAAAAAPPGLRLRLLLLLFSAAALIPTGDGQNLFTKDVTVIEGEVATISCQVNKSDDSVIQLLNPNRQTIYFRDFRPLKDSRFQLLNFSSSELKVSLTNVSISDEGRYFCQLYTDPPQESYTTITVLVPPRNLMIDIQKDTAVEGEEIEVNCTAMASKPATTIRWFKGNTELKGKSEVEEWSDMYTVTSQLMLKVHKEDDGVPVICQVEHPAVTGNLQTQRYLEVQYKPQVHIQMTYPLQGLTREGDALELTCEAIGKPQPVMVTWVRVDDEMPQHAVLSGPNLFINNLNKTDNGTYRCEASNIVGKAHSDYMLYVYDSRAGEEGSIRAVDHAVIGGVVAVVVFAMLCLLIILGRYFARHKGLFSLTSSPRIK

SEQ ID NO: 9191 - DNA, 2052 bp, Homo sapiens
gacagtgatattggaacttgcgagaaattcgtgtgtttttttatgaatgggtggaaaggtgtgagactgggaaggcttgggatttgctgtgtaaaaaaaaaaaaaatgttctttggaaagtacactctgctgtttgacacctcttttttcgtttgtttgtttgtttaatttttatttcttcctaccaagtcaaacttggatacttggatttagtttcagtagattgcagaaaattctgtgccttgttttttgtttgtttgttgcgttcctttcttttccccctttgtgcacatttatttcctccctctaccccaatttcggattttttccaaaatctcccattttggaatttgcctgctgggattccttagactcttttccttcccttttctgttctagttttttacttttgtttatttttatggtaactgctttctgttccaaattcagtttcataaaaggagaaccagcacagcttagatttcatagttcagaatttagtgtatccataatgcattcttctctgttgtcgtaaagatttgggtgaacaaacaatgaaaactctttgctgctgcccatgtttcaaatacttagagcagtgaagactagaaaattagactgtgattcagaaaatgttctgtttgctgtggaactacattactgtacagggttatctgcaagtgaggtgtgtcacaatgagattgaatttcactgtctttaattctgtatctgtagacggctcagtatagataccctacgctgtccagaaaggtttggggcagaaaggactcctcctttttccatgccctaaacagacctgacaggtgaggtctgttccttttatataagtggacaaattttgagttgccacaggaggggaagtagggaggggggaaatacagttctgctctggttgtttctgttccaaatgattccatccacctttcccaatcggccttaattttggattttgcaaggtgcatttttactattgttacattatgtggaaaacttatgctgatttatttaagggggaaaaagtgtcaactctttgttatttgaaaacatgtttatttttcttgtctttattttaacctttgatagaaccattgcaatatgggggccttttgggaacggactggtatgtaaaagaaaatccattatcgagcagcattttatttacccctcccctatccctaggcacttaaccaagacaaaaagccacaatgaacatccctttttcaatgaattttataatctgcagctctattccgagcccttagcacccattccgaccatagtataatcatatcaaagggtgagaatcatttagcatgttgttgaaaggttttttttcagttgttctttttagaaaaaaagaaaaacaaaaacaaaaacaaaaaaaaaaaatcacaccattgctcacagaattggcatctcatttttgggacctcccatctttctgttttgaaaagtgtacagtagtgcagtgttcctgatgtaactttatggcttacaatgttgacatgtctcaggttcatgtgttgcgattggtgttttccgtctcaggtagattgcaaagtgtaggccccacacattggaaaaaataataataaaacaaagcaaaaacaggaaattatggattttagttgtatattggtttatgtattttttcttaagtatacagtgcactgtttgaaatgtattgttgagtattactttgtacaggttgatcactttttttagagtgaagaaagaacaaacttgttttttgtgttttttaaaggaatataaaataatgaaggatgtataattgatgccaaataagcttgttctttagtcacaccgacgtcttatttttccctttaggccagttctgtttttaaggtgtacatggacaatgttacagtgtaagaaactccatatccatatgttcccattcgcattttgtattggttcatgtataccatttttacaaaaaaaaaaagaaaaaaaagaagtactataaaatatctgtcttcttaataaaaaaaaattaatgttacaaagtga

SEQ ID NO: 9192 - protein, 79 aa, Homo sapiens [sequence omitted]

SEQ ID NO: 9193 - DNA, 4751 bp, Homo sapiens
ctgggagttgatgagtagcactccttgatttggattttctctaaatataaagctttgtagagttgttattctgccatccataattggggatagaggaaaaatgataaagtagaggctggtgtgcaaggtgtggcatgaagccgcaaaggataaacatggaaaaagcacatccacaacctactgttttctgggaggcagaggatttccccctatcccctgtccccagactctgtgtaagctggtcacaatggcgagaagactgccttggtttgatgtgcccaggttaaagaaaattttttgccttaaaagccgcataaatatgtatttttaaaattatcagtgcaattgatttaaattgccattaatcatcacacttatcaactgtgcagtctggatgggcaatcatcttttccaatgcccctcctgtctgccccatgctgctctgatcctcttcttccctcttggtaatttattcttccttttctttgtccgcccctgtctctctcagttatttttctcaagcactgtgcaatgagcttgcggggttttctaggtgcttgcatactgcttgactgttgaacttgggtttgggggaaggtcccttgagcacagcagtggaggtctaaggtacttaggcacctttaggatacagagtgcctgtctcaagcataaaacagtttaggacgatcagagctgtccatacttcgccctctgcccacactcaggaggcagtctgtttggccaagagctcccagcctctcggtggtaagcttgacagagacaggaggtaaggccagagagcagggcagcatccgagcagcagctgtgaaggaccaggggaggggaacatgtgtgtcactctgcagcaagaaaaaaggatactgagaagcgtttgacctcttgctttctcagatttgttactttgaaaacctgaaaatatagcaaatgtctcaacctttttaaatagaagactcttcaggaatacagtatgtaatgggaggaagattatttgattatggtaggcagtttaacttctacctatatagcatactgaggtgcagtctttgttgttctccatgtaaactgttgggatttggtgataagagtgtccccagctgtgtaatgtctgtctattgtcattataaagtggctgtgccaattagcaaatccatgaatccgggtccgggctagagttatacgatgagagagacctacttgctcattaagacagatcccaaaccttgatccctgctattataatgtcaaattctttctcaatctggaacctcactctgaagtggaagacaggaaaatcaaacatacttgtgcaagttcaagcaccttctcacctatgggtaggcaacaatgattcatttattggctaattgctcttccttgctttggtctttaacaatgtacgtgcacatatctggtcattggtcattggtgtttactgtttatacgttagtcagcccctctccagctttctgcatttttagctcccactcacgtcttcttctgctgacatcctctggtcataatcactgctctaatgtctcatttgctgaattatatcgcagcggttcagttggagtggtgcctttggaacccccggatccccctttgtctcacccaccccgctctcttcttccaattgttttttcccctctgctgcctgcacaccacttcggctgatgatggccataaagcaagttgccatctctgtaccactttacacagaggccatcagacagtcacggtgctttaccccttcatctttcaggtacatacttcactcatgaagccaaaggagccgatgacgcagcagacgcagacacagctataatcaatgcagaaggaggacagaacaactccgaagaaaagaaagagtacttcatctagatcagcctttttgtttcaatgaggtgtccaactggccctatttagatgataaagagacagtgatattggaacttgcgagaaattcgtgtgtttttttatgaatgggtggaaaggtgtgagactgggaaggcttgggatttgctgtgtaaaaaaaaaaaaaatgttctttggaaagtacactctgctgtttgacacctcttttttcgtttgtttgtttgtttaatttttatttcttcctaccaagtcaaacttggatacttggatttagtttcagtagattgcagaaaattctgtgccttgttttttgtttgtttgttgcgttcctttcttttccccctttgtgcacatttatttcctccctctaccccaatttcggattttttccaaaatctcccattttggaatttgcctgctgggattccttagactcttttccttcccttttctgttctagttttttacttttgtttatttttatggtaactgctttctgttccaaattcagtttcataaaaggagaaccagcacagcttagatttcatagttcagaatttagtgtatccataatgcattcttctctgttgtcgtaaagatttgggtgaacaaacaatgaaaactctttgctgctgcccatgtttcaaatacttagagcagtgaagactagaaaattagactgtgattcagaaaatgttctgtttgctgtggaactacattactgtacagggttatctgcaagtgaggtgtgtcacaatgagattgaatttcactgtctttaattctgtatctgtagacggctcagtatagataccctacgctgtccagaaaggtttggggcagaaaggactcctcctttttccatgccctaaacagacctgacaggtgaggtctgttccttttatataagtggacaaattttgagttgccacaggaggggaagtagggaggggggaaatacagttctgctctggttgtttctgttccaaatgattccatccacctttcccaatcggccttacttctcactaatttgtaggaaaaagcaagttcgtctgttgtgcgaatgactgaatgggacagagttgatttttttttttttttcctttgtgcttagttaggaaggcagtaggatgtggcctgcatgtactgtatattacagatatttgtcatgctgggatttccaactcgaatctgtgtgaaactttcattccttcagatttggcttgacaaaggcaggaggtacaaaagaagggctggtattgttctcacactggtctgctgtcgctctcagttctcgataggtcagagcagaggtggaaaaacagcatgtacggattttcagttacttaatcaaaactcaaatgtgagtgtttttatctttttacctttcatacactagccttggcctctttcctcagccttaagaaccatctgccaaaaattactgatcctcgcatgatggcagccatagtgcatagctactaaaatcagtgaccttgaacatatcttagatggggagcctcgggaaaaggtagaggagtcacgttaccatttacatgttttaaagaaagaagtgtggggattttcactgaaacgtctaggaaatctagaagtagtcctgaaggacagaaactaaactcttaccatatgtttggtaagactccagactccagctaacagtccctatggaaagatggcatcaaaaaagatagatctatatatatatataaatatatattctattacattttcagtgagtaattttggattttgcaaggtgcatttttactattgttacattatgtggaaaacttatgctgatttatttaagggggaaaaagtgtcaactctttgttatttgaaaacatgtttatttttcttgtctttattttaacctttgatagaaccattgcaatatgggggccttttgggaacggactggtatgtaaaagaaaatccattatcgagcagcattttatttacccctcccctatccctaggcacttaaccaagacaaaaagccacaatgaacatccctttttcaatgaattttataatctgcagctctattccgagcccttagcacccattccgaccatagtataatcatatcaaagggtgagaatcatttagcatgttgttgaaaggttttttttcagttgttctttttagaaaaaaagaaaaacaaaaacaaaaacaaaaaaaaaaaatcacaccattgctcacagaattggcatctcatttttgggacctcccatctttctgttttgaaaagtgtacagtagtgcagtgttcctgatgtaactttatggcttacaatgttgacatgtctcaggttcatgtgttgcgattggtgttttccgtctcaggtagattgcaaagtgtaggccccacacattggaaaaaataataataaaacaaagcaaaaacaggaaattatggattttagttgtatattggtttatgtattttttcttaagtatacagtgcactgtttgaaatgtattgttgagtattactttgtacaggttgatcactttttttagagtgaagaaagaacaaacttgttttttgtgttttttaaaggaatataaaataatgaaggatgtataattgatgccaaataagcttgttctttagtcacaccgacgtcttatttttccctttaggccagttctgtttttaaggtgtacatggacaatgttacagtgtaagaaactccatatccatatgttcccattcgcattttgtattggttcatgtataccatttttacaaaaaaaaaaagaaaaaaaagaagtactataaaatatctgtcttcttaataaaaaaaaattaatgttacaaagtga

SEQ ID NO: 9194 - protein, 109 aa, Homo sapiens
MIHLLANCSSLLWSLTMYVHISGHWSLVFTVYTLVSPSPAFCIFSSHSRLLLLTSSGHNHCSNVSFAELYRSGSVGVVPLEPPDPPLSHPPRSLLPIVFSPLLPAHHFG

SEQ ID NO: 9195 - DNA, 11304 bp, Homo sapiens
ctgggcaccagggatgctgcagtgaacaagaccaacaggagctggagctgccatggcgtccaggagccagggcccctgctctcctaccgcgacaccctactgagggagacagacccaaaacacgagttaatcttggacagtgacaaatgctgtgaaacaataaaaccggataaagtggaagtgagggctggggctggaagaaggtggaggtcagtttagaaaagtttaccagggaaggccattgggacaggaagacccagatagatgagaatgagccagataatagaagattttcatgaaaatctcctgagattgttaaggaagggctcttggtctccatttataaatgaggaaactgggacccaaacggctaaacggtttgcttaggagacagtgagaagcgaagcatgggtcttcctggctctagaggaaatagaggactttggtttgcaggggccacctttccccctatgaaatccacagcttcctgtgtgctggagcctttggtaatcctcttgacccttttcaattcactgtgcgcacccggggaatgagggaaaagtcaggctctctgcagcccatcaggcatagagcaatgtgctgactaacctgggaagattttttttcccagcatcaaatcaagctctttctcctcaaagaagacctaaactctgcttcagtagtttagtactgttgtcccactgattcccctaaattatgggatcagtttcccctgggaggtgaccctaagtgccatgggaaagtgatggctggaaaaggttaaaccacatcaattcccttttaaaactgagtttcatacaaggcagtagactgaagaaatcacattgggtccatgccagctcacccacgacttccccacgatgtgtttgaactgcatcctgctgctggtctttctcataatccaacatgctcctgtttccaccgtgggaagggaggagaccatcaaacgggaacttttcttccaaagttaaaaagttggcaggccacggtgagtgtgaattctagttctacaggttggacactgctttggggtgacttcaccatattcattaatccatcctcctcacacccccaaatgcctgaggtccactgaagcatctttctccagagagagattctagtgggaaatgtatgtttggaaatactcgacaactgtcctgtttatcaggcgtatattcctttaagggaaactctggtgtcatcctcagtgccttcctgttgcttaaaatggaaaagatgatcacatttctaaatctgtgctatcatgagatgaacagagtggactcaagcacgacttctggtgtctctggcggtgttaaatgccttgggagaaatcttgcatcctgttggatcaagtcatttccactcatggttaaattaactaaatcaaggaatttgagaggggaaaaaatcaacaagaaaaaacccaaaacacttgttttcatatttagctacaatagtatttaatatcctgatactcaaatggtacacccgaatcgaaacctgaatcagacggccttcacctgccaggcccacagccttgaccttcataaaggacagctaagccattagttacacagtttgtcaattctgtataaatgaaaagaacttggtgacttcaactcagtaagtgtttattgggcatcttaccatgtgtgggcaatgctgagtatgcagtaccacgcttacccctaacgaactggtaattatttgccttgggtcggtgataagaactggaaaagccctccttaggctctaatacaggagatttgaatttggcaaacaccaggtccctatgatactccaagccctgagccaaataggcactttcatttggctcaggaaatgaaaacagtggcctctcaaagtgaccctgtgaagtacgtaattgtactcagtggctcagagtgcctcattgacctgcctgaagtcacagagaaaagtaatgaagctcaagttctgtcccagaaatgacagcaagtccagtgctctttccaatggaccatgcaggagatgagctcctagctcgtcccctgttcaggcctgtttctggaaagcaatgtagccagtgatagtctaagagagccctgagtcctgatcatttgagtagtgacaaggtacagccaaaatctgtgtgcagtacttctaatttaaatgaacacatactgagctctgggtggcaccatgaggatgatcactgcagttttcctttaagtagcttaacatagctcctttgaaacgttagtatagatgcagttacattgctagaattgaatgcagctgacgtgtagtagtagatgcctgggatgctatatgggagtcttcatgattttcttgctttacgtttattccttctcgtccactttctaagaagacagaaaagaaaggttatgctgcataaaggctagtgtgctccaatatatattaacatcttaatgggaaagctgtgcatgtactgtatacatttactactctctgacaagagggaattaaatgtcagaaggatttgtagcatctataattgaattggtgctgagaaaagcaaatcttaaagaagaataacatattaggattagcaaataatgtggcattttgtcagcgcatgccattcagtttgttccccttcagtaataaagttgtgctttttaaaatgcacacttatttttgttgccatggacgggagctacaatagatgatgagaatgggtagctacatttttcagatggtgccaggttttcttaagtgtcattttttttttaggtcagattatggttttgcttcagatttgggaaatccactaccaggctttttctttcttcctagcaagaagtaacaaatgacatcatagtcactaagctttctctgaaatagactaatccctacaaccctaggaagctggaggcagcatttccattacaaacaccgattctgagagtttgtaattaaactgacttgtccagcaagatctccacccaggaaaggaactaaaactgagccacgtgacagaactgttgcaaaaaagtccgcaacaattcttttcctccagtcatccacggatgggggaagcacagaacgctgagcatctgaactgtccctaaacagaagtaggaagactaataccgttagaacctccccatggcttaaacgtaaaaatgagagctgaggtagtttatgacctatgaaaagagttaaagtgtgcgtttaagcgccatgttgctaaatgtgccttacagcctgagccagggatgtttgagatgtgagggtgacccagtgcaatgtggctgtcatgcctcatgctgcatactttattgtgtatcattgtgtcacccttcactccttctcagaggtagaaatcttggtgtccttttggcaaaaagactgaccttggactctgtgtagccgagggcttcagggtgggcaggcagcagttgcagtgaaggttctgctcagtgagtccttctgccaaagtccctatttgccaggagcttgtctaggatgtactagccactctccagttatccatggatccccactttggcagcagagccttctaggcttatcacagatccatgattatggcatttgcatggcggtttatgctacacatctcatgccaggtggtaaagtagccatagaaaccaggatctcttgcagagccctgtttaatacaggcagcatggctgccagagtgctgcgtttaagacgactctggcaaggagtttgaggaatgaaaacaagtagagaaagaaaagtctcctagaaggaggggaaaggagactgaagttccactagcagtcacctttcttgtcacgccctggggaactactgcctttagaacttccccttcttattgcccatgaggaatggatcgggccaggtcaactggcccaaggtaaagaaatctgagcagtttggggcatcactcttgggagtttctttgagatttctctgtcccgcaatttctaagatgctaaagcgagcccagggttgttgaagctgtgacccaagcagtagtggccaacttaacattctgcaagcagctggtaaactctcacctggagccaagttgtttcagctttttgccaaaagaaaagctaactcacgaatactaaacacctcatgatttatctgtcacacttagagccatggaagtggctgcgggatgggacacgacaggcagggagggttgtaccacaactgtgagctgtcaggaacacctccctgcaactgctgcctgcccgccctgaagccctcgactacagagtccaaggtcagtctttttgccaaaaggacaccaagctttctacctctgaggaggagtgaagggtgacacagcgatacacaataacctttacagggttcatctgcaagtcagaatcattcaaggactaggcctaattcacctgaggtcacatgtgaaataatttggatgagattcttaactccagttgaactgtgttatgcaatcatgcttggttcactgaggctggaataacctttatgctggaaccattcaccaagcaaaaacatggctttacttttcaggatgatggggcagggcttagtcccagaaaagaaacactcttacacttgttactagtaagaggaacacttgtagcctcttagggaacaagaaaacatggctttctaaaccgaagtgatgtccatatgcctgagcatcaggcatgtttaaaagtgctttccactcccacatttatttttcaattgacaagctaggggcagctgtagaatctgcctctggtttcgttgcctgcccgattcagaaaatgagccgggaatctgaagagaatgtccccaggaaagccagcacttcatgggacctgaagaaggggtctgcaccctgcaggaccaggatctgtggctcatggggaaacccatagctttcccacttagaagtcatttctcatggaattggttagagtccttgccttgggaatggaaggaaaggtcaagcagctgacagactttgtcgcagccatgcttctcttagtgctcggtatttccttccatttctggttttcgtgcgactccagtagcccagttcccccctgggcagcatcttgcacggctgcttcatgtcatgagtgaggcacagcccgcaggtgcaggcagctcaccccggccctgctgccttgagccaatccatggcattataaacactcccccaccctccccacacgtggaaataaaagaacggactgagatgactccagaaacagctctgcttttcatagggaaggccaagacagaggcactcagtgaacaggcacaactctattaacacctcccacgtaaacccaggaggtgggagtgggggtgggaagaggcggtgaggcgctcgtaaccggcagtgttccctgtaaattaaacatcagttaccttctgtgtccatctgcagtaattgaaggcaggagaaatgtcttggtgattaactggtggtagtaaactttctgatcaaagtgggtatcagaagatagctggagagattacccttataaataagtatctgtaaaatatgtatgtccttgagggtggggaagataactagaacatctaaggttctagtttaatttgggcaaagtgcagggaaaaatagcaacactgagcatatttagctcaaagttcatggagggcaaaggtcaagtaaggagtttcggctcaagaaattaatctcacagatacatatacctcgtgagatctttttgtttgagggaggtttttgtttttctttgtcacagagcctctctctgtctctcccctcccccctcccccctcaggcttccagaatattcctgtgtctaggcatggagaggaggcggtcttttattaagagtggacaagatagtgtcttcccctagatgggttagaactgtcctggacagcttctcgaagcttctctctgttctcagtcttcctggaacctctcttcacctcttgcctcttgtgcctaactttcccctgtcctcaatgtctagtctcacttgttttcctcccccaattttaaaacatacagagttcatcgaaagacacataaattttaataggtctgaagctcatggccattggagatgagttaattctcattcccccaagattccctattttgacagctccctaaggaaaacacaacttgctggcttttctgttacttttgtcccccatgagcaattttgcatctgtgcagttggactgaacatctccagtgtgtcaagcgctctcctccagcagacaccccgtgtccagcagcaccccacggggaatgctccccttcaacgagctttgtcgtctctaaaaaggaaaaaaaaaaaaatcccttgaccgagttctgccttgttgaaatgactttcaagacaatgggggttgtagcatctgcagttggcaacacttttggctgaggagggagattcctctccaccacttttcaagttgagcttattagacacgttgctggaggggctcgctcagctcagagcgggctaattggctgcagtgcactctgcctccaacccagctcccttctccaattaaactcccatcatcctgttgtcctgggcgacctgctgctgcctctgatttggcatttctgtttgggttttggttttggtttttctgtagtcctttcaaagataacttaatgaaacactttaaatactccattttaaaatttaaactcttttaattaaagcacttttcatggaaccctcagtcacgagttatttccccacatccttcagtacttaatctcggagcagaattggaaatatcgatagaaagtgtaaatcatgccctcctgctgaaagcgttgtatcaggtttcggctcaaaagagcaccattacctttagctgtcacggatctgtacacttgatcgataaacttcaaatattattagaggtagaggcttcagagatttgctctgttctttggagagagacagagataaatctttcttaaaaattgacttgaatttgcactctcagtcttcctggtgaaatgcatttctcttaggcatccagcaactgcaagggggacagatttataggccatgtgcttcttgtactgaaagattcaaatggtaaatccttcacatatgacttcacaaatcatgtaaagttaaaagatttttaccgtttctgttgctgctgtgcttaaattgtaaggtacagctagtaaatcattttaatggaggtgtcgtacttgactcaataaaaaaaaaagacaatggtttagcttccactccaaaatgttaatgtattaatcaacgggagaataattgttttttactacattataaatctcaaatgccattaggatttcagcaaggggtgatgtagccacattcctaaattaaaattgtttacactgccatacatccattctgcatcaccatagctcattctgggttcattttggagttgttccccagccaaacatgtcgttcctcagtcagaagaagacatcctgagggggtgatgcttataaaggaaaattaattgcattgcaaggtgttaaataaataaaataaaaaccgttggtggcaatggacaattattccttgctgtctcttttgaaataggtttttaggttttaaattgaggcttactccttcatacatcctaaatgtagcaagcctgtcatttgtctttagtcttataatccttgttttatctctaggcaactgtggcttttgagcaccttacttctcctatgcatatccctaatctaccagataataaaagtcattgggcgtctatagaaagatgctgtacccttctgttgcctaaaggtgtcattcagagcaccctcaaatagtcaggtcagcccccttaattaggctctgcaactggatacagacagagtgaacgctaagactaggtcagggccggatagactatttcttccttccctgcctccctaagcttgttccacatgcattaaccctcctatgctgcttatcatgaaattgcctcgtggggagaacagatcgattcagcactggacaggtcagcctgttacctcagtgtaacttgatccatctcgattgttctctgtgactcctccattaaaaaagaaggtgaccctctgaccctggagacagtgtcgccggggcttctggtgccttgtaataagctctacatccctattcctcttctgattttaacagattcccgagcaggtgaagaaggctcgatcagggcagtggatcatgccgtgatcggtggcgtcgtggcggtggtggtgttcgccatgctgtgcttgctcatcattctggggcgctattttgccagacataaaggtacatacttcactcatgaagccaaaggagccgatgacgcagcagacgcagacacagctataatcaatgcagaaggaggacagaacaactccgaagaaaagaaagagtacttcatctagatcagcctttttgtttcaatgaggtgtccaactggccctatttagatgataaagagacagtgatattggaacttgcgagaaattcgtgtgtttttttatgaatgggtggaaaggtgtgagactgggaaggcttgggatttgctgtgtaaaaaaaaaaaaaatgttctttggaaagtacactctgctgtttgacacctcttttttcgtttgtttgtttgtttaatttttatttcttcctaccaagtcaaacttggatacttggatttagtttcagtagattgcagaaaattctgtgccttgttttttgtttgtttgttgcgttcctttcttttccccctttgtgcacatttatttcctccctctaccccaatttcggattttttccaaaatctcccattttggaatttgcctgctgggattccttagactcttttccttcccttttctgttctagttttttacttttgtttatttttatggtaactgctttctgttccaaattcagtttcataaaaggagaaccagcacagcttagatttcatagttcagaatttagtgtatccataatgcattcttctctgttgtcgtaaagatttgggtgaacaaacaatgaaaactctttgctgctgcccatgtttcaaatacttagagcagtgaagactagaaaattagactgtgattcagaaaatgttctgtttgctgtggaactacattactgtacagggttatctgcaagtgaggtgtgtcacaatgagattgaatttcactgtctttaattctgtatctgtagacggctcagtatagataccctacgctgtccagaaaggtttggggcagaaaggactcctcctttttccatgccctaaacagacctgacaggtgaggtctgttccttttatataagtggacaaattttgagttgccacaggaggggaagtagggaggggggaaatacagttctgctctggttgtttctgttccaaatgattccatccacctttcccaatcggccttacttctcactaatttgtaggaaaaagcaagttcgtctgttgtgcgaatgactgaatgggacagagttgatttttttttttttttcctttgtgcttagttaggaaggcagtaggatgtggcctgcatgtactgtatattacagatatttgtcatgctgggatttccaactcgaatctgtgtgaaactttcattccttcagatttggcttgacaaaggcaggaggtacaaaagaagggctggtattgttctcacactggtctgctgtcgctctcagttctcgataggtcagagcagaggtggaaaaacagcatgtacggattttcagttacttaatcaaaactcaaatgtgagtgtttttatctttttacctttcatacactagccttggcctctttcctcagccttaagaaccatctgccaaaaattactgatcctcgcatgatggcagccatagtgcatagctactaaaatcagtgaccttgaacatatcttagatggggagcctcgggaaaaggtagaggagtcacgttaccatttacatgttttaaagaaagaagtgtggggattttcactgaaacgtctaggaaatctagaagtagtcctgaaggacagaaactaaactcttaccatatgtttggtaagactccagactccagctaacagtccctatggaaagatggcatcaaaaaagatagatctatatatatatataaatatatattctattacattttcagtgagtaattttggattttgcaaggtgcatttttactattgttacattatgtggaaaacttatgctgatttatttaagggggaaaaagtgtcaactctttgttatttgaaaacatgtttatttttcttgtctttattttaacctttgatagaaccattgcaatatgggggccttttgggaacggactggtatgtaaaagaaaatccattatcgagcagcattttatttacccctcccctatccctaggcacttaaccaagacaaaaagccacaatgaacatccctttttcaatgaattttataatctgcagctctattccgagcccttagcacccattccgaccatagtataatcatatcaaagggtgagaatcatttagcatgttgttgaaaggttttttttcagttgttctttttagaaaaaaagaaaaacaaaaacaaaaacaaaaaaaaaaaatcacaccattgctcacagaattggcatctcatttttgggacctcccatctttctgttttgaaaagtgtacagtagtgcagtgttcctgatgtaactttatggcttacaatgttgacatgtctcaggttcatgtgttgcgattggtgttttccgtctcaggtagattgcaaagtgtaggccccacacattggaaaaaataataataaaacaaagcaaaaacaggaaattatggattttagttgtatattggtttatgtattttttcttaagtatacagtgcactgtttgaaatgtattgttgagtattactttgtacaggttgatcactttttttagagtgaagaaagaacaaacttgttttttgtgttttttaaaggaatataaaataatgaaggatgtataattgatgccaaataagcttgttctttagtcacaccgacgtcttatttttccctttaggccagttctgtttttaaggtgtacatggacaatgttacagtgtaagaaactccatatccatatgttcccattcgcattttgtattggttcatgtataccatttttacaaaaaaaaaaagaaaaaaaagaagtactataaaatatctgtcttcttaataaaaaaaaattaatgttacaaagtga

SEQ ID NO: 9196 - protein, 55 aa, Homo sapiens
MLCLLIILGRYFARHKGTYFTHEAKGADDAADADTAIINAEGGQNNSEEKKEYFI

SEQ ID NO: 9197 - DNA, 3259 bp, Homo sapiens
agagatttggctcatgtttttaaagaaattcatcctcagttcttaagtgttttgtttatgtccctcgaggaatgaaaagaaaaacgatttgtttttacttgtaaggccttactcagttgcccaattccgcagaagaactggacagtgaggacctctcagattcccgagcaggtgaagaaggctcgatcagggcagtggatcatgccgtgatcggtggcgtcgtggcggtggtggtgttcgccatgctgtgcttgctcatcattctggggcgctattttgccagacataaaggtacatacttcactcatgaagccaaaggagccgatgacgcagcagacgcagacacagctataatcaatgcagaaggaggacagaacaactccgaagaaaagaaagagtacttcatctagatcagcctttttgtttcaatgaggtgtccaactggccctatttagatgataaagagacagtgatattggaacttgcgagaaattcgtgtgtttttttatgaatgggtggaaaggtgtgagactgggaaggcttgggatttgctgtgtaaaaaaaaaaaaaatgttctttggaaagtacactctgctgtttgacacctcttttttcgtttgtttgtttgtttaatttttatttcttcctaccaagtcaaacttggatacttggatttagtttcagtagattgcagaaaattctgtgccttgttttttgtttgtttgttgcgttcctttcttttccccctttgtgcacatttatttcctccctctaccccaatttcggattttttccaaaatctcccattttggaatttgcctgctgggattccttagactcttttccttcccttttctgttctagttttttacttttgtttatttttatggtaactgctttctgttccaaattcagtttcataaaaggagaaccagcacagcttagatttcatagttcagaatttagtgtatccataatgcattcttctctgttgtcgtaaagatttgggtgaacaaacaatgaaaactctttgctgctgcccatgtttcaaatacttagagcagtgaagactagaaaattagactgtgattcagaaaatgttctgtttgctgtggaactacattactgtacagggttatctgcaagtgaggtgtgtcacaatgagattgaatttcactgtctttaattctgtatctgtagacggctcagtatagataccctacgctgtccagaaaggtttggggcagaaaggactcctcctttttccatgccctaaacagacctgacaggtgaggtctgttccttttatataagtggacaaattttgagttgccacaggaggggaagtagggaggggggaaatacagttctgctctggttgtttctgttccaaatgattccatccacctttcccaatcggccttacttctcactaatttgtaggaaaaagcaagttcgtctgttgtgcgaatgactgaatgggacagagttgatttttttttttttttcctttgtgcttagttaggaaggcagtaggatgtggcctgcatgtactgtatattacagatatttgtcatgctgggatttccaactcgaatctgtgtgaaactttcattccttcagatttggcttgacaaaggcaggaggtacaaaagaagggctggtattgttctcacactggtctgctgtcgctctcagttctcgataggtcagagcagaggtggaaaaacagcatgtacggattttcagttacttaatcaaaactcaaatgtgagtgtttttatctttttacctttcatacactagccttggcctctttcctcagccttaagaaccatctgccaaaaattactgatcctcgcatgatggcagccatagtgcatagctactaaaatcagtgaccttgaacatatcttagatggggagcctcgggaaaaggtagaggagtcacgttaccatttacatgttttaaagaaagaagtgtggggattttcactgaaacgtctaggaaatctagaagtagtcctgaaggacagaaactaaactcttaccatatgtttggtaagactccagactccagctaacagtccctatggaaagatggcatcaaaaaagatagatctatatatatatataaatatatattctattacattttcagtgagtaattttggattttgcaaggtgcatttttactattgttacattatgtggaaaacttatgctgatttatttaagggggaaaaagtgtcaactctttgttatttgaaaacatgtttatttttcttgtctttattttaacctttgatagaaccattgcaatatgggggccttttgggaacggactggtatgtaaaagaaaatccattatcgagcagcattttatttacccctcccctatccctaggcacttaaccaagacaaaaagccacaatgaacatccctttttcaatgaattttataatctgcagctctattccgagcccttagcacccattccgaccatagtataatcatatcaaagggtgagaatcatttagcatgttgttgaaaggttttttttcagttgttctttttagaaaaaaagaaaaacaaaaacaaaaacaaaaaaaaaaaatcacaccattgctcacagaattggcatctcatttttgggacctcccatctttctgttttgaaaagtgtacagtagtgcagtgttcctgatgtaactttatggcttacaatgttgacatgtctcaggttcatgtgttgcgattggtgttttccgtctcaggtagattgcaaagtgtaggccccacacattggaaaaaataataataaaacaaagcaaaaacaggaaattatggattttagttgtatattggtttatgtattttttcttaagtatacagtgcactgtttgaaatgtattgttgagtattactttgtacaggttgatcactttttttagagtgaagaaagaacaaacttgttttttgtgttttttaaaggaatataaaataatgaaggatgtataattgatgccaaataagcttgttctttagtcacaccgacgtcttatttttccctttaggccagttctgtttttaaggtgtacatggacaatgttacagtgtaagaaactccatatccatatgttcccattcgcattttgtattggttcatgtataccatttttacaaaaaaaaaaagaaaaaaaagaagtactataaaatatctgtcttcttaataaaaaaaaattaatgttacaaagtga

SEQ ID NO: 9198 - protein, 55 aa, Homo sapiens; identical to SEQ ID NO: 9196

SEQ ID NO: 9199 - DNA, 3373 bp, Homo sapiens
aaagctcaagaggtttacgaatggctgcaggacctgaagattgtgtttcagccttgatatgcagtttggaaacaatgtgctactgtctaacggcgtgaaccaaatttctgctaatgggaagaagggaaaactctccacaaaagctgacaaagcaggaagaacaggatgactgagtttttagattaaaactcccgggggcgtctgaactcatggctggtggtggaagtaagagtttccataatatggccaagtgatcagatgtatgctgcttagattcccgagcaggtgaagaaggctcgatcagggcagtggatcatgccgtgatcggtggcgtcgtggcggtggtggtgttcgccatgctgtgcttgctcatcattctggggcgctattttgccagacataaaggtacatacttcactcatgaagccaaaggagccgatgacgcagcagacgcagacacagctataatcaatgcagaaggaggacagaacaactccgaagaaaagaaagagtacttcatctagatcagcctttttgtttcaatgaggtgtccaactggccctatttagatgataaagagacagtgatattggaacttgcgagaaattcgtgtgtttttttatgaatgggtggaaaggtgtgagactgggaaggcttgggatttgctgtgtaaaaaaaaaaaaaatgttctttggaaagtacactctgctgtttgacacctcttttttcgtttgtttgtttgtttaatttttatttcttcctaccaagtcaaacttggatacttggatttagtttcagtagattgcagaaaattctgtgccttgttttttgtttgtttgttgcgttcctttcttttccccctttgtgcacatttatttcctccctctaccccaatttcggattttttccaaaatctcccattttggaatttgcctgctgggattccttagactcttttccttcccttttctgttctagttttttacttttgtttatttttatggtaactgctttctgttccaaattcagtttcataaaaggagaaccagcacagcttagatttcatagttcagaatttagtgtatccataatgcattcttctctgttgtcgtaaagatttgggtgaacaaacaatgaaaactctttgctgctgcccatgtttcaaatacttagagcagtgaagactagaaaattagactgtgattcagaaaatgttctgtttgctgtggaactacattactgtacagggttatctgcaagtgaggtgtgtcacaatgagattgaatttcactgtctttaattctgtatctgtagacggctcagtatagataccctacgctgtccagaaaggtttggggcagaaaggactcctcctttttccatgccctaaacagacctgacaggtgaggtctgttccttttatataagtggacaaattttgagttgccacaggaggggaagtagggaggggggaaatacagttctgctctggttgtttctgttccaaatgattccatccacctttcccaatcggccttacttctcactaatttgtaggaaaaagcaagttcgtctgttgtgcgaatgactgaatgggacagagttgatttttttttttttttcctttgtgcttagttaggaaggcagtaggatgtggcctgcatgtactgtatattacagatatttgtcatgctgggatttccaactcgaatctgtgtgaaactttcattccttcagatttggcttgacaaaggcaggaggtacaaaagaagggctggtattgttctcacactggtctgctgtcgctctcagttctcgataggtcagagcagaggtggaaaaacagcatgtacggattttcagttacttaatcaaaactcaaatgtgagtgtttttatctttttacctttcatacactagccttggcctctttcctcagccttaagaaccatctgccaaaaattactgatcctcgcatgatggcagccatagtgcatagctactaaaatcagtgaccttgaacatatcttagatggggagcctcgggaaaaggtagaggagtcacgttaccatttacatgttttaaagaaagaagtgtggggattttcactgaaacgtctaggaaatctagaagtagtcctgaaggacagaaactaaactcttaccatatgtttggtaagactccagactccagctaacagtccctatggaaagatggcatcaaaaaagatagatctatatatatatataaatatatattctattacattttcagtgagtaattttggattttgcaaggtgcatttttactattgttacattatgtggaaaacttatgctgatttatttaagggggaaaaagtgtcaactctttgttatttgaaaacatgtttatttttcttgtctttattttaacctttgatagaaccattgcaatatgggggccttttgggaacggactggtatgtaaaagaaaatccattatcgagcagcattttatttacccctcccctatccctaggcacttaaccaagacaaaaagccacaatgaacatccctttttcaatgaattttataatctgcagctctattccgagcccttagcacccattccgaccatagtataatcatatcaaagggtgagaatcatttagcatgttgttgaaaggttttttttcagttgttctttttagaaaaaaagaaaaacaaaaacaaaaacaaaaaaaaaaaatcacaccattgctcacagaattggcatctcatttttgggacctcccatctttctgttttgaaaagtgtacagtagtgcagtgttcctgatgtaactttatggcttacaatgttgacatgtctcaggttcatgtgttgcgattggtgttttccgtctcaggtagattgcaaagtgtaggccccacacattggaaaaaataataataaaacaaagcaaaaacaggaaattatggattttagttgtatattggtttatgtattttttcttaagtatacagtgcactgtttgaaatgtattgttgagtattactttgtacaggttgatcactttttttagagtgaagaaagaacaaacttgttttttgtgttttttaaaggaatataaaataatgaaggatgtataattgatgccaaataagcttgttctttagtcacaccgacgtcttatttttccctttaggccagttctgtttttaaggtgtacatggacaatgttacagtgtaagaaactccatatccatatgttcccattcgcattttgtattggttcatgtataccatttttacaaaaaaaaaaagaaaaaaaagaagtactataaaatatctgtcttcttaataaaaaaaaattaatgttacaaagtga

SEQ ID NO: 9200 - protein, 55 aa, Homo sapiens; identical to SEQ ID NO: 9196

SEQ ID NO: 9201 - DNA, 8429 bp, Homo sapiens
taaaaaatgaatgagaaatgtgatgctagtggaaaagtttttaatgcctctatcataatttcaataactttatgctctttattttaaaaataatcttggagataaagatatgacatgttttcatactaaagacctaatcaacaatgcaaacaaataatactgtgaatacaggtttcccagaattaaaaagtgatgtttacagctatcttggtagtgaaaaataaaagacttgactggaaggacccagccctcccatatctaacacaaaatttgccaagacttaaaaatgtgctacaacttacagagagcctctttcctgtctccatcactaccctcgtggcaacatcctcttcttttccttccctcccctctgccttcctcttttctgtacccccttccactgagcattcacacacaacatgatataggaattgtttttcttgttaaatgaaaccactatacagattcctattattttgcagaacatctggtttgcaaatgaaaagatctcaggggcacaacagcactagtgaacaattctgaagaagcttttaacaaaacttgaaattgcttatccaaaaaaaaaaatcatcccccgttgctgctgttctgtagcacacaatctcttcactcacaggggaggtgactttaacaaggaagagagctttatcctgtctctcctattttggccttttagttttcattctgttcctatccacttctcccatccctaagacaggggagtttgattaaaacataacatagatggaaagaaaattagccaggaaaccaggagaaaataaattccagagtttaattttccagcagttatttttgttttcgatcgagttcaaataacatgaaagagaagaaaaaaaaaaaacccaccatatatttaatatatattggccagcacagcacaactatgaaaataaaattgtcaggggaattccttgcctgccctagtgtctagatttaaagcacctccataacacaaactgaaggggaattcaattaagaaaacccattggcttcttattgactttagttaagaaaataaactgggagaaagtgtattaaaatatgtctaactgcttagtatgctttcatttaggcttatgacaatcaaaaatgagagaatttaaattttttacaattaagctctggttttgagtagattgtgggttatcacaccgtgcatttttttaatgtacaccttactcaaacacaccctaaaatgcaggcttgcagtctgcgcattgtaaagcaggagcaccgcagatcaattgggggaaaaaatatttaaggttgtaaatttaattttgttctaggattttcattttcatttatggcacccgttgtgtttgagaacatggaccaatttatggattagttttaaacccccagtctgtcacactcaatgaacaattctaagttggagagaatccatatgaaaggattagaatgtgccacagtggagcttacacatgactgtttcaactaaatattgcccagctgcctctcctgcagtattattttttttttttgctacttagttaaattgctagtgtctctaatttcacacattgtcagagctttttttattttgtaaatatactgccacaataaatgtatgtgatgtttcatttattcaagatggggtctgataaactgtaggactaggagactaagaagagaagtcaattttgagtagaatgtgcatctttcaaataatattgctgggcccttctttggataccttgtttgactgtactcataaaatagccagagagtgactgttaagaccgtacacacttaatgggttttcaagaagatgggattgttttttcttggccatataatataaatgtataataaatttgctctctttgtaattaaaattaagagacagtagctcagctaggccttttaaatgtctatataacccaacaccaccataagtccagctcaattttttgtgacctgtttttctcatgggctagctcaaagattttttttttttaaggcagcagcaagatgaggttttaaaaaggctttgttagggcaattagacattttcatttttcaagctgattatagcatttatcacttacattgaaatttagtatttgcattttgcctctacgcttagaatgttacccaacaatatggtcaccacacaagttgattcacagggtgtgtttgcacatttctccagttttctgattaagataccctaataaatcctgcctcacagagttgcactcacttcagagccagggtgtctgtggtttctgcatgaagtcataacgcaattatgaaggagaattagattctgtcatcgtggtctcctgcagggagcacaaagttacttctaaagaatgttttcttaattctttacttgaaaataacctctgttcaagtagcataccagatgctcttagagaaatggagtcagtgactccccagacacaccatcaatcttgctctgaactttgtagccagcctgtgtttctcctgcagtctcctaccccgttgctgctccgggttttgccatttccagctgcagtaatcgtgtgtgtgacttgaacatgtgtttgctgttaaccattttagaatgtgttttttcttctcaacatccccctttcctccccttttgggtgcagttgatggatttcccatccccagaacggggaagcaagatgcactgtggattttccttcatttattttctagtactcacctaggagcagacgcctagcttcacttggtttaatttcatcttaaagctgacatgatgttgtgatgtaggaagacagtaaattggggtcactggttaatgctgatattatttttgatgactctaacccttaggtcttactccaccccccgcccttctatcatttgtacttaagtatttacctggtgaaaataaagcttatgccgggcacggtgcctcacgcctgtaatcccagcactttgggaggccaaggcagtggatcacctgaggtctggagtttgagaccagcctgaccaacatggggaagccccgtctccactaaaaatacaaaattagccaggcgtggtggcacatgccagtaatcccagctactcgggaggctgaggcaggagaatcgcttgaatgcaggaaccagaggttgcggtgagccaagatcacgccgttgctctccagcctgggcaacaagagcgaaactccatctcaaaaaaaaaagaaaagaaaagaaagcacattagaagagctactacaaaaataatgagccagagtgttgattgcttttttgtaattttggaaaggagccgatgcctatctataaaatgtattaacatgcatataaatgtttctgtacaaatgggcatttgatcctgcccctcaaatttaaagtacctaatgctgcacttggatgtttcaactaaggaaatgtgtcatctgtgtcaggagaatctgtgacagagtgtgtttcaactgtacagtttattgttttttactgctattttatgcacacagacttgacttgtaagtattttgttcttatgcggtatattgtatgtttctctttccttcatctattcatcagaaactaagctatcagtaatattaagctgcattggcctttcagacttctggttaattctggctccttagaagggatctaatttttgatggtataggatcctctggaaagcatgccaactgaaggggaatgccggtgtgaattcatgtgtcacatttatacatcagaagcaccaggctcatttgccccccaaaaaagcttcatatgaagttccagtgcatttaaacattgcctgtgttgaatcagaaagtcttttggcgtctccacagctcatgaaagcaattgccagctaaatagctgcattctacaaaaggacagtgaactgcttgcttgcagtttaacccagaatcttacttcaaccaccaccatttgactagagataactaactcctgtctcagtttcaccatttctttttgccagcaatgagtcgtagaaggaatgtgcctgggaagtttagaactcaaaatgaaagtatggccagatgggttgacattggaatgaggttgactagaagagtggtgataaaatgactctggaaaaagaatgtcaccctgcattttgttagatatttattccacttcccctgtagccaaaaataaagagaaaattccttgagctccttggaggaatttcttgtgaacaggagcaagtacagcaagcttggcttagaagcctggtagaagaaggagaaaacttgaacagcatcagaaatagaagaagaaaaagacaaaatacatttccttccacagcaagttcatctagcaatggaaaaagaaaaaaacaaaaacaaaaaactgcactctctcctactccagccatgaaagcaggactcccagcccctcagaatggtgaacgtggttctgaattgtgagcgaaaggatggctggatacttaaatttttggaatgtcatatgattagaagcagcgtttggcagattgtgtgaacttgggtgttttcattaaaggcttctgctcttggattttaacatgaagagctttagagtgaagaatggatgtgtgtgtttgtgtgtgtgtgtgtatagaaactaatctgtgaaaaccttgaacatgttcattgccatggcctcccagttaattgaactttctggctaaactatgctgaaataatacactggatggaaaacttaaacctgtctattcatctacaggcatctgagcataagcagtaaaaggatcctaaaagtgtgattgagtcagtgatgcctaattggcagtcaagaagcccaagtgcccgggtgggttgggttaaaacaaaggcaatgtttgaatgttatgaatccattgtttaaccagcctttcgactgagcttttctgtcgcagtcctgagccttgatgctttaagagccatctaccagccactgagtttgcactggtgtttctcatcactttgcatgtccacctgactattgactagcaaatatatgtgtcctggcaagacccccagaaccaaagaatttactgttttcctcactggctcgcagctttgagctcaaggcatgtcttaaaacagtgcaactcacttcaaatgctttttgcttttcatttattattgcttgtcacgcgatgttctttgaaagcttgctcatatattatctgttccattttttttccattttccctttttttgcatgccgttcctcctgtttcttcccttcctccaatcctctgttcccgtctgtagacacaacggcgacgacagaaccagcagttcacgattcccgagcaggtgaagaaggctcgatcagggcagtggatcatgccgtgatcggtggcgtcgtggcggtggtggtgttcgccatgctgtgcttgctcatcattctggggcgctattttgccagacataaaggtacatacttcactcatgaagccaaaggagccgatgacgcagcagacgcagacacagctataatcaatgcagaaggaggacagaacaactccgaagaaaagaaagagtacttcatctagatcagcctttttgtttcaatgaggtgtccaactggccctatttagatgataaagagacagtgatattggaacttgcgagaaattcgtgtgtttttttatgaatgggtggaaaggtgtgagactgggaaggcttgggatttgctgtgtaaaaaaaaaaaaaatgttctttggaaagtacactctgctgtttgacacctcttttttcgtttgtttgtttgtttaatttttatttcttcctaccaagtcaaacttggatacttggatttagtttcagtagattgcagaaaattctgtgccttgttttttgtttgtttgttgcgttcctttcttttccccctttgtgcacatttatttcctccctctaccccaatttcggattttttccaaaatctcccattttggaatttgcctgctgggattccttagactcttttccttcccttttctgttctagttttttacttttgtttatttttatggtaactgctttctgttccaaattcagtttcataaaaggagaaccagcacagcttagatttcatagttcagaatttagtgtatccataatgcattcttctctgttgtcgtaaagatttgggtgaacaaacaatgaaaactctttgctgctgcccatgtttcaaatacttagagcagtgaagactagaaaattagactgtgattcagaaaatgttctgtttgctgtggaactacattactgtacagggttatctgcaagtgaggtgtgtcacaatgagattgaatttcactgtctttaattctgtatctgtagacggctcagtatagataccctacgctgtccagaaaggtttggggcagaaaggactcctcctttttccatgccctaaacagacctgacaggtgaggtctgttccttttatataagtggacaaattttgagttgccacaggaggggaagtagggaggggggaaatacagttctgctctggttgtttctgttccaaatgattccatccacctttcccaatcggccttacttctcactaatttgtaggaaaaagcaagttcgtctgttgtgcgaatgactgaatgggacagagttgatttttttttttttttcctttgtgcttagttaggaaggcagtaggatgtggcctgcatgtactgtatattacagatatttgtcatgctgggatttccaactcgaatctgtgtgaaactttcattccttcagatttggcttgacaaaggcaggaggtacaaaagaagggctggtattgttctcacactggtctgctgtcgctctcagttctcgataggtcagagcagaggtggaaaaacagcatgtacggattttcagttacttaatcaaaactcaaatgtgagtgtttttatctttttacctttcatacactagccttggcctctttcctcagccttaagaaccatctgccaaaaattactgatcctcgcatgatggcagccatagtgcatagctactaaaatcagtgaccttgaacatatcttagatggggagcctcgggaaaaggtagaggagtcacgttaccatttacatgttttaaagaaagaagtgtggggattttcactgaaacgtctaggaaatctagaagtagtcctgaaggacagaaactaaactcttaccatatgtttggtaagactccagactccagctaacagtccctatggaaagatggcatcaaaaaagatagatctatatatatatataaatatatattctattacattttcagtgagtaattttggattttgcaaggtgcatttttactattgttacattatgtggaaaacttatgctgatttatttaagggggaaaaagtgtcaactctttgttatttgaaaacatgtttatttttcttgtctttattttaacctttgatagaaccattgcaatatgggggccttttgggaacggactggtatgtaaaagaaaatccattatcgagcagcattttatttacccctcccctatccctaggcacttaaccaagacaaaaagccacaatgaacatccctttttcaatgaattttataatctgcagctctattccgagcccttagcacccattccgaccatagtataatcatatcaaagggtgagaatcatttagcatgttgttgaaaggttttttttcagttgttctttttagaaaaaaagaaaaacaaaaacaaaaacaaaaaaaaaaaatcacaccattgctcacagaattggcatctcatttttgggacctcccatctttctgttttgaaaagtgtacagtagtgcagtgttcctgatgtaactttatggcttacaatgttgacatgtctcaggttcatgtgttgcgattggtgttttccgtctcaggtagattgcaaagtgtaggccccacacattggaaaaaataataataaaacaaagcaaaaacaggaaattatggattttagttgtatattggtttatgtattttttcttaagtatacagtgcactgtttgaaatgtattgttgagtattactttgtacaggttgatcactttttttagagtgaagaaagaacaaacttgttttttgtgttttttaaaggaatataaaataatgaaggatgtataattgatgccaaataagcttgttctttagtcacaccgacgtcttatttttccctttaggccagttctgtttttaaggtgtacatggacaatgttacagtgtaagaaactccatatccatatgttcccattcgcattttgtattggttcatgtataccatttttacaaaaaaaaaaagaaaaaaaagaagtactataaaatatctgtcttcttaataaaaaaaaattaatgttacaaagtga

SEQ ID NO: 9202 - protein, 133 aa, Homo sapiens [sequence omitted]

SEQ ID NO: 9203 - DNA, 4365 bp, Homo sapiens
gaacgccagcgccagggggcggggtgggggagggagcgaggccctccgagagccgggttgggctcgcggcgctgtgattggtctgcccggactccgcctccagcgcatgtcattagcatctcattagctgtccgctcgggctccggaggcagccaacgccgccagtctgaggcaggtgcccgacatggcgagtgtagtgctgccgagcggatcccagtgtgcggcggcagcggcggcggcggcgcctcccgggctccggctccggcttctgctgttgctcttctccgccgcggcactgatccccacaggtgatgggcagaatctgtttacgaaagacgtgacagtgatcgagggagaggttgcgaccatcagttgccaagtcaataagagtgacgactctgtgattcagctactgaatcccaacaggcagaccatttatttcagggacttcaggcctttgaaggacagcaggtttcagttgctgaatttttctagcagtgaactcaaagtatcattgacaaacgtctcaatttctgatgaaggaagatacttttgccagctctataccgatcccccacaggaaagttacaccaccatcacagtcctggtcccaccacgtaatctgatgatcgatatccagaaagacactgcggtggaaggtgaggagattgaagtcaactgcactgctatggccagcaagccagccacgactatcaggtggttcaaagggaacacagagctaaaaggcaaatcggaggtggaagagtggtcagacatgtacactgtgaccagtcagctgatgctgaaggtgcacaaggaggacgatggggtcccagtgatctgccaggtggagcaccctgcggtcactggaaacctgcagacccagcggtatctagaagtacagtataagcctcaagtgcacattcagatgacttatcctctacaaggcttaacccgggaaggggacgcgcttgagttaacatgtgaagccatcgggaagccccagcctgtgatggtaacttgggtgagagtcgatgatgaaatgcctcaacacgccgtactgtctgggcccaacctgttcatcaataacctaaacaaaacagataatggtacataccgctgtgaagcttcaaacatagtggggaaagctcactcggattatatgctgtatgtatacgacacaacggcgacgacagaaccagcagttcacggccttactcagttgcccaattccgcagaagaactggacagtgaggacctctcagattcccgagcaggtgaagaaggctcgatcagggcagtggatcatgccgtgatcggtggcgtcgtggcggtggtggtgttcgccatgctgtgcttgctcatcattctggggcgctattttgccagacataaaggtacatacttcactcatgaagccaaaggagccgatgacgcagcagacgcagacacagctataatcaatgcagaaggaggacagaacaactccgaagaaaagaaagagtacttcatctagatcagcctttttgtttcaatgaggtgtccaactggccctatttagatgataaagagacagtgatattggaacttgcgagaaattcgtgtgtttttttatgaatgggtggaaaggtgtgagactgggaaggcttgggatttgctgtgtaaaaaaaaaaaaaatgttctttggaaagtacactctgctgtttgacacctcttttttcgtttgtttgtttgtttaatttttatttcttcctaccaagtcaaacttggatacttggatttagtttcagtagattgcagaaaattctgtgccttgttttttgtttgtttgttgcgttcctttcttttccccctttgtgcacatttatttcctccctctaccccaatttcggattttttccaaaatctcccattttggaatttgcctgctgggattccttagactcttttccttcccttttctgttctagttttttacttttgtttatttttatggtaactgctttctgttccaaattcagtttcataaaaggagaaccagcacagcttagatttcatagttcagaatttagtgtatccataatgcattcttctctgttgtcgtaaagatttgggtgaacaaacaatgaaaactctttgctgctgcccatgtttcaaatacttagagcagtgaagactagaaaattagactgtgattcagaaaatgttctgtttgctgtggaactacattactgtacagggttatctgcaagtgaggtgtgtcacaatgagattgaatttcactgtctttaattctgtatctgtagacggctcagtatagataccctacgctgtccagaaaggtttggggcagaaaggactcctcctttttccatgccctaaacagacctgacaggtgaggtctgttccttttatataagtggacaaattttgagttgccacaggaggggaagtagggaggggggaaatacagttctgctctggttgtttctgttccaaatgattccatccacctttcccaatcggccttacttctcactaatttgtaggaaaaagcaagttcgtctgttgtgcgaatgactgaatgggacagagttgatttttttttttttttcctttgtgcttagttaggaaggcagtaggatgtggcctgcatgtactgtatattacagatatttgtcatgctgggatttccaactcgaatctgtgtgaaactttcattccttcagatttggcttgacaaaggcaggaggtacaaaagaagggctggtattgttctcacactggtctgctgtcgctctcagttctcgataggtcagagcagaggtggaaaaacagcatgtacggattttcagttacttaatcaaaactcaaatgtgagtgtttttatctttttacctttcatacactagccttggcctctttcctcagccttaagaaccatctgccaaaaattactgatcctcgcatgatggcagccatagtgcatagctactaaaatcagtgaccttgaacatatcttagatggggagcctcgggaaaaggtagaggagtcacgttaccatttacatgttttaaagaaagaagtgtggggattttcactgaaacgtctaggaaatctagaagtagtcctgaaggacagaaactaaactcttaccatatgtttggtaagactccagactccagctaacagtccctatggaaagatggcatcaaaaaagatagatctatatatatatataaatatatattctattacattttcagtgagtaattttggattttgcaaggtgcatttttactattgttacattatgtggaaaacttatgctgatttatttaagggggaaaaagtgtcaactctttgttatttgaaaacatgtttatttttcttgtctttattttaacctttgatagaaccattgcaatatgggggccttttgggaacggactggtatgtaaaagaaaatccattatcgagcagcattttatttacccctcccctatccctaggcacttaaccaagacaaaaagccacaatgaacatccctttttcaatgaattttataatctgcagctctattccgagcccttagcacccattccgaccatagtataatcatatcaaagggtgagaatcatttagcatgttgttgaaaggttttttttcagttgttctttttagaaaaaaagaaaaacaaaaacaaaaacaaaaaaaaaaaatcacaccattgctcacagaattggcatctcatttttgggacctcccatctttctgttttgaaaagtgtacagtagtgcagtgttcctgatgtaactttatggcttacaatgttgacatgtctcaggttcatgtgttgcgattggtgttttccgtctcaggtagattgcaaagtgtaggccccacacattggaaaaaataataataaaacaaagcaaaaacaggaaattatggattttagttgtatattggtttatgtattttttcttaagtatacagtgcactgtttgaaatgtattgttgagtattactttgtacaggttgatcactttttttagagtgaagaaagaacaaacttgttttttgtgttttttaaaggaatataaaataatgaaggatgtataattgatgccaaataagcttgttctttagtcacaccgacgtcttatttttccctttaggccagttctgtttttaaggtgtacatggacaatgttacagtgtaagaaactccatatccatatgttcccattcgcattttgtattggttcatgtataccatttttacaaaaaaaaaaagaaaaaaaagaagtactataaaatatctgtcttcttaataaaaaaaaattaatgttacaaagtga

SEQ ID NO: 9204 - protein, 443 aa, Homo sapiens
MASVVLPSGSQCAAAAAAAAPPGLRLRLLLLLFSAAALIPTGDGQNLFTKDVTVIEGEVATISCQVNKSDDSVIQLLNPNRQTIYFRDFRPLKDSRFQLLNFSSSELKVSLTNVSISDEGRYFCQLYTDPPQESYTTITVLVPPRNLMIDIQKDTAVEGEEIEVNCTAMASKPATTIRWFKGNTELKGKSEVEEWSDMYTVTSQLMLKVHKEDDGVPVICQVEHPAVTGNLQTQRYLEVQYKPQVHIQMTYPLQGLTREGDALELTCEAIGKPQPVMVTWVRVDDEMPQHAVLSGPNLFINNLNKTDNGTYRCEASNIVGKAHSDYMLYVYDTTATTEPAVHGLTQLPNSAEELDSEDLSDSRAGEEGSIRAVDHAVIGGVVAVVVFAMLCLLIILGRYFARHKGTYFTHEAKGADDAADADTAIINAEGGQNNSEEKKEYFI

SEQ ID NO: 9205 - DNA, 4362 bp, Homo sapiens
gaacgccagcgccagggggcggggtgggggagggagcgaggccctccgagagccgggttgggctcgcggcgctgtgattggtctgcccggactccgcctccagcgcatgtcattagcatctcattagctgtccgctcgggctccggaggcagccaacgccgccagtctgaggcaggtgcccgacatggcgagtgtagtgctgccgagcggatcccagtgtgcggcggcagcggcggcggcggcgcctcccgggctccggctccggcttctgctgttgctcttctccgccgcggcactgatccccacaggtgatgggcagaatctgtttacgaaagacgtgacagtgatcgagggagaggttgcgaccatcagttgccaagtcaataagagtgacgactctgtgattcagctactgaatcccaacaggcagaccatttatttcagggacttcaggcctttgaaggacagcaggtttcagttgctgaatttttctagcagtgaactcaaagtatcattgacaaacgtctcaatttctgatgaaggaagatacttttgccagctctataccgatcccccacaggaaagttacaccaccatcacagtcctggtcccaccacgtaatctgatgatcgatatccagaaagacactgcggtggaaggtgaggagattgaagtcaactgcactgctatggccagcaagccagccacgactatcaggtggttcaaagggaacacagagctaaaaggcaaatcggaggtggaagagtggtcagacatgtacactgtgaccagtcagctgatgctgaaggtgcacaaggaggacgatggggtcccagtgatctgccaggtggagcaccctgcggtcactggaaacctgcagacccagcggtatctagaagtacagtataagcctcaagtgcacattcagatgacttatcctctacaaggcttaacccgggaaggggacgcgcttgagttaacatgtgaagccatcgggaagccccagcctgtgatggtaacttgggtgagagtcgatgatgaaatgcctcaacacgccgtactgtctgggcccaacctgttcatcaataacctaaacaaaacagataatggtacataccgctgtgaagcttcaaacatagtggggaaagctcactcggattatatgctgtatgtatacgatccccccacaactatccctcctcccacaacaaccaccaccaccaccaccaccaccaccaccaccatccttaccatcatcacagattcccgagcaggtgaagaaggctcgatcagggcagtggatcatgccgtgatcggtggcgtcgtggcggtggtggtgttcgccatgctgtgcttgctcatcattctggggcgctattttgccagacataaaggtacatacttcactcatgaagccaaaggagccgatgacgcagcagacgcagacacagctataatcaatgcagaaggaggacagaacaactccgaagaaaagaaagagtacttcatctagatcagcctttttgtttcaatgaggtgtccaactggccctatttagatgataaagagacagtgatattggaacttgcgagaaattcgtgtgtttttttatgaatgggtggaaaggtgtgagactgggaaggcttgggatttgctgtgtaaaaaaaaaaaaaatgttctttggaaagtacactctgctgtttgacacctcttttttcgtttgtttgtttgtttaatttttatttcttcctaccaagtcaaacttggatacttggatttagtttcagtagattgcagaaaattctgtgccttgttttttgtttgtttgttgcgttcctttcttttccccctttgtgcacatttatttcctccctctaccccaatttcggattttttccaaaatctcccattttggaatttgcctgctgggattccttagactcttttccttcccttttctgttctagttttttacttttgtttatttttatggtaactgctttctgttccaaattcagtttcataaaaggagaaccagcacagcttagatttcatagttcagaatttagtgtatccataatgcattcttctctgttgtcgtaaagatttgggtgaacaaacaatgaaaactctttgctgctgcccatgtttcaaatacttagagcagtgaagactagaaaattagactgtgattcagaaaatgttctgtttgctgtggaactacattactgtacagggttatctgcaagtgaggtgtgtcacaatgagattgaatttcactgtctttaattctgtatctgtagacggctcagtatagataccctacgctgtccagaaaggtttggggcagaaaggactcctcctttttccatgccctaaacagacctgacaggtgaggtctgttccttttatataagtggacaaattttgagttgccacaggaggggaagtagggaggggggaaatacagttctgctctggttgtttctgttccaaatgattccatccacctttcccaatcggccttacttctcactaatttgtaggaaaaagcaagttcgtctgttgtgcgaatgactgaatgggacagagttgatttttttttttttttcctttgtgcttagttaggaaggcagtaggatgtggcctgcatgtactgtatattacagatatttgtcatgctgggatttccaactcgaatctgtgtgaaactttcattccttcagatttggcttgacaaaggcaggaggtacaaaagaagggctggtattgttctcacactggtctgctgtcgctctcagttctcgataggtcagagcagaggtggaaaaacagcatgtacggattttcagttacttaatcaaaactcaaatgtgagtgtttttatctttttacctttcatacactagccttggcctctttcctcagccttaagaaccatctgccaaaaattactgatcctcgcatgatggcagccatagtgcatagctactaaaatcagtgaccttgaacatatcttagatggggagcctcgggaaaaggtagaggagtcacgttaccatttacatgttttaaagaaagaagtgtggggattttcactgaaacgtctaggaaatctagaagtagtcctgaaggacagaaactaaactcttaccatatgtttggtaagactccagactccagctaacagtccctatggaaagatggcatcaaaaaagatagatctatatatatatataaatatatattctattacattttcagtgagtaattttggattttgcaaggtgcatttttactattgttacattatgtggaaaacttatgctgatttatttaagggggaaaaagtgtcaactctttgttatttgaaaacatgtttatttttcttgtctttattttaacctttgatagaaccattgcaatatgggggccttttgggaacggactggtatgtaaaagaaaatccattatcgagcagcattttatttacccctcccctatccctaggcacttaaccaagacaaaaagccacaatgaacatccctttttcaatgaattttataatctgcagctctattccgagcccttagcacccattccgaccatagtataatcatatcaaagggtgagaatcatttagcatgttgttgaaaggttttttttcagttgttctttttagaaaaaaagaaaaacaaaaacaaaaacaaaaaaaaaaaatcacaccattgctcacagaattggcatctcatttttgggacctcccatctttctgttttgaaaagtgtacagtagtgcagtgttcctgatgtaactttatggcttacaatgttgacatgtctcaggttcatgtgttgcgattggtgttttccgtctcaggtagattgcaaagtgtaggccccacacattggaaaaaataataataaaacaaagcaaaaacaggaaattatggattttagttgtatattggtttatgtattttttcttaagtatacagtgcactgtttgaaatgtattgttgagtattactttgtacaggttgatcactttttttagagtgaagaaagaacaaacttgttttttgtgttttttaaaggaatataaaataatgaaggatgtataattgatgccaaataagcttgttctttagtcacaccgacgtcttatttttccctttaggccagttctgtttttaaggtgtacatggacaatgttacagtgtaagaaactccatatccatatgttcccattcgcattttgtattggttcatgtataccatttttacaaaaaaaaaaagaaaaaaaagaagtactataaaatatctgtcttcttaataaaaaaaaattaatgttacaaagtga

SEQ ID NO: 9206 - protein, 442 aa, Homo sapiens
MASVVLPSGSQCAAAAAAAAPPGLRLRLLLLLFSAAALIPTGDGQNLFTKDVTVIEGEVATISCQVNKSDDSVIQLLNPNRQTIYFRDFRPLKDSRFQLLNFSSSELKVSLTNVSISDEGRYFCQLYTDPPQESYTTITVLVPPRNLMIDIQKDTAVEGEEIEVNCTAMASKPATTIRWFKGNTELKGKSEVEEWSDMYTVTSQLMLKVHKEDDGVPVICQVEHPAVTGNLQTQRYLEVQYKPQVHIQMTYPLQGLTREGDALELTCEAIGKPQPVMVTWVRVDDEMPQHAVLSGPNLFINNLNKTDNGTYRCEASNIVGKAHSDYMLYVYDPPTTIPPPTTTTTTTTTTTTTILTIITDSRAGEEGSIRAVDHAVIGGVVAVVVFAMLCLLIILGRYFARHKGTYFTHEAKGADDAADADTAIINAEGGQNNSEEKKEYFI

SEQ ID NO: 9207 - DNA, 485 bp, Homo sapiens
agagatttggctcatgtttttaaagaaattcatcctcagttcttaagtgttttgtttatgtccctcgaggaatgaaaagaaaaacgatttgtttttacttgtaaggccttactcagttgcccaattccgcagaagaactggacagtgaggacctctcagattcccgagcaggtgaagaaggctcgatcagggcagtggatcatgccgtgatcggtggcgtcgtggcggtggtggtgttcgccatgctgtgcttgctcatcattctggggcgctattttgccagacataaaggtacatacttcactcatgaagccaaaggagccgatgacgcagcagacgcagacacagctataatcaatgcagaaggaggacagaacaactccgaagaaaagaaagagtacttcatctagatcagcctttttgtttcaatgaggtgtccaactggccctatttagatgataaagagacagtgatattggaacttg

SEQ ID NO: 9208 - protein, 55 aa, Homo sapiens; identical to SEQ ID NO: 9196

SEQ ID NO: 9209 - DNA, 1588 bp, Homo sapiens
gaacgccagcgccagggggcggggtgggggagggagcgaggccctccgagagccgggttgggctcgcggcgctgtgattggtctgcccggactccgcctccagcgcatgtcattagcatctcattagctgtccgctcgggctccggaggcagccaacgccgccagtctgaggcaggtgcccgacatggcgagtgtagtgctgccgagcggatcccagtgtgcggcggcagcggcggcggcggcgcctcccgggctccggctccggcttctgctgttgctcttctccgccgcggcactgatccccacaggtgatgggcagaatctgtttacgaaagacgtgacagtgatcgagggagaggttgcgaccatcagttgccaagtcaataagagtgacgactctgtgattcagctactgaatcccaacaggcagaccatttatttcagggacttcaggcctttgaaggacagcaggtttcagttgctgaatttttctagcagtgaactcaaagtatcattgacaaacgtctcaatttctgatgaaggaagatacttttgccagctctataccgatcccccacaggaaagttacaccaccatcacagtcctggtcccaccacgtaatctgatgatcgatatccagaaagacactgcggtggaaggtgaggagattgaagtcaactgcactgctatggccagcaagccagccacgactatcaggtggttcaaagggaacacagagctaaaaggcaaatcggaggtggaagagtggtcagacatgtacactgtgaccagtcagctgatgctgaaggtgcacaaggaggacgatggggtcccagtgatctgccaggtggagcaccctgcggtcactggaaacctgcagacccagcggtatctagaagtacagtataagcctcaagtgcacattcagatgacttatcctctacaaggcttaacccgggaaggggacgcgcttgagttaacatgtgaagccatcgggaagccccagcctgtgatggtaacttgggtgagagtcgatgatgaaatgcctcaacacgccgtactgtctgggcccaacctgttcatcaataacctaaacaaaacagataatggtacataccgctgtgaagcttcaaacatagtggggaaagctcactcggattatatgctgtatgtatacgatccccccacaactatccctcctcccacaacaaccaccaccaccaccaccaccaccaccaccaccatccttaccatcatcacagattcccgagcaggtgaagaaggctcgatcagggcagtggatcatgccgtgatcggtggcgtcgtggcggtggtggtgttcgccatgctgtgcttgctcatcattctggggcgctattttgccagacataaaggtacatacttcactcatgaagccaaaggagccgatgacgcagcagacgcagacacagctataatcaatgcagaaggaggacagaacaactccgaagaaaagaaagagtacttcatctagatcagcctttttgtttcaatgaggtgtccaactggccctatttagatgataaagagacagtgatattggaacttg

SEQ ID NO: 9210 - protein, 442 aa, Homo sapiens; identical to SEQ ID NO: 9206

SEQ ID NO: 9211 - DNA, 702 bp, Homo sapiens
aaaggtgtcattcagagcaccctcaaatagtcaggtcagcccccttaattaggctctgcaactggatacagacagagtgaacgctaagactaggtcagggccggatagactatttcttccttccctgcctccctaagcttgttccacatgcattaaccctcctatgctgcttatcatgaaattgcctcgtggggagaacagatcgattcagcactggacaggtcagcctgttacctcagtgtaacttgatccatctcgattgttctctgtgactcctccattaaaaaagaaggtgaccctctgaccctggagacagtgtcgccggggcttctggtgccttgtaataagctctacatccctattcctcttctgattttaacagattcccgagcaggtgaagaaggctcgatcagggcagtggatcatgccgtgatcggtggcgtcgtggcggtggtggtgttcgccatgctgtgcttgctcatcattctggggcgctattttgccagacataaaggtacatacttcactcatgaagccaaaggagccgatgacgcagcagacgcagacacagctataatcaatgcagaaggaggacagaacaactccgaagaaaagaaagagtacttcatctagatcagcctttttgtttcaatgaggtgtccaactggccctatttagatgataaagagacagtgatattgg

SEQ ID NO: 9212 - protein, 55 aa, Homo sapiens; identical to SEQ ID NO: 9196

SEQ ID NO: 9213 - DNA, 958 bp, Homo sapiens
ttctgtggaggggactagaatagccatgttgtagttatcttagaagtcaggggtggggaagggcagggaggagggggaagcaattgttttgtcacacaccatgatgtaaactaactttcccctgtcctcaatgtctagtctcacttgttttcctcccccaattttaaaacatacagagttcatcgaaagacacataaattttaataggtctgaagctcatggccattggagatgagttaattctcattcccccaagattccctattttgacagagatttataggccatgtgcttcttgtactgaaagattcaaatggtaaatccttcacatatgacttcacaaatcatgtaaagttaaaagatttttaccgtttctgttgctgctgtgcttaaattgtaaggtacagctagtaaatcattttaatggaggtgtcgtacttgactcaataaaaaaaaaagacaatggtttagcttccactccaaaatgttaatgtattaatcaacgggagaataattgttttttactacattataaatctcaaatgccattaggatttcagcaaggggtgatgtagccacattcctaaattaaaattgtttacactgccatacatccattctgcatcaccatagctcattctgggttcattttggagttgttccccagccaaacatgtcgttcctcagtcagaagaagacatcctgagggggtgatgcttataaaggaaaattaattgcattgcaaggtgttaaataaataaaataaaaaccgttggtggcaatggacaattattccttgctgtctcttttgaaataggtttttaggttttaaattgaggcttactccttcatacatcctaaatgtagcaagcctgtcatttgtctttagtcttataatccttgttttatctctaggcaactgtggcttttgagcaccttacttctcctatgcatatcc

SEQ ID NO: 9214 - protein, 33 aa, Homo sapiens
MAIGDELILIPPRFPILTEIYRPCASCTERFKW

SEQ ID NO: 9215 - DNA, 644 bp, Homo sapiens
gaagactaataccgttagaacctccccatggcttaaacgtaaaaatgagagctgaggtagtttatgacctatgaaaagagttaaagtgtgcgtttaagcgccatgttgctaaatgtgccttacagcctgagccagggatgtttgagatgtgaggggtgacacagcgatacacaataacctttacagggttcatctgcaagtcagaatcattcaaggactaggcctaattcacctgaggtcacatgtgaaataatttggatgagattcttaactccagttgaactgtgttatgcaatcatgcttggttcactgaggctggaataacctttatgctggaaccattcaccaagcaaaaacatggctttacttttcaggatgatggggcagggcttagtcccagaaaagaaacactcttacacttgttactagtaagaggaacacttgtagcctcttagggaacaagaaaacatggctttctaaaccgaagtgatgtccatatgcctgagcatcaggcatgtttaaaagtgctttccactcccacatttatttttcaattgacaagctaggggcagctgtagaatctgcctctggtttcgttgcctgcccgattcagaaaatgagccgggaatctgaagagaatgtcc

SEQ ID NO: 9216 - protein, 42 aa, Homo sapiens
MFKSAFHSHIYFSIDKLGAAVESASGFVACPIQKMSRESEEN

SEQ ID NO: 9217 - DNA, 1296 bp, Homo sapiens
gaacgccagcgccagggggcggggtgggggagggagcgaggccctccgagagccgggttgggctcgcggcgctgtgattggtctgcccggactccgcctccagcgcatgtcattagcatctcattagctgtccgctcgggctccggaggcagccaacgccgccagtctgaggcaggtgcccgacatggcgagtgtagtgctgccgagcggatcccagtgtgcggcggcagcggcggcggcggcgcctcccgggctccggctccggcttctgctgttgctcttctccgccgcggcactgatccccacaggtgatgggcagaatctgtttacgaaagacgtgacagtgatcgagggagaggttgcgaccatcagttgccaagtcaataagagtgacgactctgtgattcagctactgaatcccaacaggcagaccatttatttcagggacttcaggcctttgaaggacagcaggtttcagttgctgaatttttctagcagtgaactcaaagtatcattgacaaacgtctcaatttctgatgaaggaagatacttttgccagctctataccgatcccccacaggaaagttacaccaccatcacagtcctggtcccaccacgtaatctgatgatcgatatccagaaagacactgcggtggaaggtgaggagattgaagtcaactgcactgctatggccagcaagccagccacgactatcaggtggttcaaagggaacacagagctaaaaggcaaatcggaggtggaagagtggtcagacatgtacactgtgaccagtcagctgatgctgaaggtgcacaaggaggacgatggggtcccagtgatctgccaggtggagcaccctgcggtcactggaaacctgcagacccagcggtatctagaagtacagtataagcctcaagtgcacattcagatgacttatcctctacaaggcttaacccgggaaggggacgcgcttgagttaacatgtgaagccatcgggaagccccagcctgtgatggtaacttgggtgagagtcgatgatgaaatgcctcaacacgccgtactgtctgggcccaacctgttcatcaataacctaaacaaaacagataatggtacataccgctgtgaagcttcaaacatagtggggaaagctcactcggattatatgctgtatgtatacggtacgtgagaagataaaatgctcttctactagagtcagtcacatggagctgctacttgtgatttactctcaaagcttttggtcaagttgaaaatcaaaaaccagttggtttccttcta

SEQ ID NO: 9218 - protein, 333 aa, Homo sapiens
MASVVLPSGSQCAAAAAAAAPPGLRLRLLLLLFSAAALIPTGDGQNLFTKDVTVIEGEVATISCQVNKSDDSVIQLLNPNRQTIYFRDFRPLKDSRFQLLNFSSSELKVSLTNVSISDEGRYFCQLYTDPPQESYTTITVLVPPRNLMIDIQKDTAVEGEEIEVNCTAMASKPATTIRWFKGNTELKGKSEVEEWSDMYTVTSQLMLKVHKEDDGVPVICQVEHPAVTGNLQTQRYLEVQYKPQVHIQMTYPLQGLTREGDALELTCEAIGKPQPVMVTWVRVDDEMPQHAVLSGPNLFINNLNKTDNGTYRCEASNIVGKAHSDYMLYVYGT

SEQ ID NO: 9219 - DNA, 507 bp, Homo sapiens
catgattcctcaaagacaatcttgaccaacaaccttacttagatcactaaagtacctcagatcagatttcaaatcagcctactcatcaggtccactctaccatgccagaccaggcatccaagttataaagatgagattccaaattacccagctgccataaagctcgcgttcccgtgtgaatcctgaactctggctgacgacatctggagtccactgcaatcatgtgttccctcaatgactgaaaaacctgagcataatgactacctaagattcatatctgtacatacccaaaatgtttattaaatagaaataaagataaaataatgtgtaggtttatggctgtatttttgcttttatggcatttgggtcacttctatgattatctctgttccatctttgatcacaaatgcaagctctattgttcctttaaggaaatacaaaatctttcatgacaatctcttttaggatgtgtctttctaggaacactctgaaaaataactagaattg

SEQ ID NO: 9220 - protein, 42 aa, Homo sapiens
MCRFMAVFLLLWHLGHFYDYLCSIFDHKCKLYCSFKEIQNLS

SEQ ID NO: 9221 - DNA, 4214 bp, Homo sapiens
agtttccagttcctttgcaaaggcagggcgtgcatgtttttgtgcacatgcatgtggatagtcatccttaacttcactgttaaacaggacatcgtgtggacaaaaagtcacagctccactccaagctcaagatgccttttggtcaataatggtgacaaaagctgaatttttccctatttagggaaaagaaagaacacagccttttcccccactgtccgttttgcatagatctcctttttccgagtgtttcctctttaattatgacctgtctcccctccctctcccctcgcctcagcttcagtgaaaggagtccttctgtcactcgtcactagctcgctcgctcactgtgggaggagcccgcctgaggaagccgtgtgcctgggatgccaagagccagagaatggatcttctccgagtggggacattgctgacaatcccggcttcccgaggcggctaagaacaggcagtttgtgtcggctggctgcagatacccagaggcacaaagagaccgaagccacccggagggacccacggacggacagatggtaggcgcgaacccgagaggaccggcggaggctgagcaccgagagccgccaaggaagagaaactaaccacagccaagttaccccgccggctttccttcgctgcgctaaggaatgaaacccttccagctcgatctgctcttcgtctgcttcttcctcttcagtcaagagctgggcctccagaagagaggatgctgtctggtgctgggctacatggccaaggacaagtttcggagaatgaatgaaggccaagtctattccttcagccagcagccccaggaccaggtggtggtgtcgggacagccagtgacgctactttgcgccatccccgaatacgatggcttcgttctgtggatcaaggacggcttggctctgggtgtgggcagggacctctcaagttacccacagtacctggtggtagggaaccacctgtcaggggagcaccacctgaagatcctgagggcagagctgcaagacgatgcggtgtacgagtgccaggccatccaggccgccatccgctcccgccccgcacgcctcacagtcctggtgccgcctgatgaccccgtcatcctggggggccctgtgatcagcctgcgtgcgggggaccctctcaacctcacctgccacgcagacaatgccaagcctgcagcctccatcatctggttgcgaaagggagaggtcatcaatggggccacctactccaagaccctgcttcgggacggcaagcgggagagcatcgtcagcaccctcttcatctcccctggtgacgtggagaatggccagagcatcgtgtgtcgtgccaccaacaaagccatccccggaggaaaggagacgtcggtcaccattgacatccagcaccctccactggtcaacctctcggtggagccacagccagtgctggaggacaacgtcgtcactttccactgctctgcaaaggccaacccagctgtcacccagtacaggtgggccaagcggggccagatcatcaaggaggcatctggagaggtgtacaggaccacagtggactacacgtacttctcagagcccgtctcctgtgaggtgaccaacgccctgggcagcaccaacctcagccgcacggttgacgtctactttgggccccggatgaccacagaaccccaatccttgctcgtggatctgggctctgatgccatcttcagctgcgcctggaccggcaacccatccctgaccatcgtctggatgaagcggggctccggagtggtcctgagcaatgagaagaccctgaccctcaaatccgtgcgccaggaggacgcgggcaagtacgtgtgccgggctgtggtgccccgtgtgggagccggggagagagaggtgaccctgaccgtcaatggaccccccatcatctccagcacccagacccagcacgccctccacggcgagaagggccagatcaagtgcttcatccggagcacgccgccgccggaccgcatcgcctggtcctggaaggagaacgttctggagtcgggcacatcggggcgctatacggtggagaccatcagcaccgaggagggcgtcatctccaccctgaccatcagcaacatcgtgcgggccgacttccagaccatctacaactgcacggcctggaacagcttcggctccgacactgagatcatccggctcaaggagcaaggttcggaaatgaagtcgggagccgggctggaagcagagtctgtgccgatggccgtcatcattggggtggccgtaggagctggtgtggccttcctcgtccttatggcaaccatcgtggcgttctgctgtgcccgttcccagagaaatctcaaaggtgttgtgtcagccaaaaatgatatccgagtggaaattgtccacaaggaaccagcctctggtcgggagggtgaggagcactccaccatcaagcagctgatgatggaccggggtgaattccagcaagactcagtcctgaaacagctggaggtcctcaaagaagaggagaaagagtttcagaacctgaaggaccccaccaatggctactacagcgtcaacaccttcaaagagcaccactcaaccccgaccatctccctctccagctgccagcccgacctgcgtcctgcgggcaagcagcgtgtgcccacaggcatgtccttcaccaacatctacagcaccctgagcggccagggccgcctctacgactacgggcagcggtttgtgctgggcatgggcagctcgtccatcgagctttgtgagcgggagttccagagaggctccctcagcgacagcagctccttcctggacacgcagtgtgacagcagcgtcagcagcagcggcaagcaggatggctatgtgcagttcgacaaggccagcaaggcttctgcttcctcctcccaccactcccagtcctcgtcccagaactctgaccccagtcgacccctgcagcggcggatgcagactcacgtctaaggatcacacaccgcgggtggggacgggccagggaagaggtcagggcacgttctggttgtccagggacgaggggtactttgcagaggacaccagaattggccacttccaggacagcctcccagcgcctctgccactgccttccttcgaagctctgatcaagcacaaatctgggtccccaggtgctgtgtgccagaggtgggcgggtggggagacagacagaggctgcggctgagtgcgctgtgcttagtgctggacacccgtgtccccggccctttcctggaggcccctctaccacctgctctgcccacaggcacaagtggcagctataactctgctttcatgaaactgcggtccactctctggtctctctgtgggctctacccctcgctgaccagaagctctacctacccctgtgcctgtgctcccatacagccctggggagaaggggatgacgtcttcccagcactgagctgccccagaaaccccggctccccactgctgctcatagcccataccctggaggctgacaagccagaaatggccttggctaaaggagcctctctctcaccaggctggccgggagcccacccccaatttgtttggtgttttgtgtccatactcttgcagttctgtccttggacttgatgccgctgaactctgcggtgggaccggtccggtcagagcctggtgtactggggggagggagggaggagggagcctgtgctgacggagcacctcgccgggtgtgcccctcctgggctgtgtgaccccagcctccccacccacctcctgctttgtgtactcctcccctccccctcagcacaatcggagttcatataagaagtgcgggagcttctctggtcagggttctctgaacacttatggagagagtgcttcctgggaagtgtggcgtttgaaggggctggagggcaggtctttaagatggcgagactgcccttctcagctgataaacacaagaacggcgatcctgtcttcagtaaggctccacgagaagagaggaagtatatctacacctcaaccctcctagtcaccacctgaaataaatgttagggacactactccaacatgtttgttctgttcttttgttcctacaaagccacaggaagaacccaagagctcatagaatgcgttgggaacccaaggttctctgccctcctttgattcaatcttcctagacaataaaggcagttgatagctctg

SEQ ID NO: 9222 - protein, 778 aa, Homo sapiens; identical to SEQ ID NO: 1406

SEQ ID NO: 9223 - DNA, 4042 bp, Homo sapiens
agtttccagttcctttgcaaaggcagggcgtgcatgtttttgtgcacatgcatgtggatagtcatccttaacttcactgttaaacaggacatcgtgtggacaaaaagtcacagctccactccaagctcaagatgccttttggtcaataatggtgacaaaagctgaatttttccctatttagggaaaagaaagaacacagccttttcccccactgtccgttttgcatagatctcctttttccgagtgtttcctctttaattatgacctgtctcccctccctctcccctcgcctcagcttcagtgaaaggagtccttctgtcactcgtcactagctcgctcgctcactgtgggaggagcccgcctgaggaagccgtgtgcctgggatgccaagagccagagaatggatcttctccgagtggggacattgctgacaatcccggcttcccgaggcggctaagaacaggcagtttgtgtcggctggctgcagatacccagaggcacaaagagaccgaagccacccggagggacccacggacggacagatggtaggcgcgaacccgagaggaccggcggaggctgagcaccgagagccgccaaggaagagaaactaaccacagccaagttaccccgccggctttccttcgctgcgctaaggaatgaaacccttccagctcgatctgctcttcgtctgcttcttcctcttcagtcaagagctgggcctccagaagagaggatgctgtctggtgctgggctacatggccaaggacaagtttcggagaatgaatgaaggccaagtctattccttcagccagcagccccaggaccaggtggtggtgtcgggacagccagtgacgctactttgcgccatccccgaatacgatggcttcgttctgtggatcaaggacggcttggctctgggtgtgggcagggacctctcaagttacccacagtacctggtggtagggaaccacctgtcaggggagcaccacctgaagatcctgagggcagagctgcaagacgatgcggtgtacgagtgccaggccatccaggccgccatccgctcccgccccgcacgcctcacagtcctggtgccgcctgatgaccccgtcatcctggggggccctgtgatcagcctgcgtgcgggggaccctctcaacctcacctgccacgcagacaatgccaagcctgcagcctccatcatctggttgcgaaagggagaggtcatcaatggggccacctactccaagaccctgcttcgggacggcaagcgggagagcatcgtcagcaccctcttcatctcccctggtgacgtggagaatggccagagcatcgtgtgtcgtgccaccaacaaagccatccccggaggaaaggagacgtcggtcaccattgacatccagcaccctccactggtcaacctctcggtggagccacagccagtgctggaggacaacgtcgtcactttccactgctctgcaaaggccaacccagctgtcacccagtacaggtgggccaagcggggccagatcatcaaggaggcatctggagaggtgtacaggaccacagtggactacacgtacttctcagagcccgtctcctgtgaggtgaccaacgccctgggcagcaccaacctcagccgcacggttgacgtctactttgggccccggatgaccacagaaccccaatccttgctcgtggatctgggctctgatgccatcttcagctgcgcctggaccggcaacccatccctgaccatcgtctggatgaagcggggctccggagtggtcctgagcaatgagaagaccctgaccctcaaatccgtgcgccaggaggacgcgggcaagtacgtgtgccgggctgtggtgccccgtgtgggagccggggagagagaggtgaccctgaccgtcaatggaccccccatcatctccagcacccagacccagcacgccctccacggcgagaagggccagatcaagtgcttcatccggagcacgccgccgccggaccgcatcgcctggtcctggaaggagaacgttctggagtcgggcacatcggggcgctatacggtggagaccatcagcaccgaggagggcgtcatctccaccctgaccatcagcaacatcgtgcgggccgacttccagaccatctacaactgcacggcctggaacagcttcggctccgacactgagatcatccggctcaaggagcaagagtctgtgccgatggccgtcatcattggggtggccgtaggagctggtgtggccttcctcgtccttatggcaaccatcgtggcgttctgctgtgcccgttcccagagaaatctcaaaggtgttgtgtcagccaaaaatgatatccgagtggaaattgtccacaaggaaccagcctctggtcgggagggtgaggagcactccaccatcaagcagctgatgatggaccggggtgaattccagcaagactcagtcctgaaacagctggaggtcctcaaagaagaggagaaagagtttcagaacctgaaggaccccaccaatggctactacagcgtcaacaccttcaaagagcaccactcaaccccgaccatctccctctccagctgccagcccgacctgcgtcctgcgggcaagcagcgtgtgcccacaggcatgtccttcaccaacatctacagcaccctgagcggccagggccgcctctacgactacgggcagcggtttgtgctgggcatgggcagctcgtccatcgagctttgtgagcgggagttccagagaggctccctcagcgacagcagctccttcctggacacgcagtgtgacagcagcgtcagcagcagcggcaagcaggatggctatgtgcagttcgacaaggccagcaaggcttctgcttcctcctcccaccactcccagtcctcgtcccagaactctgaccccagtcgacccctgcagcggcggatgcagactcacgtctaaggatcacacaccgcgggtggggacgggccagggaagaggtcagggcacgttctggttgtccagggacgaggggtactttgcagaggacaccagaattggccacttccaggacagcctcccagcgcctctgccactgccttccttcgaagctctgatcaagcacaaatctgggtccccaggtgctgtgtgccagaggtgggcgggtggggagacagacagaggctgcggctgagtgcgctgtgcttagtgctggacacccgtgtccccggccctttcctggaggcccctctaccacctgctctgcccacaggcacaagtggcagctataactctgctttcatgaaactgcggtccactctctggtctctctgtgggctctacccctcgctgaccagaagctctacctacccctgtgcctgtgctcccatacagccctggggagaaggggatgacgtcttcccagcactgagctgccccagaaaccccggctccccactgctgctcatagcccataccctggaggctgacaagccagaaatggccttggctaaaggagcctctctctcaccaggctggccgggagcccacccccaatttgtttggtgttttgtgtccatactcttgcagttctgtccttggacttgatgccgctgaactctgcggtgggaccggtccggtcagagcctggtgtactggggggagggagggaggagggagcctgtgctgacggagcacctcgccgggtgtgcccctcctgggctgtgtgaccccagcctccccacccacctcctgctttgtgtactcctcccctccccctcagcacaatcggagttcatataagaagtgcgggagcttctctggtcagggttctctgaacacttatggagagagtgcttcctgggaagtgtggcgtttgaaggggctggagggcaggtctttaagatggcgagactgcccttctcagctgataaacacaagaacggcgatcctgtcttcagtaaggctccacgagaagagaggaagtatatctacacctcaaccctcctagtcaccacctgaaataaatgttagggacactactccaa

SEQ ID NO: 9224 - protein, 766 aa, Homo sapiens
MKPFQLDLLFVCFFLFSQELGLQKRGCCLVLGYMAKDKFRRMNEGQVYSFSQQPQDQVVVSGQPVTLLCAIPEYDGFVLWIKDGLALGVGRDLSSYPQYLVVGNHLSGEHHLKILRAELQDDAVYECQAIQAAIRSRPARLTVLVPPDDPVILGGPVISLRAGDPLNLTCHADNAKPAASIIWLRKGEVINGATYSKTLLRDGKRESIVSTLFISPGDVENGQSIVCRATNKAIPGGKETSVTIDIQHPPLVNLSVEPQPVLEDNVVTFHCSAKANPAVTQYRWAKRGQIIKEASGEVYRTTVDYTYFSEPVSCEVTNALGSTNLSRTVDVYFGPRMTTEPQSLLVDLGSDAIFSCAWTGNPSLTIVWMKRGSGVVLSNEKTLTLKSVRQEDAGKYVCRAVVPRVGAGEREVTLTVNGPPIISSTQTQHALHGEKGQIKCFIRSTPPPDRIAWSWKENVLESGTSGRYTVETISTEEGVISTLTISNIVRADFQTIYNCTAWNSFGSDTEIIRLKEQESVPMAVIIGVAVGAGVAFLVLMATIVAFCCARSQRNLKGVVSAKNDIRVEIVHKEPASGREGEEHSTIKQLMMDRGEFQQDSVLKQLEVLKEEEKEFQNLKDPTNGYYSVNTFKEHHSTPTISLSSCQPDLRPAGKQRVPTGMSFTNIYSTLSGQGRLYDYGQRFVLGMGSSSIELCEREFQRGSLSDSSSFLDTQCDSSVSSSGKQDGYVQFDKASKASASSSHHSQSSSQNSDPSRPLQRRMQTHV

SEQ ID NO: 9225 - DNA, 4071 bp, Homo sapiens
agtttccagttcctttgcaaaggcagggcgtgcatgtttttgtgcacatgcatgtggatagtcatccttaacttcactgttaaacaggacatcgtgtggacaaaaagtcacagctccactccaagctcaagatgccttttggtcaataatggtgacaaaagctgaatttttccctatttagggaaaagaaagaacacagccttttcccccactgtccgttttgcatagatctcctttttccgagtgtttcctctttaattatgacctgtctcccctccctctcccctcgcctcagcttcagtgaaaggagtccttctgtcactcgtcactagctcgctcgctcactgtgggaggagcccgcctgaggaagccgtgtgcctgggatgccaagagccagagaatggatcttctccgagtggggacattgctgacaatcccggcttcccgaggcggctaagaacaggcagtttgtgtcggctggctgcagatacccagaggcacaaagagaccgaagccacccggagggacccacggacggacagatggtaggcgcgaacccgagaggaccggcggaggctgagcaccgagagccgccaaggaagagaaactaaccacagccaagttaccccgccggctttccttcgctgcgctaaggaatgaaacccttccagctcgatctgctcttcgtctgcttcttcctcttcagtcaagagctgggcctccagaagagaggatgctgtctggtgctgggctacatggccaaggacaagtttcggagaatgaatgaaggccaagtctattccttcagccagcagccccaggaccaggtggtggtgtcgggacagccagtgacgctactttgcgccatccccgaatacgatggcttcgttctgtggatcaaggacggcttggctctgggtgtgggcagggacctctcaagttacccacagtacctggtggtagggaaccacctgtcaggggagcaccacctgaagatcctgagggcagagctgcaagacgatgcggtgtacgagtgccaggccatccaggccgccatccgctcccgccccgcacgcctcacagtcctggtgccgcctgatgaccccgtcatcctggggggccctgtgatcagcctgcgtgcgggggaccctctcaacctcacctgccacgcagacaatgccaagcctgcagcctccatcatctggttgcgaaagggagaggtcatcaatggggccacctactccaagaccctgcttcgggacggcaagcgggagagcatcgtcagcaccctcttcatctcccctggtgacgtggagaatggccagagcatcgtgtgtcgtgccaccaacaaagccatccccggaggaaaggagacgtcggtcaccattgacatccagcaccctccactggtcaacctctcggtggagccacagccagtgctggaggacaacgtcgtcactttccactgctctgcaaaggccaacccagctgtcacccagtacaggtgggccaagcggggccagatcatcaaggaggcatctggagaggtgtacaggaccacagtggactacacgtacttctcagagcccgtctcctgtgaggtgaccaacgccctgggcagcaccaacctcagccgcacggttgacgtctactttgggccccggatgaccacagaaccccaatccttgctcgtggatctgggctctgatgccatcttcagctgcgcctggaccggcaacccatccctgaccatcgtctggatgaagcggggctccggagtggtcctgagcaatgagaagaccctgaccctcaaatccgtgcgccaggaggacgcgggcaagtacgtgtgccgggctgtggtgccccgtgtgggagccggggagagagaggtgaccctgaccgtcaatggaccccccatcatctccagcacccagacccagcacgccctccacggcgagaagggccagatcaagtgcttcatccggagcacgccgccgccggaccgcatcgcctggtcctggaaggagaacgttctggagtcgggcacatcggggcgctatacggtggagaccatcagcaccgaggagggcgtcatctccaccctgaccatcagcaacatcgtgcgggccgacttccagaccatctacaactgcacggcctggaacagcttcggctccgacactgagatcatccggctcaaggagcaaggttcggaaatgaagtcgggagccgggctggaagcagagtctgtgccgatggccgtcatcattggggtggccgtaggagctggtgtggccttcctcgtccttatggcaaccatcgtggcgttctgctgtgcccgttcccagagaaatctcaaaggtgttgtgtcagccaaaaatgatatccgagtggaaattgtccacaaggaaccagcctctggtcgggagggtgaggagcactccaccatcaagcagctgatgatggaccggggtgaattccagcaagactcagtcctgaaacagctggaggtcctcaaagaagaggagaaagagtttcagaacctgaaggaccccaccaatggctactacagcgtcaacaccttcaaagagcaccactcaaccccgaccatctccctctccagctgccagcccgacctgcgtcctgcgggcaagcagcgtgtgcccacaggcatgtccttcaccaacatctacagcaccctgagcggccagggccgcctctacgactacgggcagcggtttgtgctgggcatgggcagctcgtccatcgagctttgtgagcgggagttccagagaggctccctcagcgacagcagctccttcctggacacgcagtgtgacagcagcgtcagcagcagcggcaagcaggatggctatgtgcagttcgacaaggccagcaaggcttctgcttcctcctcccaccactcccagtcctcgtcccagaactctgaccccagtcgacccctgcagcggcggatgcagactcacgtctaaggatcacacaccgcgggtggggacgggccagggaagaggtcagggcacgttctggttgtccagggacgaggggtactttgcagaggacaccagaattggccacttccaggacagcctcccagcgcctctgccactgccttccttcgaagctctgatcaagcacaaatctgggtccccaggtgctgtgtgccagaggtgggcgggtggggagacagacagaggctgcggctgagtgcgctgtgcttagtgctggacacccgtgtccccggccctttcctggaggcccctctaccacctgctctgcccacaggcacaagtggcagctataactctgctttcatgaaactgcggtccactctctggtctctctgtgggctctacccctcgctgaccagaagctctacctacccctgtgcctgtgctcccatacagccctggggagaaggggatgacgtcttcccagcactgagctgccccagaaaccccggctccccactgctgctcatagcccataccctggaggctgacaagccagaaatggccttggctaaaggagcctctctctcaccaggctggccgggagcccacccccaatttgtttggtgttttgtgtccatactcttgcagttctgtccttggacttgatgccgctgaactctgcggtgggaccggtccggtcagagcctggtgtactggggggagggagggaggagggagcctgtgctgacggagcacctcgccgggtgtgcccctcctgggctgtgtgaccccagcctccccacccacctcctgctttgtgtactcctcccctccccctcagcacaatcggagttcatataagaagtgcgggagcttctctggtcagggttctctgaacacttatggagagagtgcttcctgggaagtgtggcgtttgaaggggctggagggcaggtctttaagatggcgagactgcccttctcagctgataaacacaagaacggcgatcctgtcttcagtaaggctccacgagaagagaggaagtatatctacacctcaaccctcctagtcaccacctgaaataaatgttagggacact

SEQ ID NO: 9226 - protein, 778 aa, Homo sapiens; identical to SEQ ID NO: 1406

SEQ ID NO: 9227 - DNA, 2829 bp, Homo sapiens
agtttccagttcctttgcaaaggcagggcgtgcatgtttttgtgcacatgcatgtggatagtcatccttaacttcactgttaaacaggacatcgtgtggacaaaaagtcacagctccactccaagctcaagatgccttttggtcaataatggtgacaaaagctgaatttttccctatttagggaaaagaaagaacacagccttttcccccactgtccgttttgcatagatctcctttttccgagtgtttcctctttaattatgacctgtctcccctccctctcccctcgcctcagcttcagtgaaaggagtccttctgtcactcgtcactagctcgctcgctcactgtgggaggagcccgcctgaggaagccgtgtgcctgggatgccaagagccagagaatggatcttctccgagtggggacattgctgacaatcccggcttcccgaggcggctaagaacaggcagtttgtgtcggctggctgcagatacccagaggcacaaagagaccgaagccacccggagggacccacggacggacagatggtaggcgcgaacccgagaggaccggcggaggctgagcaccgagagccgccaaggaagagaaactaaccacagccaagttaccccgccggctttccttcgctgcgctaaggaatgaaacccttccagctcgatctgctcttcgtctgcttcttcctcttcagtcaagagctgggcctccagaagagaggatgctgtctggtgctgggctacatggccaaggacaagtttcggagaatgaatgaaggccaagtctattccttcagccagcagccccaggaccaggtggtggtgtcgggacagccagtgacgctactttgcgccatccccgaatacgatggcttcgttctgtggatcaaggacggcttggctctgggtgtgggcagggacctctcaagttacccacagtacctggtggtagggaaccacctgtcaggggagcaccacctgaagatcctgagggcagagctgcaagacgatgcggtgtacgagtgccaggccatccaggccgccatccgctcccgccccgcacgcctcacagtcctggtgccgcctgatgaccccgtcatcctggggggccctgtgatcagcctgcgtgcgggggaccctctcaacctcacctgccacgcagacaatgccaagcctgcagcctccatcatctggttgcgaaagggagaggtcatcaatggggccacctactccaagaccctgcttcgggacggcaagcgggagagcatcgtcagcaccctcttcatctcccctggtgacgtggagaatggccagagcatcgtgtgtcgtgccaccaacaaagccatccccggaggaaaggagacgtcggtcaccattgacatccagcaccctccactggtcaacctctcggtggagccacagccagtgctggaggacaacgtcgtcactttccactgctctgcaaaggccaacccagctgtcacccagtacaggtgggccaagcggggccagatcatcaaggaggcatctggagaggtgtacaggaccacagtggactacacgtacttctcagagcccgtctcctgtgaggtgaccaacgccctgggcagcaccaacctcagccgcacggttgacgtctactttgggccccggatgaccacagaaccccaatccttgctcgtggatctgggctctgatgccatcttcagctgcgcctggaccggcaacccatccctgaccatcgtctggatgaagcggggctccggagtggtcctgagcaatgagaagaccctgaccctcaaatccgtgcgccaggaggacgcgggcaagtacgtgtgccgggctgtggtgccccgtgtgggagccggggagagagaggtgaccctgaccgtcaatggaccccccatcatctccagcacccagacccagcacgccctccacggcgagaagggccagatcaagtgcttcatccggagcacgccgccgccggaccgcatcgcctggtcctggaaggagaacgttctggagtcgggcacatcggggcgctatacggtggagaccatcagcaccgaggagggcgtcatctccaccctgaccatcagcaacatcgtgcgggccgacttccagaccatctacaactgcacggcctggaacagcttcggctccgacactgagatcatccggctcaaggagcaaggttcggaaatgaagtcgggagccgggctggaagcagagtctgtgccgatggccgtcatcattggggtggccgtaggagctggtgtggccttcctcgtccttatggcaaccatcgtggcgttctgctgtgcccgttcccagagaagtacgggagggagatccgggatctcagggagggggacagagaaaaaggccaggcttaggctgccccggagagcaagtaagcaggagtgcaatgaacaggggtcctaacagtgctgtgagctcctggggcagggagtgggtctgatgcatcggtgtatgtgagcctgggcaacatggcgcctggcagagtgggcgctaggctgaggttgacctggactagactgaacttcatctgcagggcagccagcattttggattgaacacatagctctttcagtcaggaactgtacagaaagatagggggaaaagcggtttgtggtttgatccttgctctacaagagctgttagtctagagagaccccatctctacaacaaaataaaaataaagagctgctagtctcaccagaaaagcaggtcactcacacagctgtgggggagtgggtggggaagcaataaaggaattgctttgagaaaactt

SEQ ID NO: 9228 - protein, 600 aa, Homo sapiens
MKPFQLDLLFVCFFLFSQELGLQKRGCCLVLGYMAKDKFRRMNEGQVYSFSQQPQDQVVVSGQPVTLLCAIPEYDGFVLWIKDGLALGVGRDLSSYPQYLVVGNHLSGEHHLKILRAELQDDAVYECQAIQAAIRSRPARLTVLVPPDDPVILGGPVISLRAGDPLNLTCHADNAKPAASIIWLRKGEVINGATYSKTLLRDGKRESIVSTLFISPGDVENGQSIVCRATNKAIPGGKETSVTIDIQHPPLVNLSVEPQPVLEDNVVTFHCSAKANPAVTQYRWAKRGQIIKEASGEVYRTTVDYTYFSEPVSCEVTNALGSTNLSRTVDVYFGPRMTTEPQSLLVDLGSDAIFSCAWTGNPSLTIVWMKRGSGVVLSNEKTLTLKSVRQEDAGKYVCRAVVPRVGAGEREVTLTVNGPPIISSTQTQHALHGEKGQIKCFIRSTPPPDRIAWSWKENVLESGTSGRYTVETISTEEGVISTLTISNIVRADFQTIYNCTAWNSFGSDTEIIRLKEQGSEMKSGAGLEAESVPMAVIIGVAVGAGVAFLVLMATIVAFCCARSQRSTGGRSGISGRGTEKKARLRLPRRASKQECNEQGS

SEQ ID NO: 9229 - DNA, 2061 bp, Homo sapiens
cgcgcttctccatcaggtggagccgtcggctcctcgccgcctccctcctcctccctcccccggagcgaaccgcgcgcaggcagccttgcagcgccaggaggctaaccgagcccccggaggaggtgaggccgcgggcagccgggcggagatggcggggccgccgtcgaggctggcgccagagcccgaccggctgtgggtcctgcagcttcagtgaaaggagtccttctgtcactcgtcactagctcgctcgctcactgtgggaggagcccgcctgaggaagccgtgtgcctgggatgccaagagccagagaatggatcttctccgagtggggacattgctgacaatcccggcttcccgaggcggctaagaacaggcagtttgtgtcggctggctgcagatacccagaggcacaaagagaccgaagccacccggagggacccacggacggacagatggtaggcgcgaacccgagaggaccggcggaggctgagcaccgagagccgccaaggaagagaaactaaccacagccaagttaccccgccggctttccttcgctgcgctaaggaatgaaacccttccagctcgatctgctcttcgtctgcttcttcctcttcagtcaagagctgggcctccagaagagaggatgctgtctggtgctgggctacatggccaaggacaagtttcggagaatgaatgaagagacggagtttcgctcttgttgcccaggctggaatgcaatggcatgatctcagctcactgcaagctccgcctcccgcgttcaagcgattctcctgcctcagcctcctgagtagctgggattacaggcacccaccacctcacttggctgattttttgtatgtttagtagaaacagggtttcgccatgttgggcaggctggtctcaaactcctgacctcgggtgatccacccgcctcagcctcccaaagtgctgggattacaggcgtgcgactaatattcttaacgtaaccctgtggcttaggagtaggagaaatctagattcaaatcccgggtgtagtcagggcaggcttagacccctatcattacagattctccaggccagaagggaccaaaggtcatctggttccatatccctgccaagtaccagtgtgtgtaaagactgtgaacacggcggaatgctcatttattcaccaaccatgtgtccagtacccgctctgtgcctggcgctgtgcatgtaaaaacacagtccctgcccccaaggataccactgtcttgcggggagagacaaacacgtcagcaactacaatacaatgtcgcagttgcggtaaccgggtatgaataagtagctattggaaacagagaaggagaatccaatcacactgtaggccaggagaggagtgtccagcatggcttctggagaaataagccctgtgagatgttttattctaagaggctgttgcaacctatgcttgaatccctccaaagacaagaaacttgcagcctgccgaggcggtgggcagctcctcagccaggctctccaaacgccacaccgcttccaccccaggaggctgcagttttcgcattctagctttactgatgacgaggggacccagtgacttggacagcagccactggcaagatcctggggtctccactatgtcaactgcaccggggaggcctcctttcttctctctgcttcttccttccatccccagccagcctcaaaggcttcatcacagaattctttgagtgctgagaccctcccccagccctctccccagggtctgaagaaagccccagagaagttggaataaacgaaggcgcttaatggcttgcggtgccataaagtttttagagccgtgcgctggaatgagcaggttcaggctgagatgaattatccagggcttttatcaaagggagtcaataaaaacctgaaggagcttgccccacctccacagagtgctcatgtcacagtgccgggccctgtgctctggaagtaggaaccagggggccgcgttttccccctaactccatctgctttcttccctgtgccttcctttctgaaatgtattcgtttctatgg

SEQ ID NO: 9230 - protein, 59 aa, Homo sapiens
MKPFQLDLLFVCFFLFSQELGLQKRGCCLVLGYMAKDKFRRMNEETEFRSCCPGWNAMA

SEQ ID NO: 9231 - DNA, 2019 bp, Homo sapiens
agtttccagttcctttgcaaaggcagggcgtgcatgtttttgtgcacatgcatgtggatagtcatccttaacttcactgttaaacaggacatcgtgtggacaaaaagtcacagctccactccaagctcaagatgccttttggtcaataatggtgacaaaagctgaatttttccctatttagggaaaagaaagaacacagccttttcccccactgtccgttttgcatagatctcctttttccgagtgtttcctctttaattatgacctgtctcccctccctctcccctcgcctcagcttcagtgaaaggagtccttctgtcactcgtcactagctcgctcgctcactgtgggaggagcccgcctgaggaagccgtgtgcctgggatgccaagagccagagaatggatcttctccgagtggggacattgctgacaatcccggcttcccgaggcggctaagaacaggcagtttgtgtcggctggctgcagatacccagaggcacaaagagaccgaagccacccggagggacccacggacggacagatggtaggcgcgaacccgagaggaccggcggaggctgagcaccgagagccgccaaggaagagaaactaaccacagccaagttaccccgccggctttccttcgctgcgctaaggaatgaaacccttccagctcgatctgctcttcgtctgcttcttcctcttcagtcaagagctgggcctccagaagagaggatgctgtctggtgctgggctacatggccaaggacaagtttcggagaatgaatgaagagacggagtttcgctcttgttgcccaggctggaatgcaatggcatgatctcagctcactgcaagctccgcctcccgcgttcaagcgattctcctgcctcagcctcctgagtagctgggattacaggcacccaccacctcacttggctgattttttgtatgtttagtagaaacagggtttcgccatgttgggcaggctggtctcaaactcctgacctcgggtgatccacccgcctcagcctcccaaagtgctgggattacaggcgtgcgactaatattcttaacgtaaccctgtggcttaggagtaggagaaatctagattcaaatcccgggtgtagtcagggcaggcttagacccctatcattacagattctccaggccagaagggaccaaaggtcatctggttccatatccctgccaagtaccagtgtgtgtaaagactgtgaacacggcggaatgctcatttattcaccaaccatgtgtccagtacccgctctgtgcctggcgctgtgcatgtaaaaacacagtccctgcccccaaggataccactgtcttgcggggagagacaaacacgtcagcaactacaatacaatgtcgcagttgcggtaaccgggtatgaataagtagctattggaaacagagaaggagaatccaatcacactgtaggccaggagaggagtgtccagcatggcttctggagaaataagccctgtgagatgttttattctaagaggctgttgcaacctatgcttgaatccctccaaagacaagaaacttgcagcctgccgaggcggtgggcagctcctcagccaggctctccaaacgccacaccgcttccaccccaggaggctgcagttttcgcattctagctttactgatgacgaggggacccagtgacttggacagcagccactggcaagatcctggggtctccactatgtcaactgcaccggggaggcctcctttcttctctctgcttcttccttccatccccagccagcctcaaaggcttcatcacagaattctttgagtgctgagaccctcccccagccctctccccagggtctgaagaaagccccagagaagttggaataaacgaaggcgcttaatggcttgcggtgccataaagtttttagagccgtgcgctggaatgagcaggttcaggctgagatgaattatccagggcttttatcaaagggagtcaataaaaacctgaaggagcttgccccacc

SEQ ID NO: 9232 - protein, 59 aa, Homo sapiens; identical to SEQ ID NO: 9230

SEQ ID NO: 9233 - DNA, 391 bp, Homo sapiens
acacacacacacaccgtggaaatgaggaaaagttacttctctctgttgtaaatttaaatgcagtccagagtagtgaaggccgtttgtaaggtctgctgagctaatggattcataatgacttttaaagcttcactcggctgcactgggggagagcctgctgaagctgcttgaatctcaacactgtcatacccgccatctcattatctacagccacatctaaaacccacatgaaataccaagtcacacgcggctctgggaaagacattttacagagaccatcttatgagtttttaatctgcctcctgagaacttacaatctaagaaatagaaaactgattccagtaagcatgcccagaatatgctagcagcaagattaaaacatgaaactatg

SEQ ID NO: 9234 - protein, 45 aa, Homo sapiens
MKYQVTRGSGKDILQRPSYEFLICLLRTYNLRNRKLIPVSMPRIC

SEQ ID NO: 9235 - DNA, 295 bp, Homo sapiens
ccacttccaggtatggctgagaagggtgaaaatgcatgcacccacagacacacacacacaccgtggaaatgaggaaaagttacttctctctgttgtaaatttaaatgcagtccagagtagtgaaggccgtttgtaaggtctgctgagctaatggattcataatgacttttaaagcttcactcggtacatcctatgtgccagacactgcgataggttctggagataacaacagtgtccaagaaacaacagtgtccaagaaacaggactttccctcaaagagcttactggggaagcc

SEQ ID NO: 9236 - protein, 43 aa, Homo sapiens
MTFKASLGTSYVPDTAIGSGDNNSVQETTVSKKQDFPSKSLLG

SEQ ID NO: 9237 - DNA, 494 bp, Homo sapiens
tacttagccttgtccctacctctttactcctctgtaggcagtaattcttttttcttttctttcttttttttttcttttggtgtaacagtatcgcatgagccaagactgtcatgaaactatttggatactgtactctggttccttcatctcctccatctgcatcagcctaaattgtcctatctgtcttttgttacaggagcctctgccatgaacccggggataagtgaggaaagaaatttttcctccttcacagtatcaagtgccaggccagggcactttgtccaggcctcactgtgaagaaagagtaatgttcaaggatggcagcaggaaggaccctaatgaagaggtttatctgattggtttactggagtcctatgtgggatgaatagcttcagcctttgcgcttgcacctctttgctgtccactccaatcaagaacgggggccctcgcaactctctcagttctgaaacaaattaaatctcagtgacagactc

SEQ ID NO: 9238 - protein, 38 aa, Homo sapiens
MSQDCHETIWILYSGSFISSICISLNCPICLLLQEPLP

SEQ ID NO: 9239 - DNA, 470 bp, Homo sapiens
cggggttttgcttcatcattgagcttgtcctgccagcctccaccagttcctgaagagaacaggccaaagtgtggaacatacaggatgaagcgattacaacctgggcgcagtatactggctggctttgctgctcactcccttacgaatagctgtgatgggatatgaaatccaagggaactgttagccccccagagcagctgctcccaccgaccctgctccaagagtgctgggatgtccgctggcctcgaggcaagacaagagctccaatcactctgctgcaagcgccaccattaaagtcaagatcactgtggtggggggagttgaagtgtgcattccagcatgctcatgatcttactgaccttctccactgatgaattagaacacccctcttcccaggcacaggacgagttcagtgcctctctgtttcttgatggaccccaataaaaaaacgcctgcactgtttttcacct

SEQ ID NO: 9240 - protein, 69 aa, Homo sapiens
MKSKGTVSPPEQLLPPTLLQECWDVRWPRGKTRAPITLLQAPPLKSRSLWWGELKCAFQHAHDLTDLLH

SEQ ID NO: 9241 - DNA, 1768 bp, Homo sapiens
actgactcttggaaagaagaggggggcctgggagatccaggttggaaggatcttgtttcgctctcccattggcccccaacactggcctcatggcccccttactggctccaggcatccccctcacccccaccaacgagccagctgggcctgttcccctctccactcccctctactccctccctgtaacctccggtctcccgcagaaagaaagaaaaaaaaaaaagcttggattaagtgatgagctgcccgcctctaaaaggaccaggaggcgtatcaagcctgagtgccggaaaacccacggcaatcttcagcagccaccacgtggggcagagaacgcgagcagtacctgcaggacccacagccggtcgggctctggcgccagcctcgacggcggccccgccatctccgcccggctgcccgcggcctcacctcctccgggggctcggttagcctcctggcgctgcaaggctgcctgcgcgcggttcgctccgggggagggaggaggagggaggcggcgaggagccgacggctccacctgatggagaagcgcggagagtccctagacctcggagtgcgctgcaagaggggagaggagagagaccgccgcccctgctggaagccttcgcgtccgggggcggcgcgcgggggaaggggtctctggacagtcggtggaggcggcagccctacagagacagccgaaagccagcaacttggaaaaccgcccgaattctgggtttctgcacatccaggctggctccaggtctcttgtgcccaccgtgcaagccggcgggatgccagcaggtggcatcctctccagcgtttcttcgccaggcgtggagtccggaggccgaatccatcagtccccagccccctccccaagcctccggtgccaagtgctgggtcctgtgagcccctggcccgccccccacctccgccagcggggcgagccggagctgggtgacccagaccctcgcggaggcgggagcctacagaggatgccggccggccccaggttctgctgctggctggccaagaagtgacaggagggcaaggctcccccggaaagcgtccaagccctgctctcctgctcttccaagccttgctgcgtgttgcccccagggttttctgagatctgggacgaagagagtgatgtgcaaggttctgggtcccggtgcaggagtgaggggtacggctgtcgagtgctcggagcaggctggcgtttgggcacactgcagacctcagctcaccgccactttctcctgaccttcctcgtggctgtcagcccaatgtctatcatgtgttattccctcggtttgttcaaaggcctgttttggatacttaaagacatgtggaataactatgagaattcctgttcctggaaagtttgtcctctagttggaaagaggtatatacaggtggattacgagaccttaaccctgctccctgcagttggtctttccattgcagagggaaagggctcagagaaccagatattcaactttcagaagcatcccctgaagggcaggttgtctgctcccctgattcattgaggatcaggcctcatggagggagtctgccctatgaaggtggggacagcgcccctctagttcacagccgtctccacagctcttacccaggtaggcagtaggctctcactacgtactgctgaatgaatggtaaagttttacctagtgccccacattctatttcctgttttctgaatccaatttaacttattcttccctctgttattaaaccattgtcaaac

SEQ ID NO: 9242 - protein, 87 aa, Homo sapiens
MSIMCYSLGLFKGLFWILKDMWNNYENSCSWKVCPLVGKRYIQVDYETLTLLPAVGLSIAEGKGSENQIFNFQKHPLKGRLSAPLIH

SEQ ID NO: 9243 - DNA, 2323 bp, Homo sapiens
gtgctcaacagaaggggtgacgccatatggatgccatgttatgggagcctgtcacctgctaaccgagatgagaaattacaggttataatccccttcctgctgtctgaggagcccagcttcaaagatagccaggcaggagttattttatagaatggaagtaatttctacggggccaagcaataataaggaaattggaagtcaaggactatcttccgaatggagaagaagctccatcaaccacagaaggaaattatgatcactcctgccatcctgctcctttgtgtatccaggatgaaggggagaattggagtcttgcacaatgaaaggacaacattgctgccaaaacaatccatcgtgactgtagacatattttccaccctcatcctgcaggttttctgccagttgttggcccctcaccaattttgctcctgggcagtctgaggtggaacataattttgtataaaacaaattatgctcaacctcacttataatcagggaaatgtgagtcaaaaccacaataaaatatcacctcatgctgtttaggattgctgttatcaagtagacaagaaagaagtgttggtgagggtaaggagaaaataaaatctttgcacactgttggtgggaatgtaagttggtaaagccactatcaaaggcaatatgaaggattctcaaaaaattaaaaataaaattgccaaatgatccatcaatccttcttctggacacataatcaaaggaaatgaaatcagtatctcaaatagatatttgcaccccatatccattgcatccttttttgtaataaccaagatatgggagcaatcgaagtgtccatcagcaaatgaatggataaagaaatcatggtacacatatacagtggaatattattcagacataaaaaggaaggaaatcctgtcatttctcaagacattaatgaacccagaggacatcatactaagtgaaataagctagatataggaagacaaaaaccacatgatctcacttacatgtggaatctaaaaaagtcaaactcatagaagcagcgagtagaatagtggttgtcaagggcttgggataattgaggagatgttggttaaagggtacaaactttaagttataagatgaacaagttctggcgctctactatatagtatgggtgatgacggatgtgttaattaatttgattgtgacattcattacacgatgcatatgtataacaaatcatcacattgtacaccttggatatattccatctttatttatcaattaaatatttcaaaatgtttttaaaaaggaaggcaaaatgggccaaaaggagtaactactttatgtagagctgatgtccaggctagaatttctaaactttttctgtaacctagagtctctgttatacttttgacttacccattattcataacagatctcaggaaccctcatcacactgcctattgctaaaaactcaaaggagttattgttatatgaacaacccaagttaatgcagtcattaatggaaatacagagtcttgactgaaagagatcatttctattttttgttgcgatagtcagatcatagccagtcacatcttttagggaggatgcaaataggctggacttccttcagcaaacaggatgctgtagaataaaatattctacatgagaatacttaaacaaattggagtgcctggtgccaccatgtaaattgtgaggtgtcagacaggctggtctttggattagagattggacttactctctgtggccctatgagtagagcaggtcggggtggggctgggcagggaggaagatcatcttaaagtgatagatgtaggctcagtgtgaggaaggatttctaagagttggagctgctcagaggtgaaatatcaagagaatgcccttcaggagcagtgtctgaagacagaccacatggccaatagggagagataagcgggctgggtggccctcagcgctttgcttccagtcttgggagtcttactgaaatagctaatgaccactcaacccaaagaacagacacatgtctgccatgtctctccaggctcatcctgcttattgcaagtgaggcccaaaggtggggctgttattccctgatgtttcaggtccatgtgcaacttattcccagatcttttctgaaaaaaaaagcagagagactgtttgccagacagctggaccagaatgaggtaaaagaagataaggcccaaccgagaagtcagaaaagcttcacttttcattagctccacattccaaagtaagaaatcaatgtgcttagctgcaattcaaagcaattagtctttgttctcacacactctcaaagaac

SEQ ID NO: 9244 - protein, 74 aa, Homo sapiens
MEKKLHQPQKEIMITPAILLLCVSRMKGRIGVLHNERTTLLPKQSIVTVDIFSTLILQVFCQLLAPHQFCSWAV

SEQ ID NO: 9245 - DNA, 553 bp, Homo sapiens
gaggagttcacatttatggtgagcccatgcaagaagaccctccgacaggtgcctgtcacccctgaggagtcactggttgcagcccgttctgaagtgtcattgagatagaaaccaagtcaaagccgtggcctagaaagagagtctgggcagaattctgcaagcagattctttatttgagaaacatggatgccacacctgaaaggcagtggccatttcggtaatcacctgaggcaagatcagaaaaaatctaaaagaattgcagagatgctgaccttgatgacttcaagctgctgaaccaagtcccagggaaatcaggattatagttgtttggctgtttcagacacacctgctggtcattcgccacctgaacccacaatcgggtatttggactcggcagtgagtcctgccacggaggcagctctgacgcgactggtggaggattagcacttcacgtgggaagaagcagcaggaaaggatgaaaatcttaagtagcaaagatcttgttttcgtctctagaactccagtaataaaggccagtggcaatgctctcgct

SEQ ID NO: 9246 - protein, 35 aa, Homo sapiens
MPHLKGSGHFGNHLRQDQKKSKRIAEMLTLMTSSC

SEQ ID NO: 9247 - DNA, 393 bp, Homo sapiens
cccctcttctggctcaagcatttgttggaatggctcacaaaactcaggaaggacccacgtgtgaagcctgtgagtttgattgcactgcaggaggaccccctaaagctactgctgcaaaatgctcctagagcaaaggcccttcagggtccaggtgaccatggtactgctggcttggagaccacactctgaggggccagaatagaggcaattgctcagctctccatttttgtgttaaacgcatttacaccctcactgattgtttggtgttacattatcttctttcaaggagaattcatttgcatgagggctttaaatagaatcctgtgggaataactccttttaaagggaagttgaaagcacttaactcagccagaactcggtatgcatcaaagg

SEQ ID NO: 9248 - protein, 32 aa, Homo sapiens
MAHKTQEGPTCEACEFDCTAGGPPKATAAKCS

SEQ ID NO: 9249 - DNA, 2808 bp, Homo sapiens
tgtcagactaagacagagaaccatcattaattgaagtgagatttttctggcctgagacttgcagggaggcaagaagacactctggacaccactatggacagcctcttgatgaaccggaggaagtttctttaccaattcaaaaatgtccgctgggctaagggtcggcgtgagacctacctgtgctacgtagtgaagaggcgtgacagtgctacatccttttcactggactttggttatcttcgcaataagaacggctgccacgtggaattgctcttcctccgctacatctcggactgggacctagaccctggccgctgctaccgcgtcacctggttcacctcctggagcccctgctacgactgtgcccgacatgtggccgactttctgcgagggaaccccaacctcagtctgaggatcttcaccgcgcgcctctacttctgtgaggaccgcaaggctgagcccgaggggctgcggcggctgcaccgcgccggggtgcaaatagccatcatgaccttcaaagattatttttactgctggaatacttttgtagaaaaccacgaaagaactttcaaagcctgggaagggctgcatgaaaattcagttcgtctctccagacagcttcggcgcatccttttgcccctgtatgaggttgatgacttacgagacgcatttcgtactttgggactttgatagcaacttccaggaatgtcacacacgatgaaatatctctgctgaagacagtggataaaaaacagtccttcaagtcttctctgtttttattcttcaactctcactttcttagagtttacagaaaaaatatttatatacgactctttaaaaagatctatgtcttgaaaatagagaaggaacacaggtctggccagggacgtgctgcaattggtgcagttttgaatgcaacattgtcccctactgggaataacagaactgcaggacctgggagcatcctaaagtgtcaacgtttttctatgacttttaggtaggatgagagcagaaggtagatcctaaaaagcatggtgagaggatcaaatgtttttatatcaacatcctttattatttgattcatttgagttaacagtggtgttagtgatagatttttctattcttttcccttgacgtttactttcaagtaacacaaactcttccatcaggccatgatctataggacctcctaatgagagtatctgggtgattgtgaccccaaaccatctctccaaagcattaatatccaatcatgcgctgtatgttttaatcagcagaagcatgtttttatgtttgtacaaaagaagattgttatgggtggggatggaggtatagaccatgcatggtcaccttcaagctactttaataaaggatcttaaaatgggcaggaggactgtgaacaagacaccctaataatgggttgatgtctgaagtagcaaatcttctggaaacgcaaactcttttaaggaagtccctaatttagaaacacccacaaacttcacatatcataattagcaaacaattggaaggaagttgcttgaatgttggggagaggaaaatctattggctctcgtgggtctcttcatctcagaaatgccaatcaggtcaaggtttgctacattttgtatgtgtgtgatgcttctcccaaaggtatattaactatataagagagttgtgacaaaacagaatgataaagctgcgaaccgtggcacacgctcatagttctagctgcttgggaggttgaggagggaggatggcttgaacacaggtgttcaaggccagcctgggcaacataacaagatcctgtctctcaaaaaaaaaaaaaaaaaaaagaaagagagagggccgggcgtggtggctcacgcctgtaatcccagcactttgggaggccgagccgggcggatcacctgtggtcaggagtttgagaccagcctggccaacatggcaaaaccccgtctgtactcaaaatgcaaaaattagccaggcgtggtagcaggcacctgtaatcccagctacttgggaggctgaggcaggagaatcgcttgaacccaggaggtggaggttgcagtaagctgagatcgtgccgttgcactccagcctgggcgacaagagcaagactctgtctcagaaaaaaaaaaaaaaaagagagagagagagaaagagaacaatatttgggagagaaggatggggaagcattgcaaggaaattgtgctttatccaacaaaatgtaaggagccaataagggatccctatttgtctcttttggtgtctatttgtccctaacaactgtctttgacagtgagaaaaatattcagaataaccatatccctgtgccgttattacctagcaacccttgcaatgaagatgagcagatccacaggaaaacttgaatgcacaactgtcttattttaatcttattgtacataagtttgtaaaagagttaaaaattgttacttcatgtattcatttatattttatattattttgcgtctaatgattttttattaacatgatttccttttctgatatattgaaatggagtctcaaagcttcataaatttataactttagaaatgattctaataacaacgtatgtaattgtaacattgcagtaatggtgctacgaagccatttctcttgatttttagtaaacttttatgacagcaaatttgcttctggctcactttcaatcagttaaataaatgataaataattttggaagctgtgaagataaaataccaaataaaataatataaaagtgatttatatgaagttaaaataaaaaatcagtatgatggaataaacttg

SEQ ID NO: 9250 - protein, 198 aa, Homo sapiens [sequence omitted]

SEQ ID NO: 9251 - DNA, 1812 bp, Homo sapiens
tgtcagactaagacagagaaccatcattaattgaagtgagatttttctggcctgagacttgcagggaggcaagaagacactctggacaccactatggacagcctcttgatgaaccggaggaagtttctttaccaattcaaaaatgtccgctgggctaagggtcggcgtgagacctacctgtgctacgtagtgaagaggcgtgacagtgctacatccttttcactggactttggttatcttcgcaataagaacggctgccacgtggaattgctcttcctccgctacatctcggactgggacctagaccctggccgctgctaccgcgtcacctggttcacctcctggagcccctgctacgactgtgcccgacatgtggccgactttctgcgagggaaccccaacctcagtctgaggatcttcaccgcgcgcctctacttctgtgaggaccgcaaggctgagcccgaggggctgcggcggctgcaccgcgccggggtgcaaatagccatcatgaccttcaaagattatttttactgctggaatacttttgtagaaaaccacgaaagaactttcaaagcctgggaagggctgcatgaaaattcagttcgtctctccagacagcttcggcgcatccttttgcccctgtatgaggttgatgacttacgagacgcatttcgtactttgggactttgatagcaacttccaggaatgtcacacacgatgaaatatctctgctgaagacagtggataaaaaacagtccttcaagtcttctctgtttttattcttcaactctcactttcttagagtttacagaaaaaatatttatatacgactctttaaaaagatctatgtcttgaaaatagagaaggaacacaggtctggccagggacgtgctgcaattggtgcagttttgaatgcaacattgtcccctactgggaataacagaactgcaggacctgggagcatcctaaagtgtcaacgtttttctatgacttttaggtaggatgagagcagaaggtagatcctaaaaagcatggtgagaggatcaaatgtttttatatcaacatcctttattatttgattcatttgagttaacagtggtgttagtgatagatttttctattcttttcccttgacgtttactttcaagtaacacaaactcttccatcaggccatgatctataggacctcctaatgagagtatctgggtgattgtgaccccaaaccatctctccaaagcattaatatccaatcatgcgctgtatgttttaatcagcagaagcatgtttttatgtttgtacaaaagaagattgttatgggtggggatggaggtatagaccatgcatggtcaccttcaagctactttaataaaggatcttaaaatgggcaggaggactgtgaacaagacaccctaataatgggttgatgtctgaagtagcaaatcttctggaaacgcaaactcttttaaggaagtccctaatttagaaacacccacaaacttcacatatcataattagcaaacaattggaaggaagttgcttgaatgttggggagaggaaaatctattggctctcgtgggtctcttcatctcagaaatgccaatcaggtcaaggtttgctacattttgtatgtgtgtgatgcttctcccaaaggtatattaactatataagagagttgtgacaaaacagaatgataaagctgcgaaccgtggcacacgctcatagttctagctgcttgggaggttgaggagggaggatggcttgaacacaggtgttcaaggccagcctgggcaacataacaagatcctgtctctc

SEQ ID NO: 9252 - protein, 198 aa, Homo sapiens [sequence omitted]

SEQ ID NO: 9253 - DNA, 741 bp, Homo sapiens
tgcagggaggcaagaagacactctggacaccactatggacagcctcttgatgaaccggaggaagtttctttaccaattcaaaaatgtccgctgggctaagggtcggcgtgagacctacctgtgctacgtagtgaagaggcgtgacagtgctacatccttttcactggactttggttatcttcgcaataagaacggctgccacgtggaattgctcttcctccgctacatctcggactgggacctagaccctggccgctgctaccgcgtcacctggttcacctcctggagcccctgctacgactgtgcccgacatgtggccgactttctgcgagggaaccccaacctcagtctgaggatcttcaccgcgcgcctctacttctgtgaggaccgcaaggctgagcccgaggggctgcggcggctgcaccgcgccggggtgcaaatagccatcatgaccttcaaaggtgcgaaagggccttccgcgcaggcgcagtgcagcagcccgcattcgggattgcgatgcggaatgaatgagttagtggggaagctcgaggggaagaagtgggcggggattctggttcacctctggagccgaaattaaagattagaagcagagaaaagagtgaatggctcagagacaaggccccgaggaaatgagaaaatggggccagggttgcttctttcccctcgatttggaacctgaactgtcttctacccccatatccccgcctttttttccttttt

SEQ ID NO: 9254 - protein, 187 aa, Homo sapiens
MDSLLMNRRKFLYQFKNVRWAKGRRETYLCYVVKRRDSATSFSLDFGYLRNKNGCHVELLFLRYISDWDLDPGRCYRVTWFTSWSPCYDCARHVADFLRGNPNLSLRIFTARLYFCEDRKAEPEGLRRLHRAGVQIAIMTFKGAKGPSAQAQCSSPHSGLRCGMNELVGKLEGKKWAGILVHLWSRN

SEQ ID NO: 9255 - DNA, 2779 bp, Homo sapiens
tggctttcttgctctccctcatctcattgtttcagcggaggccaaatctgaagtcctttccagggagtggctctgttcatcttattcgccagccaaagtaggaacagcgtaagaggagagagacacattcagcagccaaaggactcggtggaaagagcagaacaccatagacaatatgtcgctcttgggacccaaggtgctgctgtttcttgctgcattcatcatcacctctgacgatgtgactcaagcgactccagaaacattcacagaagatcctaatctggtgaatgatcccgctacagatgaaacagttttggctgttttggctgatattgcaccttccacagatgacttggagtgctgggatgagaaatttacctgcacaaggctctactctgtgcatcggccggttaaacaatgcattcatcagttatgcttcaccagtttacgacgtatgtacatcgtcaacaaggagatctgctctcgtcttgtctgtaaggaacacgaagctatgaaagatgagctttgccgtcagatggctggtctgccccctaggagactccgtcgctccaattacttccgacttcctccctgtgaaaatgtggatttgcagagacccaatggtctgtgatcattgaaaaagaggaaagaagaaaaaatgtatgggtgagaggaaggaggatctccttcttctccaaccattgacagctaacccttagacagtatttcttaaaccaatccttttgcaatgtccagcttttacccctactctctactttttcacccaaactgataacatttatctcattttctagcacttaaaatacaaagtctatattattgcataattttgctgcttctcaatatcatagacacagtgaatagatgatgactatatggcttatatacaaacattctatgtacaatttcaagggagactaaactttaggctaataatctttactattgaatctgtctgatatagatcttagggttgaagaagctatctttgtctatttgggctaaccatagaatttcatttattttcctcacaatattttcctagaccaactccccatcattcacgtgttcctctttactcttactttaactattttgctggcttgcccgaaaatttgcctggcaagtcttccttataagacacatcatggtaagttttgtagtcctgtaagattctgcaacacagtcaagaattatacaatcctactagcaatatataaggacccaaaatgtcttctgctaagctcagaggctggggctaaagcatgaggactatgccagctatagaacttggactcataattcgctatccaatttttcatgcagttgtctagtcgggaagtaaggttggaaactaagtctcatttactgattcgtttatgggtagtaccgggatgaacccaccaccacaaagcaaattagacaacttaatgtgaaatcataccattggttgacgtttccttgagttgctacttcgttcatcttcacaacttaacaagtgcacggtcgaattattgtgcaagtggcttttggatatcctgattggggcctaagaagggcattcagacttgaattttaataggcagacagaaagtttgcctaatagttaatacgaaagagtgaaagaaacacaatattcagacaacccacattcttatcctggctctagcagtaaccacgtagccttggataagccattttccttcattaggtcctggtttaatttcctcatctttaaaatgagaaggttaaatttatcttagtactgctgggcgcagtggctcatgcctgtaatctgagcactttgggaagctgaggcgggtggatcacttgaggtcagaaatttgagacgagcctggccaacatggtgaaaccccatctctactaaaaatacaaaaattagctgggcgtggtggcacgtgcctgtaatcccagctactcgggaggctgaggcaggagaatcaattgaacctgggaggcagaggttgcagtgagccgagatggcgccattgcactccagcctgggtgacaaaagcaaaagtccatcttaagaaatatatatatatattatatatattcttagttctaagatttcctttaattctatgattctctggatttaaatgcattattcatatttcttgaagcttagatacagtctaattcatagcaaccatatctgctttatcctaggtgagggtagcagtccacaatggaatagaagaaaatcccattataacaaatgacaaattatatatcatgaatccttctgtctgactaactcaataactttctataaaagccaatggaattcaaataggagctaggagacaacaagttatatatgacagtggaggttgtattccttttatattgctgagaaaactagttaaatgatcagattcttgctgttaagaaacaatttcgtttaatgggatctgtacaactgattttaaaaaaatgctacaaaaagccccaaagcatataatctctactccttacagtctctagaattaaatgtactcatttagacaacatattaaatgcatattttagccactttagagaaacctcataggcacagagtttccaagattaattttaagaatatcttcacgaacttgaccctcctactccacattgcaacatttccatcagacagcatttcaattccagtattatgtatattgcaaattaaacattttaaaatatttttttccaatttatttctcaaaataaaatgtcttttgttctggtt

SEQ ID NO: 9256 - protein, 151 aa, Homo sapiens
MSLLGPKVLLFLAAFIITSDDVTQATPETFTEDPNLVNDPATDETVLAVLADIAPSTDDLECWDEKFTCTRLYSVHRPVKQCIHQLCFTSLRRMYIVNKEICSRLVCKEHEAMKDELCRQMAGLPPRRLRRSNYFRLPPCENVDLQRPNGL

SEQ ID NO: 9257 - DNA, 2911 bp, Homo sapiens
attgtaacacacattctacgcctagcctggctttcttgctctccctcatctcattgtttcagcggaggccaaatctgaagtcctttccagggagtggctctgttcatcttattcgccagccaaagtaggaacagcgtaagaggagagagacacattcagcagccaaaggactcggtggaaagagcagaacaccatagacaatatgtcgctcttgggacccaaggtgctgctgtttcttgctgcattcatcatcacctctgactggatacccctgggggtcaatagtcaacgaggagacgatgtgactcaagcgactccagaaacattcacagaagatcctaatctggtgaatgatcccgctacagatgaaacagttttggctgttttggctgatattgcaccttccacagatgacttggagtgctgggatgagaaatttacctgcacaaggctctactctgtgcatcggccggttaaacaatgcattcatcagttatgcttcaccagtttacgacgtatgtacatcgtcaacaaggagatctgctctcgtcttgtctgtaaggaacacgaagctatgaaagatccatgattagaagaattggcagctggatatataaaggaaactaacatttactgctcacctgtgctagatgagctttgccgtcagatggctggtctgccccctaggagactccgtcgctccaattacttccgacttcctccctgtgaaaatgtggatttgcagagacccaatggtctgtgatcattgaaaaagaggaaagaagaaaaaatgtatgggtgagaggaaggaggatctccttcttctccaaccattgacagctaacccttagacagtatttcttaaaccaatccttttgcaatgtccagcttttacccctactctctactttttcacccaaactgataacatttatctcattttctagcacttaaaatacaaagtctatattattgcataattttgctgcttctcaatatcatagacacagtgaatagatgatgactatatggcttatatacaaacattctatgtacaatttcaagggagactaaactttaggctaataatctttactattgaatctgtctgatatagatcttagggttgaagaagctatctttgtctatttgggctaaccatagaatttcatttattttcctcacaatattttcctagaccaactccccatcattcacgtgttcctctttactcttactttaactattttgctggcttgcccgaaaatttgcctggcaagtcttccttataagacacatcatggtaagttttgtagtcctgtaagattctgcaacacagtcaagaattatacaatcctactagcaatatataaggacccaaaatgtcttctgctaagctcagaggctggggctaaagcatgaggactatgccagctatagaacttggactcataattcgctatccaatttttcatgcagttgtctagtcgggaagtaaggttggaaactaagtctcatttactgattcgtttatgggtagtaccgggatgaacccaccaccacaaagcaaattagacaacttaatgtgaaatcataccattggttgacgtttccttgagttgctacttcgttcatcttcacaacttaacaagtgcacggtcgaattattgtgcaagtggcttttggatatcctgattggggcctaagaagggcattcagacttgaattttaataggcagacagaaagtttgcctaatagttaatacgaaagagtgaaagaaacacaatattcagacaacccacattcttatcctggctctagcagtaaccacgtagccttggataagccattttccttcattaggtcctggtttaatttcctcatctttaaaatgagaaggttaaatttatcttagtactgctgggcgcagtggctcatgcctgtaatctgagcactttgggaagctgaggcgggtggatcacttgaggtcagaaatttgagacgagcctggccaacatggtgaaaccccatctctactaaaaatacaaaaattagctgggcgtggtggcacgtgcctgtaatcccagctactcgggaggctgaggcaggagaatcaattgaacctgggaggcagaggttgcagtgagccgagatggcgccattgcactccagcctgggtgacaaaagcaaaagtccatcttaagaaatatatatatatattatatatattcttagttctaagatttcctttaattctatgattctctggatttaaatgcattattcatatttcttgaagcttagatacagtctaattcatagcaaccatatctgctttatcctaggtgagggtagcagtccacaatggaatagaagaaaatcccattataacaaatgacaaattatatatcatgaatccttctgtctgactaactcaataactttctataaaagccaatggaattcaaataggagctaggagacaacaagttatatatgacagtggaggttgtattccttttatattgctgagaaaactagttaaatgatcagattcttgctgttaagaaacaatttcgtttaatgggatctgtacaactgattttaaaaaaatgctacaaaaagccccaaagcatataatctctactccttacagtctctagaattaaatgtactcatttagacaacatattaaatgcatattttagccactttagagaaacctcataggcacagagtttccaagattaattttaagaatatcttcacgaacttgaccctcctactccacattgcaacatttccatcagacagcatttcaattccagtattatgtatattgcaaattaaacattttaaaatatttttttccaatttatttctcaaaataaaatgtcttttgttctggtt

SEQ ID NO: 9258 - protein, 128 aa, Homo sapiens
MSLLGPKVLLFLAAFIITSDWIPLGVNSQRGDDVTQATPETFTEDPNLVNDPATDETVLAVLADIAPSTDDLECWDEKFTCTRLYSVHRPVKQCIHQLCFTSLRRMYIVNKEICSRLVCKEHEAMKDP

SEQ ID NO: 9259 - DNA, 2842 bp, Homo sapiens
attgtaacacacattctacgcctagcctggctttcttgctctccctcatctcattgtttcagcggaggccaaatctgaagtcctttccagggagtggctctgttcatcttattcgccagccaaagtaggaacagcgtaagaggagagagacacattcagcagccaaaggactcggtggaaagagcagaacaccatagacaatatgtcgctcttgggacccaaggtgctgctgtttcttgctgcattcatcatcacctctgactggatacccctgggggtcaatagtcaacgaggagacgatgtgactcaagcgactccagaaacattcacagaagatcctaatctggtgaatgatcccgctacagatgaaacagttttggctgttttggctgatattgcaccttccacagatgacttggagtgctgggatgagaaatttacctgcacaaggctctactctgtgcatcggccggttaaacaatgcattcatcagttatgcttcaccagtttacgacgtatgtacatcgtcaacaaggagatctgctctcgtcttgtctgtaaggaacacgaagctatgaaagatgagctttgccgtcagatggctggtctgccccctaggagactccgtcgctccaattacttccgacttcctccctgtgaaaatgtggatttgcagagacccaatggtctgtgatcattgaaaaagaggaaagaagaaaaaatgtatgggtgagaggaaggaggatctccttcttctccaaccattgacagctaacccttagacagtatttcttaaaccaatccttttgcaatgtccagcttttacccctactctctactttttcacccaaactgataacatttatctcattttctagcacttaaaatacaaagtctatattattgcataattttgctgcttctcaatatcatagacacagtgaatagatgatgactatatggcttatatacaaacattctatgtacaatttcaagggagactaaactttaggctaataatctttactattgaatctgtctgatatagatcttagggttgaagaagctatctttgtctatttgggctaaccatagaatttcatttattttcctcacaatattttcctagaccaactccccatcattcacgtgttcctctttactcttactttaactattttgctggcttgcccgaaaatttgcctggcaagtcttccttataagacacatcatggtaagttttgtagtcctgtaagattctgcaacacagtcaagaattatacaatcctactagcaatatataaggacccaaaatgtcttctgctaagctcagaggctggggctaaagcatgaggactatgccagctatagaacttggactcataattcgctatccaatttttcatgcagttgtctagtcgggaagtaaggttggaaactaagtctcatttactgattcgtttatgggtagtaccgggatgaacccaccaccacaaagcaaattagacaacttaatgtgaaatcataccattggttgacgtttccttgagttgctacttcgttcatcttcacaacttaacaagtgcacggtcgaattattgtgcaagtggcttttggatatcctgattggggcctaagaagggcattcagacttgaattttaataggcagacagaaagtttgcctaatagttaatacgaaagagtgaaagaaacacaatattcagacaacccacattcttatcctggctctagcagtaaccacgtagccttggataagccattttccttcattaggtcctggtttaatttcctcatctttaaaatgagaaggttaaatttatcttagtactgctgggcgcagtggctcatgcctgtaatctgagcactttgggaagctgaggcgggtggatcacttgaggtcagaaatttgagacgagcctggccaacatggtgaaaccccatctctactaaaaatacaaaaattagctgggcgtggtggcacgtgcctgtaatcccagctactcgggaggctgaggcaggagaatcaattgaacctgggaggcagaggttgcagtgagccgagatggcgccattgcactccagcctgggtgacaaaagcaaaagtccatcttaagaaatatatatatatattatatatattcttagttctaagatttcctttaattctatgattctctggatttaaatgcattattcatatttcttgaagcttagatacagtctaattcatagcaaccatatctgctttatcctaggtgagggtagcagtccacaatggaatagaagaaaatcccattataacaaatgacaaattatatatcatgaatccttctgtctgactaactcaataactttctataaaagccaatggaattcaaataggagctaggagacaacaagttatatatgacagtggaggttgtattccttttatattgctgagaaaactagttaaatgatcagattcttgctgttaagaaacaatttcgtttaatgggatctgtacaactgattttaaaaaaatgctacaaaaagccccaaagcatataatctctactccttacagtctctagaattaaatgtactcatttagacaacatattaaatgcatattttagccactttagagaaacctcataggcacagagtttccaagattaattttaagaatatcttcacgaacttgaccctcctactccacattgcaacatttccatcagacagcatttcaattccagtattatgtatattgcaaattaaacattttaaaatatttttttccaatttatttctcaaaataaaatgtcttttgttctggtt

SEQ ID NO: 9260 - protein, 163 aa, Homo sapiens
MSLLGPKVLLFLAAFIITSDWIPLGVNSQRGDDVTQATPETFTEDPNLVNDPATDETVLAVLADIAPSTDDLECWDEKFTCTRLYSVHRPVKQCIHQLCFTSLRRMYIVNKEICSRLVCKEHEAMKDELCRQMAGLPPRRLRRSNYFRLPPCENVDLQRPNGL

SEQ ID NO: 9261 - DNA, 2883 bp, Homo sapiens
attccagcctcattgtaacacacattctacgcctagcctggctttcttgctctccctcatctcattgtttcagcggaggccaaatctgaagtcctttccagggagtggctctgttcatcttattcgccagccaaagtaggaacagcgtaagaggagagagacacattcagcagccaaaggactcggtggaaagagcagaacaccatagacaatatgtcgctcttgggacccaaggtgctgctgtttcttgctgcattcatcatcacctctgactggatacccctgggggtcaatagtcaacgaggagacgatgtgactcaagcgactccagaaacattcacagaagatcctaatctggtgaatgatcccgctacagatgaaacagttttggctgttttggctgatattgcaccttccacagatgacttggcctccctcagtgaaaaaaataccactgcagagtgctgggatgagaaatttacctgcacaaggctctactctgtgcatcggccggttaaacaatgcattcatcagttatgcttcaccagtttacgacgtatgtacatcgtcaacaaggagatctgctctcgtcttgtctgtaaggaacacgaagctatgaaagatgagctttgccgtcagatggctggtctgccccctaggagactccgtcgctccaattacttccgacttcctccctgtgaaaatgtggatttgcagagacccaatggtctgtgatcattgaaaaagaggaaagaagaaaaaatgtatgggtgagaggaaggaggatctccttcttctccaaccattgacagctaacccttagacagtatttcttaaaccaatccttttgcaatgtccagcttttacccctactctctactttttcacccaaactgataacatttatctcattttctagcacttaaaatacaaagtctatattattgcataattttgctgcttctcaatatcatagacacagtgaatagatgatgactatatggcttatatacaaacattctatgtacaatttcaagggagactaaactttaggctaataatctttactattgaatctgtctgatatagatcttagggttgaagaagctatctttgtctatttgggctaaccatagaatttcatttattttcctcacaatattttcctagaccaactccccatcattcacgtgttcctctttactcttactttaactattttgctggcttgcccgaaaatttgcctggcaagtcttccttataagacacatcatggtaagttttgtagtcctgtaagattctgcaacacagtcaagaattatacaatcctactagcaatatataaggacccaaaatgtcttctgctaagctcagaggctggggctaaagcatgaggactatgccagctatagaacttggactcataattcgctatccaatttttcatgcagttgtctagtcgggaagtaaggttggaaactaagtctcatttactgattcgtttatgggtagtaccgggatgaacccaccaccacaaagcaaattagacaacttaatgtgaaatcataccattggttgacgtttccttgagttgctacttcgttcatcttcacaacttaacaagtgcacggtcgaattattgtgcaagtggcttttggatatcctgattggggcctaagaagggcattcagacttgaattttaataggcagacagaaagtttgcctaatagttaatacgaaagagtgaaagaaacacaatattcagacaacccacattcttatcctggctctagcagtaaccacgtagccttggataagccattttccttcattaggtcctggtttaatttcctcatctttaaaatgagaaggttaaatttatcttagtactgctgggcgcagtggctcatgcctgtaatctgagcactttgggaagctgaggcgggtggatcacttgaggtcagaaatttgagacgagcctggccaacatggtgaaaccccatctctactaaaaatacaaaaattagctgggcgtggtggcacgtgcctgtaatcccagctactcgggaggctgaggcaggagaatcaattgaacctgggaggcagaggttgcagtgagccgagatggcgccattgcactccagcctgggtgacaaaagcaaaagtccatcttaagaaatatatatatatattatatatattcttagttctaagatttcctttaattctatgattctctggatttaaatgcattattcatatttcttgaagcttagatacagtctaattcatagcaaccatatctgctttatcctaggtgagggtagcagtccacaatggaatagaagaaaatcccattataacaaatgacaaattatatatcatgaatccttctgtctgactaactcaataactttctataaaagccaatggaattcaaataggagctaggagacaacaagttatatatgacagtggaggttgtattccttttatattgctgagaaaactagttaaatgatcagattcttgctgttaagaaacaatttcgtttaatgggatctgtacaactgattttaaaaaaatgctacaaaaagccccaaagcatataatctctactccttacagtctctagaattaaatgtactcatttagacaacatattaaatgcatattttagccactttagagaaacctcataggcacagagtttccaagattaattttaagaatatcttcacgaacttgaccctcctactccacattgcaacatttccatcagacagcatttcaattccagtattatgtatattgcaaattaaacattttaaaatatttttttccaatttatttctcaaaataaaatgtcttttgttctggtt

SEQ ID NO: 9262 - protein, 173 aa, Homo sapiens; identical to SEQ ID NO: 1410

SEQ ID NO: 9263 - DNA, 2855 bp, Homo sapiens
atttggaatgagggtgtgagcaactgcaaattcccatctcccttctcattccagcctcattgtaacacacattctacgcctagcctggctttcttgctctccctcatctcattgtttcagcggaggccaaatctgaagtcctttccagggagtggctctgttcatcttattcgccagccaaagtaggaacagcgtaagaggagagagacacattcagcagccaaaggactcggtggaaagagcagaacaccatagacaatatgtcgctcttgggacccaaggtgctgctgtttcttgctgcattcatcatcacctctgactggatacccctgggggtcaatagtcaacgaggagacgatgtgactcaagcgactccagaaacattcacagaagatcctaatctggtgaatgatcccgctacagatgaaacagagtgctgggatgagaaatttacctgcacaaggctctactctgtgcatcggccggttaaacaatgcattcatcagttatgcttcaccagtttacgacgtatgtacatcgtcaacaaggagatctgctctcgtcttgtctgtaaggaacacgaagctatgaaagatgagctttgccgtcagatggctggtctgccccctaggagactccgtcgctccaattacttccgacttcctccctgtgaaaatgtggatttgcagagacccaatggtctgtgatcattgaaaaagaggaaagaagaaaaaatgtatgggtgagaggaaggaggatctccttcttctccaaccattgacagctaacccttagacagtatttcttaaaccaatccttttgcaatgtccagcttttacccctactctctactttttcacccaaactgataacatttatctcattttctagcacttaaaatacaaagtctatattattgcataattttgctgcttctcaatatcatagacacagtgaatagatgatgactatatggcttatatacaaacattctatgtacaatttcaagggagactaaactttaggctaataatctttactattgaatctgtctgatatagatcttagggttgaagaagctatctttgtctatttgggctaaccatagaatttcatttattttcctcacaatattttcctagaccaactccccatcattcacgtgttcctctttactcttactttaactattttgctggcttgcccgaaaatttgcctggcaagtcttccttataagacacatcatggtaagttttgtagtcctgtaagattctgcaacacagtcaagaattatacaatcctactagcaatatataaggacccaaaatgtcttctgctaagctcagaggctggggctaaagcatgaggactatgccagctatagaacttggactcataattcgctatccaatttttcatgcagttgtctagtcgggaagtaaggttggaaactaagtctcatttactgattcgtttatgggtagtaccgggatgaacccaccaccacaaagcaaattagacaacttaatgtgaaatcataccattggttgacgtttccttgagttgctacttcgttcatcttcacaacttaacaagtgcacggtcgaattattgtgcaagtggcttttggatatcctgattggggcctaagaagggcattcagacttgaattttaataggcagacagaaagtttgcctaatagttaatacgaaagagtgaaagaaacacaatattcagacaacccacattcttatcctggctctagcagtaaccacgtagccttggataagccattttccttcattaggtcctggtttaatttcctcatctttaaaatgagaaggttaaatttatcttagtactgctgggcgcagtggctcatgcctgtaatctgagcactttgggaagctgaggcgggtggatcacttgaggtcagaaatttgagacgagcctggccaacatggtgaaaccccatctctactaaaaatacaaaaattagctgggcgtggtggcacgtgcctgtaatcccagctactcgggaggctgaggcaggagaatcaattgaacctgggaggcagaggttgcagtgagccgagatggcgccattgcactccagcctgggtgacaaaagcaaaagtccatcttaagaaatatatatatatattatatatattcttagttctaagatttcctttaattctatgattctctggatttaaatgcattattcatatttcttgaagcttagatacagtctaattcatagcaaccatatctgctttatcctaggtgagggtagcagtccacaatggaatagaagaaaatcccattataacaaatgacaaattatatatcatgaatccttctgtctgactaactcaataactttctataaaagccaatggaattcaaataggagctaggagacaacaagttatatatgacagtggaggttgtattccttttatattgctgagaaaactagttaaatgatcagattcttgctgttaagaaacaatttcgtttaatgggatctgtacaactgattttaaaaaaatgctacaaaaagccccaaagcatataatctctactccttacagtctctagaattaaatgtactcatttagacaacatattaaatgcatattttagccactttagagaaacctcataggcacagagtttccaagattaattttaagaatatcttcacgaacttgaccctcctactccacattgcaacatttccatcagacagcatttcaattccagtattatgtatattgcaaattaaacattttaaaatatttttttccaatttatttctcaaaataaaatgtcttttgttctggtt

SEQ ID NO: 9264 - protein, 148 aa, Homo sapiens
MSLLGPKVLLFLAAFIITSDWIPLGVNSQRGDDVTQATPETFTEDPNLVNDPATDETECWDEKFTCTRLYSVHRPVKQCIHQLCFTSLRRMYIVNKEICSRLVCKEHEAMKDELCRQMAGLPPRRLRRSNYFRLPPCENVDLQRPNGL

SEQ ID NO: 9265 - DNA, 1124 bp, Homo sapiens
attgtaacacacattctacgcctagcctggctttcttgctctccctcatctcattgtttcagcggaggccaaatctgaagtcctttccagggagtggctctgttcatcttattcgccagccaaagtaggaacagcgtaagaggagagagacacattcagcagccaaaggactcggtggaaagagcagaacaccatagacaatatgtcgctcttgggacccaaggtgctgctgtttcttgctgcattcatcatcacctctgactggatacccctgggggtcaatagtcaacgaggagacgatgtgactcaagcgactccagaaacattcacagaagatcctaatctggtgaatgatcccgctacagatgaaacagttttggctgttttggctgatattgcaccttccacagatgacttggcctccctcagtgaaaaaaataccactgcagagtgctgggatgagaaatttacctgcacaaggctctactctgtgcatcggccggttaaacaatgcattcatcagttatgcttcaccagtttacgacgtatgtacatcgtcaacaaggagatctgctctcgtcttgtctgtaaggaacacgaagctatgaaagatgagctttgccgtcagatggctggtctgccccctaggagactccgtcgctccaattacttccgacttcctccctgtgaaaatgtggatttgcagagacccaatggtctgtgatcattgaaaaagaggaaagaagaaaaaatgtatgggtgagaggaaggaggatctccttcttctccaaccattgacagctaacccttagacagtatttcttaaaccaatccttttgcaatgtccagcttttacccctactccttacagtctctagaattaaatgtactcatttagacaacatattaaatgcatattttagccactttagagaaacctcataggcacagagtttccaagattaattttaagaatatcttcacgaacttgaccctcctactccacattgcaacatttccatcagacagcatttcaattccagtattatgtatattgcaaattaaacattttaaaatatttttttccaatttatttctcaaaataaaatgtcttttgttctggt

SEQ ID NO: 9266 - protein, 173 aa, Homo sapiens; identical to SEQ ID NO: 1410

SEQ ID NO: 9267 - DNA, 939 bp, Homo sapiens
attgtaacacacattctacgcctagcctggctttcttgctctccctcatctcattgtttcagcggaggccaaatctgaagtcctttccagggagtggctctgttcatcttattcgccagccaaagtaggaacagcgtaagaggagagagacacattcagcagccaaaggactcggtggaaagagcagaacaccatagacaatatgtcgctcttgggacccaaggtgctgctgtttcttgctgcattcatcatcacctctgactggatacccctgggggtcaatagtcaacgaggagacgatgtgactcaagcgactccagaaacattcacagaagatcctaatctggtgaatgatcccgctacagatgaaacagttttggctgttttggctgatattgcaccttccacagatgacttggcctccctcagtgaaaaaaataccactgcagagtgctgggatgagaaatttacctgcacaaggctctactctgtgcatcggccggttaaacaatgcattcatcagttatgcttcaccagtttacgacgtatgtacatcgtcaacaaggagatctgctctcgtcttgtctgtaaggaacacgaagctatgaaagatgagctttgccgtcagatggctggtctgccccctaggagactccgtcgctccaattacttccgacttcctccctgtgaaaatgtggatttgcagagacccaatggtctgtgatcattgaaaaagaggaaagaagaaaaaatgtatgggtgagaggaaggaggatctccttcttctccaaccattgacagctaacccttagacagtatttcttaaaccaatccttttgcaatgtccagcttttacccctactctctactttttcacccaaactgataacatttatctcattttctagcacttaaaatacaaagtctatattattgcat

SEQ ID NO: 9268 - protein, 173 aa, Homo sapiens; identical to SEQ ID NO: 1410

SEQ ID NO: 9269 - DNA, 978 bp, Homo sapiens
attgtaacacacattctacgcctagcctggctttcttgctctccctcatctcattgtttcagcggaggccaaatctgaagtcctttccagggagtggctctgttcatcttattcgccagccaaagtaggaacagcgtaagaggagagagacacattcagcagccaaaggactcggtggaaagagcagaacaccatagacaatatgtcgctcttgggacccaaggtgctgctgtttcttgctgcattcatcatcacctctgactggatacccctgggggtcaatagtcaacgaggagacgatgtgactcaagcgactccagaaacattcacagaagatcctaatctggtgaatgatcccgctacagatgaaacagttttggctgttttggctgatattgcaccttccacagatgacttggagtgctgggatgagaaatttacctgcacaaggctctactctgtgcatcggccggttaaacaatgcattcatcagttatgcttcaccagtttacgacgtatgtacatcgtcaacaaggagatctgctctcgtcttgtctgtaaggaacacgaagctatgaaagatccatgattagaagaattggcagctggatatataaaggaaactaacatttactgctcacctgtgctagatgagctttgccgtcagatggctggtctgccccctaggagactccgtcgctccaattacttccgacttcctccctgtgaaaatgtggatttgcagagacccaatggtctgtgatcattgaaaaagaggaaagaagaaaaaatgtatgggtgagaggaaggaggatctccttcttctccaaccattgacagctaacccttagacagtatttcttaaaccaatccttttgcaatgtccagcttttacccctactctctactttttcacccaaactgataacatttatctcattttctagcacttaaaatacaaagtctatattattgcat

SEQ ID NO: 9270 - protein, 128 aa, Homo sapiens; identical to SEQ ID NO: 9258

SEQ ID NO: 9271 - DNA, 909 bp, Homo sapiens
attgtaacacacattctacgcctagcctggctttcttgctctccctcatctcattgtttcagcggaggccaaatctgaagtcctttccagggagtggctctgttcatcttattcgccagccaaagtaggaacagcgtaagaggagagagacacattcagcagccaaaggactcggtggaaagagcagaacaccatagacaatatgtcgctcttgggacccaaggtgctgctgtttcttgctgcattcatcatcacctctgactggatacccctgggggtcaatagtcaacgaggagacgatgtgactcaagcgactccagaaacattcacagaagatcctaatctggtgaatgatcccgctacagatgaaacagttttggctgttttggctgatattgcaccttccacagatgacttggagtgctgggatgagaaatttacctgcacaaggctctactctgtgcatcggccggttaaacaatgcattcatcagttatgcttcaccagtttacgacgtatgtacatcgtcaacaaggagatctgctctcgtcttgtctgtaaggaacacgaagctatgaaagatgagctttgccgtcagatggctggtctgccccctaggagactccgtcgctccaattacttccgacttcctccctgtgaaaatgtggatttgcagagacccaatggtctgtgatcattgaaaaagaggaaagaagaaaaaatgtatgggtgagaggaaggaggatctccttcttctccaaccattgacagctaacccttagacagtatttcttaaaccaatccttttgcaatgtccagcttttacccctactctctactttttcacccaaactgataacatttatctcattttctagcacttaaaatacaaagtctatattattgcat

SEQ ID NO: 9272 - protein, 163 aa, Homo sapiens; identical to SEQ ID NO: 9260

SEQ ID NO: 9273 - DNA, 479 bp, Homo sapiens
tagtggttcaaccactaaaacattcccgctttggattcaagagcaaacttgaattacagaaactcaagtctgaggaatggtggaccttgtatgccatagaaatatctgccatgctgtgagctgctttattaagatgcccaagtggcaaggcactgatgtctgtagccaaaagccagcaacccaaggcctgccaaaagccacgtgcatgaacttggaagtggatcttttctcaattgggccctgagatgatgacagcaccagctaacaccttgatgacagccttatgagataccctgagccaaaggtacccagctaagtcatgtttggattactaatcaacagaaacgttgggaaaataaatgtttttgttttaagctgttaaattttgggctagatagataactaatatgttgtataactacaatacaggattatttttatctattatataaatttaatatatatatatttgtaactat

SEQ ID NO: 9274 - protein, 55 aa, Homo sapiens
MVDLVCHRNICHAVSCFIKMPKWQGTDVCSQKPATQGLPKATCMNLEVDLFSIGP

SEQ ID NO: 9275 - DNA, 570 bp, Homo sapiens
actgaccttcgggaagcaggctggagagggggctggaaataaagctctataaaaactcatgaacagtgggtcttgatgagcttccgggtttatggattcgtgggctgcttccacctgctaggagggtggtgtactctaactcagggacagaagcccctgtctgtgctcaggactcttgcagacctctttacctggctgttcatcttccataatcaactggtagacgttacatccaagaggaaataatccaggcaaggaagcacaagctgatcaagatgtgtagttctgtggctgccaagttgtggtttttgacagatcgtcgcatcagggaagactatcctcaaaaagagattttacgagcattgaaggccaaatgttgtgaggaggaactggactttagggctgtggtgatggatgaggtggtgctgacaatcgagcaaggaaacctgggtaagtctgtatactaagtgatcttttggatttttacctagaatatgatgaatctgcatgttttaggaataattaggacagaggaattcttagccttgtcattactaagtatcttctaat

SEQ ID NO: 9276 - protein, 56 aa, Homo sapiens
MSFRVYGFVGCFHLLGGWCTLTQGQKPLSVLRTLADLFTWLFIFHNQLVDVTSKRK

SEQ ID NO: 9277 - DNA, 1683 bp, Homo sapiens
actgaccttcgggaagcaggctggagagggggctggaaataaagctctataaaaactcatgaacagtgggtcttgatgagcttccgggtttatggattcgtgggctgcttccacctgctaggagggtggtgtactctaactcagggacagaagcccctgtctgtgctcaggactcttgcagacctctttacctggctgttcatcttccataatcaactggtagacgttacatccaagaggaaataatccaggcaaggaagcacaagctgatcaagatgtgtagttctgtggctgccaagttgtggtttttgacagatcgtcgcatcagggaagactatcctcaaaaagagattttacgagcattgaaggccaaatgttgtgaggaggaactggactttagggctgtggtgatggatgaggtggtgctgacaatcgagcaaggaaacctgggtctgcggatcaatggagagctaatcactgcctacccacaagtggtggtagtcagagtaccaaccccttgggtgcaaagtgatagtgacatcactgttttgcgccatctagagaagatgggatgtcggttaatgaaccgacctcaagccatcctgaactgcgttaataagttctggacatttcaagagttggctggccatggtgttcctctgccggatactttctcttatggtggccacgaaaattttgctaaaatgattgatgaggctgaagttctggagttcccaatggtagtaaagaatacgcggggtcacagaggtaaagctgttttcttggctcgagataagcaccatttggctgatctaagccatcttattcgccatgaagcgccatacctgttccagaagtatgttaaagagtctcatggacgggatgtacgtgtcattgtcgtgggaggccgtgtggttggcaccatgttacgttgttcaacagatgggagaatgcaaagcaactgctcattaggtggtgtggggatgatgtgctcattgagtgaacaagggaagcagctagctatccaggtgtctaatatcctggggatggatgtgtgtggcattgatctgctgatgaaagatgacggctccttctgcgtctgtgaggccaatgcaaatccttttcaggagccaaaaaaacaaatacaaacaaacaaaaaaatacccagagaaaaaactttccttcttcccccttcctgatgatgagtgagaagtattgagaactttcggggtcagtgcccttctaaactccccttcccccaataatgcagctgtataatgaatggtaaatgcaccggtttggattcaggcacagccccagtctgcctacagcagacaactaaactggtaggtggcagcagaggaaggaattcttcagattgatggctactgacttaaagtctgcataggagaagagatagagcatgacataccaagtgaagcaagggggacaaaaatggaaacaggactaagattcctgcattttgactctaaatggttcttttgaagtaaccagtgatcttttttgcttaccctcatcaacagaatggatgaagatagatttgactgtgtgctttttcaagtggagaatatgaatatacagaacaagaaagcaataactccaacctgtttgattccgtctgttttctaaataaagacactatgcgctggaaataacatagca

SEQ ID NO: 9278 - protein, 307 aa, Homo sapiens; identical to SEQ ID NO: 1412

SEQ ID NO: 9279 - DNA, 5758 bp, Homo sapiens
gcaggcgagtgagggaacgaggagcggccgggtgtgagtgtgtgggagtgagagtgtgtgggagtggggtgagggagaagctgacgggacgcgaggctgtgagaaactgggcgagtgtgcgaggacgcccggccagcctgcgggagccgcagtcggcggaggagaaaggaggcggctcccggtatcccgaccccctccccctcctctccttcccccacttccagccgcccggcggcccgcgcttcctcgaaggccccagcccggctcagtcggccgagagcgagggaggagccccccgacccaggtgctggagtctgcttgtcagggaggggggcagtctgtgattctgagaacagagccaagaaggggaacagcaaattcagtcacagacaatcctccactcggtcaagagccacttttctcttcctgccttgcccccccgcagggggtaaggaactgagcgtttaatctttagccggttggctaccagctaaaattctacttatcttagtttctagtggatagctttcttattttgcccatgttttcttagaatccctgtttaatatacttttgtcagtagtagtatctaggagtagcagggagagtgacaataaattagccccttcttttttcccttgtcattcaggccccttttcctctccagagggaaattaccagtaaactcttctaaatcttccaccccttctcagtcatactgtgaagaaacacactaaagtggacattatttgaccagtgaacacgaacccagcttcaggcattggtttgttgtggcacatggagaaacatctcttttaaaatatctcccaattacccttttcacaatttgtatccacctaggatttgctgctggggtaagtcactagatttatttctcaaagctcccctctctatgagctgaaagactgaccaaccatgaacactagtaggggatggggaaaggggacagagcagagccagttgttccacactttgggaagcaggagtagcttttatcatcttcctctggggagcaggcatagagacataaactgagtgaaaatgggtggaggaagaacttctatacccacgaacaacatgtgaagagagagaaccaaacataaagtaaggagggtagacgttacatccaagaggaaataatccaggcaaggaagcacaagctgatcaagatgtgtagttctgtggctgccaagttgtggtttttgacagatcgtcgcatcagggaagactatcctcaaaaagagattttacgagcattgaaggccaaatgttgtgaggaggaactggactttagggctgtggtgatggatgaggtggtgctgacaatcgagcaaggaaacctgggtctgcggatcaatggagagctaatcactgcctacccacaagtggtggtagtcagagtaccaaccccttgggtgcaaagtgatagtgacatcactgttttgcgccatctagagaagatgggatgtcggttaatgaaccgacctcaagccatcctgaactgcgttaataagttctggacatttcaagagttggctggccatggtgttcctctgccggatactttctcttatggtggccacgaaaattttgctaaaatgattgatgaggctgaagttctggagttcccaatggtagtaaagaatacgcggggtcacagaggtaaagctgttttcttggctcgagataagcaccatttggctgatctaagccatcttattcgccatgaagcgccatacctgttccagaagtatgttaaagagtctcatggacgggatgtacgtgtcattgtcgtgggaggccgtgtggttggcaccatgttacgttgttcaacagatgggagaatgcaaagcaactgctcattaggtggtgtggggatgatgtgctcattgagtgaacaagggaagcagctagctatccaggtgtctaatatcctggggatggatgtgtgtggcattgatctgctgatgaaagatgacggctccttctgcgtctgtgaggccaatgcaaatgtaggtttcatcgcctttgataaggcttgtaatctagatgtagctggtatcatagcagactatgccgcctcccttctaccctctggccggctcacccggcgtatgtccctgctctccgtggtgtccactgccagtgagactagtgagccggagctgggtcccccagccagcactgctgttgacaacatgagtgcaagttccagctctgttgacagcgaccctgaaagcacggagcgagagctgctcaccaagctcccagggggcctgttcaacatgaaccagctgctagccaatgaaatcaaactactggtggactgactccactggtaattaaccaacaaaacccttgtaaaactttctttcttcttttctatttttaaaaccaacttgcaatgctgttcatggaggatgctcaggaagatgagagaaaattagtaggattagttggagagagtgggagatagatgagacctctgctagtaagatgttactttcatttacaaatcctacaaatagagaggcagaataggtggggtatagaaaaatgtcaggctctcatagttacccttttaaattgctaaaaaatgtgtatgctcataggccatgaggaacaaatactttttttttttcatggtcccttgcttttgtttttgtacaaaaaaaaatggttttgctacaaatatccaagtagcataacttcacattgtgttggaagatttgtcatcagtgaggaaaacatctgcataaattacaggaatttttgtattatacagctctgaaaattctgccatttccttattaactagcagctttagtttgtagtttatgaaatcttgaggggctcttttactgggatttcttatttttttgttttttcccgcttaatttggtgggaggtcaaattgaatataacccaataaaggcttcttaatgacaaaattggcatgtttgcatgatgaaatggaaatgaacagtattgcaatgtccggtatacaaaataacattaattcaatgtagataaaattacactagtttaaaatatgtgcattcacttgtatttgttagtgttttagtcttttttgaaagatgtgctctgttaatgttgcttttttttttttttttaatacatgctagtctaacatttcctgctctatgcctgcatctttaacaatggccaaagtgaagaaaatgctaccttttttgttaacaagacactgacttgaaacatgtacatttaaagccttttattttttccctttttgttttggtagttgggcatttaaataaggacaaggaaaaatatttttgggggcaaatcaagagcctatgagttctaagtataaagctgaagtgatttcgaatgccagcgttatatatttgcatttttcacattttacgagggagtatatgtgtatgtgtgtgcacgcatgcatgtgtatgtgttttgctttttgtttccatcaactaatcaaaaaggataatttagaaaatggagcatgatgggaaacagagtttttgactttaaaaaacagatgagttgttttcataagtagactccactggggtagaggtattcaccttaaaacatagggtgagtagatgcttttttaggcctttttgtgtatatgtacgttgtttgtttttttccttttgtttctagcctgttcagtgtacagtttattcaaggctacatgcttttctttaatgcttctggctatgcattttctctttttacatataggatttgggattgggggtgggttggatgtttttgtttggggacttatttagtagtattgagtctcttatagccctactcttaagccttcaatactgtccactctttatattcctttacttgcagaatttataaaagcccccaaactgcatataatatgagcctttaaaacatgggtaaaactaatcccattgatgggtttggatggtatgttaagaaatggagatgctgcagagcccaacgtaattttttaaacagcaagttttccatctccctacgaatcctctgaagcttttacccaagccctttcttgcctctccagtgctattttccttcagatggaccttaaacataatttcttggacactactagagagacttcgaggcaataataaaagatcagtattaaccagctataacagaggtttgatcatgcttacttgtacagtttttcccccgttttaaaaaggaatgtaataaaatttgttttttccatagaattaaataatattaaaattgagtgaaaggttgattgttgatgaatagaatagtacctctcatctgtgcagtgtctcatttcacctcagagaaaaggatacataagaggagtttgtaatttatcttaggatattctaattgcatttaaaagaacttatcttgcgcagggtaaatgggggactcacatacatatattaatacctctgactcattaacagaaagaaatacttggtacttctttcgctgaatgaccatactgtggaggatgcatactatttggtatagagaaataaatgaggaagaaagaactgcttaattaaattatcattcatatgttcatatagagaccatctggttgccatgtgtattatgacacatacactttgaatagttacatatcacaagtatgtagttcatgtttgtgttggtggggtaaggcatcaggaaaaatgtagttagtcttttcttaacttataccaaattaaccaactatattataggaaatatgtgaaattagttcattagctttattcactattatgcattcacatgatattaaaacgtacactcacatgttagaatgaaaagagcagtagttatcttagattttaaaaacatggatatcttcttgaattccttcaagattgaggtagagaataagagcaaatcattctggaagtaccttaaggaaacaaacagcagcagatatttaggttaaacttattttcataattgtttaataacttttgtataatcttcattgctattatgagagagaatgtatatatcaaatatgtgtaatgataaaatctgaattgtaaaatttttgtatattgttaaaattgtaattctaaattgtatttcaaaaatgattatttctgatattgtttttatgtcacccatgatgaaaactggactttatatatctaaacatacaagtatgaactattctatttaaaatttttaatagtttttttcttttttggtgcctataattgattggtcatttctgctggcttttctccaatgaacattgaaatcttcctgtatatgttaccaataagaaaactaccctggaacagtagaaaaacccaacaagagacttggcattcatcaagcacattatcagactttgagaacatattgaaggcattgactttgaaaatcatctctttttctcaagaagaaagcaatggagaagcaaatttgtttcattcagtgaatccccagtttggggcttgtggggcttagagacattgtgaaatcaaatcttgtgttatacttttctcctggctcactttttttgagaaggtttatgggctatttggctggtgagacacgatcccctcctaagaaaatgtaggtgctcagacaggtaaccactgctgctactgtttttatttgtttgtttgttcaattttatttaagatttgtttttgttgtactaggattttaaaaaatgtaatatattgcaggatttataaccagg

SEQ ID NO: 9280 - protein, 386 aa, Homo sapiens
MCSSVAAKLWFLTDRRIREDYPQKEILRALKAKCCEEELDFRAVVMDEVVLTIEQGNLGLRINGELITAYPQVVVVRVPTPWVQSDSDITVLRHLEKMGCRLMNRPQAILNCVNKFWTFQELAGHGVPLPDTFSYGGHENFAKMIDEAEVLEFPMVVKNTRGHRGKAVFLARDKHHLADLSHLIRHEAPYLFQKYVKESHGRDVRVIVVGGRVVGTMLRCSTDGRMQSNCSLGGVGMMCSLSEQGKQLAIQVSNILGMDVCGIDLLMKDDGSFCVCEANANVGFIAFDKACNLDVAGIIADYAASLLPSGRLTRRMSLLSVVSTASETSEPELGPPASTAVDNMSASSSSVDSDPESTERELLTKLPGGLFNMNQLLANEIKLLVD

SEQ ID NO: 9281 - DNA, 945 bp, Homo sapiens
attaatacctctgactcattaacagaaagaaatacttggtacttctttcgctgaatgaccatactgtggaggatgcatactatttggtatagagaaataaatgaggaagaaagaactgcttaattaaattatcattcatatgttcatatagagaccatctggttgccatgtgtattatgacacatacactttgaatagttacatatcacaagtatgtagttcatgtttgtgttggtggggtaaggcatcaggaaaaatgtagttagtcttttcttaacttataccaaattaaccaactatattataggaaatatgtgaaattagttcattagctttattcactattatgcattcacatgatattaaaacgtacactcacatgttagaatgaaaagagcagtagttatcttagattttaaaaacatggatatcttcttgaattccttcaagattgaggtagagaataagagcaaatcattctggaagtaccttaaggaaacaaacagcagcagatatttagaaaactaccctggaacagtagaaaaacccaacaagagacttggcattcatcaagcacattatcagactttgagaacatattgaaggcattgactttgaaaatcatctctttttctcaagaagaaagcaatggagaagcaaatttgtttcattcagtgaatccccagtttggggcttgtggggcttagagacattgtgaaatcaaatcttgtgttatacttttctcctggctcactttttttgagaaggtttatgggctatttggctggtgagacacgatcccctcctaagaaaatgtaggtgctcagacaggtaaccactgctgctactgtttttatttgtttgtttgttcaattttatttaagatttgtttttgttgtactaggattttaaaaaatgtaatatattgcaggatttataaccagg

SEQ ID NO: 9282 - protein, 71 aa, Homo sapiens
MKRAVVILDFKNMDIFLNSFKIEVENKSKSFWKYLKETNSSRYLENYPGTVEKPNKRLGIHQAHYQTLRTY

SEQ ID NO: 9283 - DNA, 2238 bp, Homo sapiens
acttcctaaagttttagttctgagcttttattattttgggatattgtcatctttctaataggtagaattttagtgaaagtaatcaggaccttttcaagatagacttctgcataatttcatcctgtggctttggacgtactatccaaagaggctgtacatccagcaagtcactagttagtgaataggaattcttggcgtgtaatgccatttcttgtagctgaaggaagacatgtgataagtgattaacctgttctgtgcttcagttgactcttataaggacagtcattccctttaagcatcttaagacaaaaatatttatctgttgaattggaatttactaacagagggaatttgaattggaatttacttccagctgcactcatgcaagaatttgtgatgtatactaaaaaataaaaaaaggctcattcaggagagccttgtactcagcaagagtggctaacattagagcatacagactatgtgattgtataaggcatggagagttaaacaacctccagtcagctgcctgtttgaataccactgacttgttaagaatgatcttgcttttagattttaccatattcaaacttattaggtgagccttatatagcatatatacctggctgctattgtggggtttgggaacatgaggggtggggtgaactgttgttgttttaggtttcagtcagacagacatccctgtgcctcagttcccagaagcacagcaggcctctaggagcatccgtgggaacggcgcagtcctgacatcaccaactctcctgctcaggctcatcccatatacagaggtcaaagggtggggtttgagatcgggggaaggaatgagaaagtagaagcaatgtcacttcagtgccactgttgactagtctttggtgcttatgtcagtatttgttttatttcctgatttttttaaagttggcaaaactacatatttttatcttgatgaaggcagtgggagggtggaacaaaaacaagccattactgctatttctagttcatttactggagactgtcccttaatagctaatgtagaataaatttgaaacatagacctagatgacaaaaagaatgggaatagaaatgaatctcaggatttgaacaaacagaagacgtttatgctgtgttgatgcccagttctacaactgctattacatttgtcattctgtctccccttttcccctaattcttttatgtatgtatgtatacagtttgaggaaatgtgcatctatggtcagtcctttttaaaagacttaatgaatttattactcttttgcaaaaaatatacccactgcttatatgggcatacaaatgctaccctattttaaatgtaggtggcgtatgtgttcgtgttttaatgtattcagagccattgggcaataagcagtccagaacattgaaaactcaagcaggtaaagcacctaacacccttagtttctagaattactttaaaaaacttttatattgctgcatcttccacagttctttgggtagtctctgaacttaaaatttgtaggagttgtagactacctaaatttttaagttatggtatttgttcataggttgtaggggtaggtaaagaaggaaacagacaagaaaatggcttcttgaggtggcagctgctgagtggctaaatcttaccactttctttctactttttttggaaattttcccagcttagcatgaacatggatcatacagtgtttgattttatgtgattgagatttttgttttttatttttggagggaaggtcttggagaaacattaaaaagttggtgtatgtgcaaaaatacgaaatgttaaacaaaggaattttttcttatttaatctgaatggtaagcaagaactttttctatatacccttctgctgcagcagacaactaaactggtaggtggcagcagaggaaggaattcttcagattgatggctactgacttaaagtctgcataggagaagagatagagcatgacataccaagtgaagcaagggggacaaaaatggaaacaggactaagattcctgcattttgactctaaatggttcttttgaagtaaccagtgatcttttttgcttaccctcatcaacagaatggatgaagatagatttgactgtgtgctttttcaagtggagaatatgaatatacagaacaagaaagcaataactccaacctgtttgattccgtctgttttctaaataaagacactatgcgctggaaataacata

SEQ ID NO: 9284 - protein, 52 aa, Homo sapiens [sequence omitted]

SEQ ID NO: 9285 - DNA, 1137 bp, Homo sapiens
gggaacatgaggggtggggtgaactgttgttgttttaggtttcagtcagacagacatccctgtgcctcagttcccagaagcacagcaggcctctaggagcatccgtgggaacggcgcagtcctgacatcaccaactctcctgctcaggctcatcccatatacagaggtcaaagggtggggtttgagatcgggggaaggaatgagaaagtagaagcaatgtcacttcagtgccactgttgactagtctttggtgcttatgtcagtatttgttttatttcctgatttttttaaagttggcaaaactacatatttttatcttgatgaaggcagtgggagggtggaacaaaaacaagccattactgctatttctagttcatttactggagactgtcccttaatagctaatgtagaataaatttgaaacatagacctagatgacaaaaagaatgggaatagaaatgaatctcaggatttgaacaaacagaagacgtttatgctgtgttgatgcccagttctacaactgctattacatttgtcattctgtctccccttttcccctaattcttttatgtatgtatgtatacagtttgaggaaatgtgcatctatggtcagtcctttttaaaagacttaatgaatttattactcttttgcaaaaaatatacccactgcttatatgggcatacaaatgctaccctattttaaatgtaggtggcgtatgtgttcgtgttttaatgtattcagagccattgggcaataagcagtccagaacattgaaaactcaagcagcagacaactaaactggtaggtggcagcagaggaaggaattcttcagattgatggctactgacttaaagtctgcataggagaagagatagagcatgacataccaagtgaagcaagggggacaaaaatggaaacaggactaagattcctgcattttgactctaaatggttcttttgaagtaaccagtgatcttttttgcttaccctcatcaacagaatggatgaagatagatttgactgtgtgctttttcaagtggagaatatgaatatacagaacaagaaagcaataactccaacctgtttgattccgtctgttttctaaataaagacactatgcgctggaaataacatag

SEQ ID NO: 9286 - protein, 52 aa, Homo sapiens [sequence omitted]

SEQ ID NO: 9287 - DNA, 1131 bp, Homo sapiens
gaaacatagacctagatgacaaaaagaatgggaatagaaatgaatctcaggatttgaacaaacagaagacgtttatgctgtgttgatgcccagttctacaactgctattacatttgtcattctgtctccccttttcccctaattcttttatgtatgtatgtatacagtttgaggaaatgtgcatctatggtcagtcctttttaaaagacttaatgaatttattactcttttgcaaaaaatatacccactgcttatatgggcatacaaatgctaccctattttaaatgtaggtggcgtatgtgttcgtgttttaatgtattcagagccattgggcaataagcagtccagaacattgaaaactcaagcaggtaaagcacctaacacccttagtttctagaattactttaaaaaacttttatattgctgcatcttccacagttctttgggtagtctctgaacttaaaatttgtaggagttgtagactacctaaatttttaagttatggtatttgttcataggttgtaggggtaggtaaagaaggaaacagacaagaaaatggcttcttgaggtggcagctgctgagtggctaaatcttaccactttctttctactttttttggaaattttcccagcttagcatgaacatggatcatacagtgtttgattttatgtgattgagatttttgttttttatttttggagggaaggtcttggagaaacattaaaaagttggtgtatgtgcaaaaatacgaaatgttaaacaaaggaattttttcttatttaatctgaatggtaagcaagaactttttctatatacccttctgctgcagcagacaactaaactggtaggtggcagcagaggaaggaattcttcagattgatggctactgacttaaagtctgcataggagaagagatagagcatgacataccaagtgaagcaagggggacaaaaatggaaacaggactaagattcctgcattttgactctaaatgaatggatgaagatagatttgactgtgtgctttttcaagtggagaatatgaatatacagaacaagaaagcaataactccaacctgtttgattccgtctgttttctaaataaagacactatgcgctggaaataacata

SEQ ID NO: 9288 - protein, 44 aa, Homo sapiens
MYVCIQFEEMCIYGQSFLKDLMNLLLFCKKYTHCLYGHTNATLF

SEQ ID NO: 9289 - DNA, 386 bp, Homo sapiens
cactcctgggctgtcaagtttttcaaggtgctctggttccataagctcattcttcctgttggatccattccagttaccaaaaacacttttttgtttaggctggtttgatataggatgatcattggtcccagagagcatcctggctaatctattttattattttattttatgagacaagttctcactgttgcccaggctggagtgcagtggtgctatcatggctcattgcagccttgaacccctgggctcaagcaaatcctaccatctcagctactcgggaggctgaggcaggagaatggcgtgaacccgggaggcggagcttgcagtgagccgagatcgcgccattgcacttcagcctgggcggtagagccagactctgtctcaaa

SEQ ID NO: 9290 - protein, 71 aa, Homo sapiens
DDHWSQRASWLIYFIILFYETSSHCCPGWSAVVLSWLIAALNPWAQANPTISATREAEAGEWREPGRRSLQ

SEQ ID NO: 9291 - DNA, 3990 bp, Homo sapiens
ctggaattagtatataaagctacgcggagcgatctctgcccctgaccctggaaaaatctgtctcacccacaaagatgtgggctcagctccttctaggaatgttggccctatcaccagccattgcagaagaacttccaaactacctggtgacattaccagcccggctaaatttcccctccgttcagaaggtttgtttggacctgagccctgggtacagtgatgttaaattcacggttactctggagaccaaggacaagacccagaagttgctagaatactctggactgaagaagaggcacttacattgtatctcctttcttgtaccacctcctgctggtggcacagaagaagtggccacaatccgggtgtcgggagttggaaataacatcagctttgaggagaagaaaaaggttctaattcagaggcaggggaacggcacctttgtacagactgacaaacctctctacaccccagggcagcaagtgtatttccgcattgtcaccatggatagcaacttcgttccagtgaatgacaagtactccatggtggaactacaggatccaaatagcaacaggattgcacagtggctggaagtggtacctgagcaaggcattgtagacctgtccttccaactggcaccagaggcaatgctgggcacctacactgtggcagtggctgagggcaagacctttggtactttcagtgtggaggaatatgtgctgccgaagtttaaggtggaagtggtggaacccaaggagttatcaacggtgcaggaatctttcttagtaaaaatttgttgtaggtacacctatggaaagcccatgctaggggcagtgcaggtatctgtgtgtcagaaggcaaatacttactggtatcgagaggtggaacgggaacagcttcctgacaaatgcaggaacctctctggacagactgacaaaacaggatgtttctcagcacctgtggacatggccacctttgacctcattggatatgcgtacagccatcaaatcaatattgtggctactgttgtggaggaagggacaggtgtggaggccaatgccactcagaatatctacatttctccacaaatgggatcaatgacctttgaagacaccagcaatttttaccatccaaatttccccttcagtgggaagataagagttaggggccatgatgactccttcctcaagaaccatctagtgtttctggtgatttatggcacaaatggaaccttcaaccagaccctggttactgataacaatggcctagctccctttaccttggagacatccggttggaatgggacagacgtttctctggagggaaagtttcaaatggaagacttagtatataatccggaacaagtgccacgttactaccaaaatgcctacctgcacctgcgacccttctacagcacaacccgcagcttccttggcatccaccggctaaacggccccttgaaatgtggccagccccaggaagtgctggtggattattacatcgacccggccgatgcaagccctgaccaagagatcagcttctcctactatttaatagggaaaggaagtttggtgatggaggggcagaaacacctgaactctaagaagaaaggactgaaagcctccttctctctctcactgaccttcacttcgagactggcccctgatccttccctggtgatctatgccatttttcccagtggaggtgttgtagctgacaaaattcagttctcagtcgagatgtgctttgacaatcaggtttcccttggcttctccccctcccagcagcttccaggagcagaagtggagctgcagctgcaggcagctcccggatccctgtgtgcgctccgggcggtggatgagagtgtcttactgcttaggccagacagagagctgagcaaccgctctgtctatgggatgtttccattctggtatggtcactacccctatcaagtggctgagtatgatcagtgtccagtgtctggcccatgggactttcctcagcccctcattgacccaatgccccaagggcattcgagccagcgttccattatctggaggccctcgttctctgaaggcacggaccttttcagctttttccgggacgtgggcctgaaaatactgtccaatgccaaaatcaagaagccagtagattgcagtcacagatctccagaatacagcactgctatgggtgcaggcggtggtcatccagaggcttttgagtcatcaactcctttacatcaagcagaggattctcaggtccgccagtacttcccagagacctggctctgggatctgtttcctattggtaactcggggaaggaggcggtccacgtcacagttcctgacgccatcaccgagtggaaggcgatgagtttctgcacttcccagtcaagaggcttcgggctttcacccactgttggactaactgctttcaagccgttctttgttgacctgactctcccttactcagtagtccgtggggaatcctttcgtcttactgccaccatcttcaattacctaaaggattgcatcagggttcagactgacctggctaaatcgcatgagtaccagctgcattgctggagatgggaaaggatgtagatgacccaatggtgagtcagggtctacggtgtctcaagaattcggccacctccacgaccaacctctacacacaggccctgttggcttacattttctccctggctggggaaatggacatcagaaacattctccttaaacagttagatcaacaggctatcatctcaggagaatccatttactggagccagaaacctactccatcatcgaacgccagcccttggtctgagcctgcggctgtagatgtggaactcacagcatatgcattgttggcccagcttaccaagcccagcctgactcaaaaggagatagcgaaggccactagcatagtggcttggttggccaagcaacacaatgcatatgggggcttctcttctactcaggatactgtagttgctctccaagctcttgccaaatatgccactaccgcctacatgccatctgaggagatcaacctggttgtaaaatccactgagaatttccagcgcacattcaacatacagtcagttaacagattggtatttcagcaggataccctgcccaatgtccctggaatgtacacgttggaggcctcaggccagggctgtgtctatgtgcagacggtgttgagatacaatattctccctcccacaaatatgaagacctttagtcttagtgtggaaataggaaaagctagatgtgagcaaccgacttcacctcgatccttgactctcactattcacaccagttatgtggggagccgtagctcttccaatatggctattgtggaagtgaagatgctatctgggttcagtcccatggagggcaccaatcagttacttctccagcaacccctggtgaagaaggttgaatttggaactgacacacttaacatttacttggatgagctcattaagaacactcagacttacaccttcaccatcagccaaagtgtgctggtcaccaacttgaaaccagcaaccatcaaggtctatgactactacctaccagatgaacaggcaacaattcagtattctgatccctgtgaatgaggatctggctctgttgcccaggctgcagtgcagtggcgtgatctcagctcactgcagcctctgcctcccaagttcaagcgattcttgtgcctcagcctcctgagtagctgggatgacaggcacgtgccatcacgcccagctaattttttttgtatttttaatagagatggggtttcgccatgttggtcaggctggtctcaaactcctggcctcaggtgatccgcctacttcagcctcccaaagtgctgggattacaggtgtaagccactgtgcccggcctgtcctaaactcttgaaaatagtttacagaagaaaaagctaatgcttggtattaaaacaatacttttttctatcagattg

SEQ ID NO: 9292 - protein, 842 aa, Homo sapiens
MWAQLLLGMLALSPAIAEELPNYLVTLPARLNFPSVQKVCLDLSPGYSDVKFTVTLETKDKTQKLLEYSGLKKRHLHCISFLVPPPAGGTEEVATIRVSGVGNNISFEEKKKVLIQRQGNGTFVQTDKPLYTPGQQVYFRIVTMDSNFVPVNDKYSMVELQDPNSNRIAQWLEVVPEQGIVDLSFQLAPEAMLGTYTVAVAEGKTFGTFSVEEYVLPKFKVEVVEPKELSTVQESFLVKICCRYTYGKPMLGAVQVSVCQKANTYWYREVEREQLPDKCRNLSGQTDKTGCFSAPVDMATFDLIGYAYSHQINIVATVVEEGTGVEANATQNIYISPQMGSMTFEDTSNFYHPNFPFSGKIRVRGHDDSFLKNHLVFLVIYGTNGTFNQTLVTDNNGLAPFTLETSGWNGTDVSLEGKFQMEDLVYNPEQVPRYYQNAYLHLRPFYSTTRSFLGIHRLNGPLKCGQPQEVLVDYYIDPADASPDQEISFSYYLIGKGSLVMEGQKHLNSKKKGLKASFSLSLTFTSRLAPDPSLVIYAIFPSGGVVADKIQFSVEMCFDNQVSLGFSPSQQLPGAEVELQLQAAPGSLCALRAVDESVLLLRPDRELSNRSVYGMFPFWYGHYPYQVAEYDQCPVSGPWDFPQPLIDPMPQGHSSQRSIIWRPSFSEGTDLFSFFRDVGLKILSNAKIKKPVDCSHRSPEYSTAMGAGGGHPEAFESSTPLHQAEDSQVRQYFPETWLWDLFPIGNSGKEAVHVTVPDAITEWKAMSFCTSQSRGFGLSPTVGLTAFKPFFVDLTLPYSVVRGESFRLTATIFNYLKDCIRVQTDLAKSHEYQLHCWRWERM

SEQ ID NO: 9293 - DNA, 5125 bp, Homo sapiens
gaccctggaaaaatctgtctcacccacaaagatgtgggctcagctccttctaggaatgttggccctatcaccagccattgcagaagaacttccaaactacctggtgacattaccagcccggctaaatttcccctccgttcagaaggtttgtttggacctgagccctgggtacagtgatgttaaattcacggttactctggagaccaaggacaagacccagaagttgctagaatactctggactgaagaagaggcacttacattgtatctcctttcttgtaccacctcctgctggtggcacagaagaagtggccacaatccgggtgtcgggagttggaaataacatcagctttgaggagaagaaaaaggttctaattcagaggcaggggaacggcacctttgtacagactgacaaacctctctacaccccagggcagcaagtgtatttccgcattgtcaccatggatagcaacttcgttccagtgaatgacaagtactccatggtggaactacaggatccaaatagcaacaggattgcacagtggctggaagtggtacctgagcaaggcattgtagacctgtccttccaactggcaccagaggcaatgctgggcacctacactgtggcagtggctgagggcaagacctttggtactttcagtgtggaggaatatgtgctgccgaagtttaaggtggaagtggtggaacccaaggagttatcaacggtgcaggaatctttcttagtaaaaatttgttgtaggtacacctatggaaagcccatgctaggggcagtgcaggtatctgtgtgtcagaaggcaaatacttactggtatcgagaggtggaacgggaacagcttcctgacaaatgcaggaacctctctggacagactgacaaaacaggatgtttctcagcacctgtggacatggccacctttgacctcattggatatgcgtacagccatcaaatcaatattgtggctactgttgtggaggaagggacaggtgtggaggccaatgccactcagaatatctacatttctccacaaatgggatcaatgacctttgaagacaccagcaatttttaccatccaaatttccccttcagtgggaagataagagttaggggccatgatgactccttcctcaagaaccatctagtgtttctggtgatttatggcacaaatggaaccttcaaccagaccctggttactgataacaatggcctagctccctttaccttggagacatccggttggaatgggacagacgtttctctggagggaaagtttcaaatggaagacttagtatataatccggaacaagtgccacgttactaccaaaatgcctacctgcacctgcgacccttctacagcacaacccgcagcttccttggcatccaccggctaaacggccccttgaaatgtggccagccccaggaagtgctggtggattattacatcgacccggccgatgcaagccctgaccaagagatcagcttctcctactatttaatagggaaaggaagtttggtgatggaggggcagaaacacctgaactctaagaagaaaggactgaaagcctccttctctctctcactgaccttcacttcgagactggcccctgatccttccctggtgatctatgccatttttcccagtggaggtgttgtagctgacaaaattcagttctcagtcgagatgtgctttgacaatcaggtttcccttggcttctccccctcccagcagcttccaggagcagaagtggagctgcagctgcaggcagctcccggatccctgtgtgcgctccgggcggtggatgagagtgtcttactgcttaggccagacagagagctgagcaaccgctctgtctatgggatgtttccattctggtatggtcactacccctatcaagtggctgagtatgatcagtgtccagtgtctggcccatgggactttcctcagcccctcattgacccaatgccccaagggcattcgagccagcgttccattatctggaggccctcgttctctgaaggcacggaccttttcagctttttccgggacgtgggcctgaaaatactgtccaatgccaaaatcaagaagccagtagattgcagtcacagatctccagaatacagcactgctatgggtgcaggcggtggtcatccagaggcttttgagtcatcaactcctttacatcaagcagaggattctcaggtccgccagtacttcccagagacctggctctgggatctgtttcctattggtaactcggggaaggaggcggtccacgtcacagttcctgacgccatcaccgagtggaaggcgatgagtttctgcacttcccagtcaagaggcttcgggctttcacccactgttggactaactgctttcaagccgttctttgttgacctgactctcccttactcagtagtccgtggggaatcctttcgtcttactgccaccatcttcaattacctaaaggattgcatcagggttcagactgacctggctaaatcgcatgagtaccagctagaatcatgggcagattctcagacctccagttgtctctgtgctgatgacgcaaaaacccaccactggaacatcacagctgtcaaattgggtcacattaactttactattagtacaaagattctggacagcaatgaaccatgtgggggccagaaggggtttgttccccaaaagggccgaagtgacacgctcatcaagccagttctcgtcaaacctgagggagtcctggtggagaagacacacagctcattgctgtgcccaaaaggaaaggtggcatctgaatctgtctccctggagctcccagtggacattgttcctgactcgaccaaggcttatgttacggttctgggagacattatgggcacagccctgcagaacctggatggtctggtgcagatgcccagtggctgtggcgagcagaacatggtcttgtttgctcccatcatctatgtcttgcagtacctggagaaggcagggctgctgacggaggagatcaggtctcgggcagtgggtttcctggaaatagggtaccagaaggagctgatgtacaaacacagcaatggctcatacagtgcctttggggagcgagatggaaatggaaacacatggctgacagcgtttgtcacaaaatgctttggccaagctcagaaattcatcttcattgatcccaagaacatccaggatgctctcaagtggatggcaggaaaccagctccccagtggctgctatgccaacgtgggaaatctccttcacacagctatgaagggtggtgttgatgatgaggtctccttgactgcgtatgtcacagctgcattgctggagatgggaaaggatgtagatgacccaatggtgagtcagggtctacggtgtctcaagaattcggccacctccacgaccaacctctacacacaggccctgttggcttacattttctccctggctggggaaatggacatcagaaacattctccttaaacagttagatcaacaggctatcatctcaggagaatccatttactggagccagaaacctactccatcatcgaacgccagcccttggtctgagcctgcggctgtagatgtggaactcacagcatatgcattgttggcccagcttaccaagcccagcctgactcaaaaggagatagcgaaggccactagcatagtggcttggttggccaagcaacacaatgcatatgggggcttctcttctactcaggatactgtagttgctctccaagctcttgccaaatatgccactaccgcctacatgccatctgaggagatcaacctggttgtaaaatccactgagaatttccagcgcacattcaacatacagtcagttaacagattggtatttcagcaggataccctgcccaatgtccctggaatgtacacgttggaggcctcaggccagggctgtgtctatgtgcagacggtgttgagatacaatattctccctcccacaaatatgaagacctttagtcttagtgtggaaataggaaaagctagatgtgagcaaccgacttcacctcgatccttgactctcactattcacaccagttatgtggggagccgtagctcttccaatatggctattgtggaagtgaagatgctatctgggttcagtcccatggagggcaccaatcagttacttctccagcaacccctggtgaagaaggttgaatttggaactgacacacttaacatttacttggatgagctcattaagaacactcagacttacaccttcaccatcagccaaagtgtgctggtcaccaacttgaaaccagcaaccatcaaggtctatgactactacctaccagatgaacaggcaacaattcagtattctgatccctgtgaatgaggataggagctggaaactcaattagtcctctgtgacatttactggagggtggaacattcttctgtcgcttgaagcagaactcattcaatcaaataatttaatttctctgactagtatatgggtaacaaatgaatatgtctgaacctcagctataatactttctactacctttgcaaggagatgggataggaacaatcactcagaggaggcgttgcatgggcagggtcatagggggaagaaaggtggtttagctgttttatttagccattcagggggctctccagagaggagacggtggtagagggtgaactagagaagataagaatgtcttcctaggccggatgcggtggctcacgcctgtaatcccagcactttgggattgcgaggtgggcggatcacttgaggtcaggagttcaagaccagcctggccaacatggtaaaacccgtctctactaacaatacaaagattagcctggtgtggtggcacgggcctgtaatcgcagccccttggaaggccaaggcaggagaatcgcctcaacactggaggtggaggttgcagtgagctgagattgtgccactgcactccagcctgggcaatgaggcaagaccctgtctcaaaaaataataaataataataataataatgtttttctagagtttcagtctaagggaaaatgtgatttagggctttggaaattggctaaaaaaataaaaatggaaaagaaaatc

SEQ ID NO: 9294 - protein, 1454 aa, Homo sapiens
MWAQLLLGMLALSPAIAEELPNYLVTLPARLNFPSVQKVCLDLSPGYSDVKFTVTLETKDKTQKLLEYSGLKKRHLHCISFLVPPPAGGTEEVATIRVSGVGNNISFEEKKKVLIQRQGNGTFVQTDKPLYTPGQQVYFRIVTMDSNFVPVNDKYSMVELQDPNSNRIAQWLEVVPEQGIVDLSFQLAPEAMLGTYTVAVAEGKTFGTFSVEEYVLPKFKVEVVEPKELSTVQESFLVKICCRYTYGKPMLGAVQVSVCQKANTYWYREVEREQLPDKCRNLSGQTDKTGCFSAPVDMATFDLIGYAYSHQINIVATVVEEGTGVEANATQNIYISPQMGSMTFEDTSNFYHPNFPFSGKIRVRGHDDSFLKNHLVFLVIYGTNGTFNQTLVTDNNGLAPFTLETSGWNGTDVSLEGKFQMEDLVYNPEQVPRYYQNAYLHLRPFYSTTRSFLGIHRLNGPLKCGQPQEVLVDYYIDPADASPDQEISFSYYLIGKGSLVMEGQKHLNSKKKGLKASFSLSLTFTSRLAPDPSLVIYAIFPSGGVVADKIQFSVEMCFDNQVSLGFSPSQQLPGAEVELQLQAAPGSLCALRAVDESVLLLRPDRELSNRSVYGMFPFWYGHYPYQVAEYDQCPVSGPWDFPQPLIDPMPQGHSSQRSIIWRPSFSEGTDLFSFFRDVGLKILSNAKIKKPVDCSHRSPEYSTAMGAGGGHPEAFESSTPLHQAEDSQVRQYFPETWLWDLFPIGNSGKEAVHVTVPDAITEWKAMSFCTSQSRGFGLSPTVGLTAFKPFFVDLTLPYSVVRGESFRLTATIFNYLKDCIRVQTDLAKSHEYQLESWADSQTSSCLCADDAKTHHWNITAVKLGHINFTISTKILDSNEPCGGQKGFVPQKGRSDTLIKPVLVKPEGVLVEKTHSSLLCPKGKVASESVSLELPVDIVPDSTKAYVTVLGDIMGTALQNLDGLVQMPSGCGEQNMVLFAPIIYVLQYLEKAGLLTEEIRSRAVGFLEIGYQKELMYKHSNGSYSAFGERDGNGNTWLTAFVTKCFGQAQKFIFIDPKNIQDALKWMAGNQLPSGCYANVGNLLHTAMKGGVDDEVSLTAYVTAALLEMGKDVDDPMVSQGLRCLKNSATSTTNLYTQALLAYIFSLAGEMDIRNILLKQLDQQAIISGESIYWSQKPTPSSNASPWSEPAAVDVELTAYALLAQLTKPSLTQKEIAKATSIVAWLAKQHNAYGGFSSTQDTVVALQALAKYATTAYMPSEEINLVVKSTENFQRTFNIQSVNRLVFQQDTLPNVPGMYTLEASGQGCVYVQTVLRYNILPPTNMKTFSLSVEIGKARCEQPTSPRSLTLTIHTSYVGSRSSSNMAIVEVKMLSGFSPMEGTNQLLLQQPLVKKVEFGTDTLNIYLDELIKNTQTYTFTISQSVLVTNLKPATIKVYDYYLPDEQATIQYSDPCE

SEQ ID NO: 9295 - DNA, 3374 bp, Homo sapiens
agcttccttggcatccaccggctaaacggccccttgaaatgtggccagccccaggaagtgctggtggattattacatcgacccggccgatgcaagccctgaccaagagatcagcttctcctactatttaatagggaaaggaagtttggtgatggaggggcagaaacacctgaactctaagaagaaaggactgaaagcctccttctctctctcactgaccttcacttcgagactggcccctgatccttccctggtgatctatgccatttttcccagtggaggtgttgtagctgacaaaattcagttctcagtcgagatgtgctttgacaatcaggtttcccttggcttctccccctcccagcagcttccaggagcagaagtggagctgcagctgcaggcagctcccggatccctgtgtgcgctccgggcggtggatgagagtgtcttactgcttaggccagacagagagctgagcaaccgctctgtctatgggatgtttccattctggtatggtcactacccctatcaagtggctgagtatgatcagtgtccagtgtctggcccatgggactttcctcagcccctcattgacccaatgccccaagggcattcgagccagcgttccattatctggaggccctcgttctctgaaggcacggaccttttcagctttttccgggacgtgggcctgaaaatactgtccaatgccaaaatcaagaagccagtagattgcagtcacagatctccagaatacagcactgctatgggtgcaggcggtggtcatccagaggcttttgagtcatcaactcctttacatcaagcagaggattctcaggtccgccagtacttcccagagacctggctctgggatctgtttcctattggtaactcggggaaggaggcggtccacgtcacagttcctgacgccatcaccgagtggaaggcgatgagtttctgcacttcccagtcaagaggcttcgggctttcacccactgttggactaactgctttcaagccgttctttgttgacctgactctcccttactcagtagtccgtggggaatcctttcgtcttactgccaccatcttcaattacctaaaggattgcatcagggttcagactgacctggctaaatcgcatgagtaccagctagaatcatgggcagattctcagacctccagttgtctctgtgctgatgacgcaaaaacccaccactggaacatcacagctgtcaaattgggtcacattaactttactattagtacaaagattctggacagcaatgaaccatgtgggggccagaaggggtttgttccccaaaagggccgaagtgacacgctcatcaagccagttctcgtcaaacctgagggagtcctggtggagaagacacacagctcattgctgtgcccaaaaggaaaggtggcatctgaatctgtctccctggagctcccagtggacattgttcctgactcgaccaaggcttatgttacggttctgggagacattatgggcacagccctgcagaacctggatggtctggtgcagatgcccagtggctgtggcgagcagaacatggtcttgtttgctcccatcatctatgtcttgcagtacctggagaaggcagggctgctgacggaggagatcaggtctcgggcagtgggtttcctggaaatagggtaccagaaggagctgatgtacaaacacagcaatggctcatacagtgcctttggggagcgagatggaaatggaaacacatggctgacagcgtttgtcacaaaatgctttggccaagctcagaaattcatcttcattgatcccaagaacatccaggatgctctcaagtggatggcaggaaaccagctccccagtggctgctatgccaacgtgggaaatctccttcacacagctatgaagggtggtgttgatgatgaggtctccttgactgcgtatgtcacagctgcattgctggagatgggaaaggatgtagatgacccaatggtgagtcagggtctacggtgtctcaagaattcggccacctccacgaccaacctctacacacaggccctgttggcttacattttctccctggctggggaaatggacatcagaaacattctccttaaacagttagatcaacaggctatcatctcaggagaatccatttactggagccagaaacctactccatcatcgaacgccagcccttggtctgagcctgcggctgtagatgtggaactcacagcatatgcattgttggcccagcttaccaagcccagcctgactcaaaaggagatagcgaaggccactagcatagtggcttggttggccaagcaacacaatgcatatgggggcttctcttctactcaggatactgtagttgctctccaagctcttgccaaatatgccactaccgcctacatgccatctgaggagatcaacctggttgtaaaatccactgagaatttccagcgcacattcaacatacagtcagttaacagattggtatttcagcaggataccctgcccaatgtccctggaatgtacacgttggaggcctcaggccagggctgtgtctatgtgcagacggtgttgagatacaatattctccctcccacaaatatgaagacctttagtcttagtgtggaaataggaaaagctagatgtgagcaaccgacttcacctcgatccttgactctcactattcacaccagttatgtggggagccgtagctcttccaatatggctattgtggaagtgaagatgctatctgggttcagtcccatggagggcaccaatcagttacttctccagcaacccctggtgaagaaggttgaatttggaactgacacacttaacatttacttggatgagctcattaagaacactcagacttacaccttcaccatcagccaaagtgtgctggtcaccaacttgaaaccagcaaccatcaaggtctatgactactacctaccagatgaacaggcaacaattcagtattctgatccctgtgaatgaggatctggctctgttgcccaggctgcagtgcagtggcgtgatctcagctcactgcagcctctgcctcccaagttcaagcgattcttgtgcctcagcctcctgagtagctgggatgacaggcacgtgccatcacgcccagctaattttttttgtatttttaatagagatggggtttcgccatgttggtcaggctggtctcaaactcctggcctcaggtgatccgcctacttcagcctcccaaagtgctgggattacaggtgtaagccactgtgcccggcctgtcctaaactcttgaaaatagtttacagaagaaaaagctaatgcttggtattaaaacaatacttttttctatcagattg

SEQ ID NO: 9296 - protein, 954 aa, Homo sapiens
MEGQKHLNSKKKGLKASFSLSLTFTSRLAPDPSLVIYAIFPSGGVVADKIQFSVEMCFDNQVSLGFSPSQQLPGAEVELQLQAAPGSLCALRAVDESVLLLRPDRELSNRSVYGMFPFWYGHYPYQVAEYDQCPVSGPWDFPQPLIDPMPQGHSSQRSIIWRPSFSEGTDLFSFFRDVGLKILSNAKIKKPVDCSHRSPEYSTAMGAGGGHPEAFESSTPLHQAEDSQVRQYFPETWLWDLFPIGNSGKEAVHVTVPDAITEWKAMSFCTSQSRGFGLSPTVGLTAFKPFFVDLTLPYSVVRGESFRLTATIFNYLKDCIRVQTDLAKSHEYQLESWADSQTSSCLCADDAKTHHWNITAVKLGHINFTISTKILDSNEPCGGQKGFVPQKGRSDTLIKPVLVKPEGVLVEKTHSSLLCPKGKVASESVSLELPVDIVPDSTKAYVTVLGDIMGTALQNLDGLVQMPSGCGEQNMVLFAPIIYVLQYLEKAGLLTEEIRSRAVGFLEIGYQKELMYKHSNGSYSAFGERDGNGNTWLTAFVTKCFGQAQKFIFIDPKNIQDALKWMAGNQLPSGCYANVGNLLHTAMKGGVDDEVSLTAYVTAALLEMGKDVDDPMVSQGLRCLKNSATSTTNLYTQALLAYIFSLAGEMDIRNILLKQLDQQAIISGESIYWSQKPTPSSNASPWSEPAAVDVELTAYALLAQLTKPSLTQKEIAKATSIVAWLAKQHNAYGGFSSTQDTVVALQALAKYATTAYMPSEEINLVVKSTENFQRTFNIQSVNRLVFQQDTLPNVPGMYTLEASGQGCVYVQTVLRYNILPPTNMKTFSLSVEIGKARCEQPTSPRSLTLTIHTSYVGSRSSSNMAIVEVKMLSGFSPMEGTNQLLLQQPLVKKVEFGTDTLNIYLDELIKNTQTYTFTISQSVLVTNLKPATIKVYDYYLPDEQATIQYSDPCE

SEQ ID NO: 9297 - DNA, 1999 bp, Homo sapiens
ctcgggcagtgggtttcctggaaatagggtaccagaaggagctgatgtacaaacacagcaatggctcatacagtgcctttggggagcgagatggaaatggaaacacatggctgacagcgtttgtcacaaaatgctttggccaagctcagaaattcatcttcattgatcccaagaacatccaggatgctctcaagtggatggcaggaaaccagctccccagtggctgctatgccaacgtgggaaatctccttcacacagctatgaagggtggtgttgatgatgaggtctccttgactgcgtatgtcacagctgcattgctggagatgggaaaggatgtagatgacccaatggtgagtcagggtctacggtgtctcaagaattcggccacctccacgaccaacctctacacacaggccctgttggcttacattttctccctggctggggaaatggacatcagaaacattctccttaaacagttagatcaacaggctatcatctcaggagaatccatttactggagccagaaacctactccatcatcgaacgccagcccttggtctgagcctgcggctgtagatgtggaactcacagcatatgcattgttggcccagcttaccaagcccagcctgactcaaaaggagatagcgaaggccactagcatagtggcttggttggccaagcaacacaatgcatatgggggcttctcttctactcaggatactgtagttgctctccaagctcttgccaaatatgccactaccgcctacatgccatctgaggagatcaacctggttgtacacgttggaggcctcaggccagggctgtgtctatgtgcagacggtgttgagatacaatattctccctcccacaaatatgaagacctttagtcttagtgtggaaataggaaaagctagatgtgagcaaccgacttcacctcgatccttgactctcactattcacaccagttatgtggggagccgtagctcttccaatatggctattgtggaagtgaagatgctatctgggttcagtcccatggagggcaccaatcagttacttctccagcaacccctggtgaagaaggttgaatttggaactgacacacttaacatttacttggatgagctcattaagaacactcagacttacaccttcaccatcagccaaagtgtgctggtcaccaacttgaaaccagcaaccatcaaggtctatgactactacctaccagatgaacaggcaacaattcagtattctgatccctgtgaatgaggataggagctggaaactcaattagtcctctgtgacatttactggagggtggaacattcttctgtcgcttgaagcagaactcattcaatcaaataatttaatttctctgactagtatatgggtaacaaatgaatatgtctgaacctcagctataatactttctactacctttgcaaggagatgggataggaacaatcactcagaggaggcgttgcatgggcagggtcatagggggaagaaaggtggtttagctgttttatttagccattcagggggctctccagagaggagacggtggtagagggtgaactagagaagataagaatgtcttcctaggccggatgcggtggctcacgcctgtaatcccagcactttgggattgcgaggtgggcggatcacttgaggtcaggagttcaagaccagcctggccaacatggtaaaacccgtctctactaacaatacaaagattagcctggtgtggtggcacgggcctgtaatcgcagccccttggaaggccaaggcaggagaatcgcctcaacactggaggtggaggttgcagtgagctgagattgtgccactgcactccagcctgggcaatgaggcaagaccctgtctcaaaaaataataaataataataataataatgtttttctagagtttcagtctaagggaaaatgtgatttagggctttggaaattggctaaaaaaataaaaatggaaaagaaaa

SEQ ID NO: 9298 - protein, 281 aa, Homo sapiens
MYKHSNGSYSAFGERDGNGNTWLTAFVTKCFGQAQKFIFIDPKNIQDALKWMAGNQLPSGCYANVGNLLHTAMKGGVDDEVSLTAYVTAALLEMGKDVDDPMVSQGLRCLKNSATSTTNLYTQALLAYIFSLAGEMDIRNILLKQLDQQAIISGESIYWSQKPTPSSNASPWSEPAAVDVELTAYALLAQLTKPSLTQKEIAKATSIVAWLAKQHNAYGGFSSTQDTVVALQALAKYATTAYMPSEEINLVVHVGGLRPGLCLCADGVEIQYSPSHKYEDL

SEQ ID NO: 9299 - DNA, 799 bp, Homo sapiens
gcacacgagagcgagcgagggagccagcgagagagggagggagagaaggaaagaagaggggaggggtgggggcgagaggtaaatagtcttaaatcggaagggagctgcttctctgtggtcttgacaagcgctgcctgggctccgccggctcactaataactgagtgaccttttctttggctgtattatgtctggctgggaagggattgcattttgcagctgagagccggagcttccttcagctcggctcctcgcacgctgctggggtaagttgtcttgaaccaggacggagagagacagcctcggactgcagttgcctaaaaggaggacacctgtggctcagatgcggtcaacaccattgcttggcgtatccttgaggacctcattattttaaacttaaaaaaaaatagacattccctcccccgtcttttttttttttttcaaacaatgcttctttttgacctttcccaaggagaagcgctacaaagcagccactgtgcttactgaacggcctccccctgtatcgcttaattgagaaggtatacaaatgctctcagtccagccagacaccaagccgaaaggttgtgctggctgcaaccgaaagatcaaggaccggtatcttctaaaggcactggacaaatactggcatgaagactgcctgaagtgtgcctgctgtgactgtcgcttgggagaggtgggctccaccctgtacactaaagctaatcttatcctttgtcgcagagactatctgaggtaggaattatccttgcacaccagtgatgactggatgccttttaaag

SEQ ID NO: 9300 - protein, 69 aa, Homo sapiens
MLSVQPDTKPKGCAGCNRKIKDRYLLKALDKYWHEDCLKCACCDCRLGEVGSTLYTKANLILCRRDYLR

SEQ ID NO: 9301 - DNA, 683 bp, Homo sapiens
atcctgatgaatgaattggtaacactttagaaaagtaaaggcaggagacagaaaaccgggctctgattcttaagattcggattctacaggaagagaatttcaagaacatcatggatatagacagactggaaaagaagattgaagacttgtctaaaactgagacagagcaccaaatgcagttacacacatatgagaacactttgcttaataaagatacaagtttgcagaagaaaggcttatatatagaagaacttaaatcaaccatcatagaatatggaagcattatagagaatttacgaggggaaaaaagtaaactggctcatgagttacagcacttgcaacaggcactcatcacaaatgggatccagttgaatgttaatggagagtgtaacagtatcatctctgaaggagaaaagtctttacattacgaactcactcttgctcagtctgcagagaacactgaaacagaaaggcagcacaatgtaatcaacttgtcatctctggacgccatgatggatcaggaaatgctgctattactaagagagcccgcacagaaggcagtggaattcacagccacgcttcagaagctgcacgaagaaatttctaaaattgcaaccctcattgaaaactctcgacggtgggtaactaatccagaaattactgtgaaagaaaagtgggaggag

SEQ ID NO: 9302 - protein, 190 aa, Homo sapiens
MDIDRLEKKIEDLSKTETEHQMQLHTYENTLLNKDTSLQKKGLYIEELKSTIIEYGSIIENLRGEKSKLAHELQHLQQALITNGIQLNVNGECNSIISEGEKSLHYELTLAQSAENTETERQHNVINLSSLDAMMDQEMLLLLREPAQKAVEFTATLQKLHEEISKIATLIENSRRWVTNPEITVKEKWE

SEQ ID NO: 9303 - DNA, 411 bp, Homo sapiens
ccagagagaaaatatcaacagcttttttaggatgtaggagaatttcacaagactattgagaaccaaatgacaaggacaatgacattaactcatgagcatcatttttgttaagtgaaagtaatgaatgttctttattcagatgtcaattgtgggcatttcgatccttgtttcagaacactgaaacagaaaggcagcacaatgtaatcaacttgtcatctctggacgccatgatggatcaggaaatgctgctattactaagagagcccgcacagaaggcagtggaattcacagccacgcttcagaagctgcacgaagaaatttctaaaattgcaaccctcattgaaaactctcgacggtgggtaactaatccagaaattactgtgaaagaaaagtgggaggagcagcttactg

SEQ ID NO: 9304 - protein, 60 aa, Homo sapiens
MMDQEMLLLLREPAQKAVEFTATLQKLHEEISKIATLIENSRRWVTNPEITVKEKWEEQL

SEQ ID NO: 9305 - DNA, 2946 bp, Homo sapiens
tgaaatgtcactgacagcttgcggtttggacttttttttttttttttttttttaactccagtcagaaacaactagaagccattaaacaactacaggaagatgctgtcaaccaggaaggcatccttaggaagaggctccaagaaaccagccaacggctggaggatgtggaggagcaggtagggtggctcatggctacattagattcaggggacatctcctcagatgccctgcaaaccatgaaataaaaatggaggaggaacaacaacaacaaacaaaaaaaaaaagcaaagaggaactgcaagttcagtccctagcgactaacagtgagcagaggaagtaaagggggagttgtaagagaggcggtatcaacagcctgctgatgaaagaggcgactctgcagaaagaggcaacttgacatatcaggactttaaccgctgtagaaatagctcaggcataccaagcccatgcaaacacagaattgcagaagttcaggagaggcttatcacttccctgagaagaaaaacacattttcagttttgcctgcatcataagagtgagcactccattgctttctttcctggccacactgctacaatccagcactaactatccatgtccagggtaaggatcgagatcgagaagcccacactgccagtgaaaaagctacgtctttactgcataaattagaggaagcaatttcggaacaacggaaccttcaaactataaatactgaattatcgaacacttgccaggcacttcagcagaagacaaggaaactgaagaagctttttagatgaggaatttcctcactatgattccctgtcctgcgcagatgcaattcaacaacctcttcaagaaaaattgaagcagtgttgccacaaactatatggtggtcaagaagcaagaatacatcagacacccctgaccttgaaacatacgtgctggtacacacctctgctggatgccttatctctggatagttttacagcagttccaaccctggaatcaacacctttctcaggtgtagccaaccaaatccacactctgtgtgaaaggcccacatatggagaagtaaaggatggtgctttggatgtaaaaagacaacacaagtgcccaggccccacaagtggccccagcccaggaacgaatctctcaggctgcatcaggatgaatgatgacccaagtatggaagagaatggtgttgaacgcgtgtgtcctgagagcctgctgcagtccagggaatattcctcactaccattacccagacacacttcatcgacagacggtactataacttcaagtgatcctggattagaaattctgaatatggcttcttgtgaccttgacagaaactcgctctgtaagaaagaggaggatacaagatcagcttctcccacgatagaggcccaaggcacaagtccagctcatgataatattgcattccaagactctacgagtaaggataaaaccatattaaatctggaagccaaagaggaaccagaaacaatagaagaacataaaaaagaacatgcttcaggagactctgtggtttcccctcttcctgtaaccactgtgaaatcggttaaccttagacaaagtgagaacacttctgctaatgagaaggaggtggaggcagaatttctcagattatctttgggatttaagtgtgactggtttaccttggagaagagagtgaagcttgaagagaggtcccgtgacttggcagaagaaaatttgaagaaagaaatcactaactgtttaaaactattagagtctttaacacctctgtgtgaagatgacaaccaggcacaggaaatcattaagaagctggagaagagtataaagtttcttagccagtgtgcagcacgagtggccagtagggctgagatgttgggagccatcaatcaggaaagccgggttagtaaagcagttgaagtgatgattcagcacgtagaaaacttgaagaggatgtatgccaaagagcacgctgaattagaagaactgaaacaggttcttctgcagaatgaaaggtctttcaatcctcttgaagatgatgatgactgccaaattaaaaaacgttcagcttctctaaactccaagccatcttctctacgaagagtgactattgcctctttacccagaaatattggaaatgcaggaatggtggctgggatggaaaataatgatcgattcagtagaaggtcaagcagttggcgtattttggggtcaaagcagagtgaacaccgtccctcattacctcgatttattagcacctattcctgggcagatgctgaagaagaaaaatgtgaactaaaaactaaagatgactcagagccatctggagaagaaacagtagaaaggacaaggaagccaagtctttctgaaaagaaaaataatccatcaaagtgggatgtctcttcagtttatgacacaatagcttcctgggcaacaaatctcaagtcctccatcagaaaggctaataaggccctctggctctctattgcattcattgtactgtttgcagctttgatgagcttcctcacaggccaattattccagaagtctgtggatgccgctcccacacagcaagaggactcatggacgtctctagaacatatcttgtggccatttaccagactccgacacaatgggccaccaccagtgtgacagcaggacatcctaatatatggatcttgatttttaagtttcagtatctgaacttcgtaaattagtaacttttagctgggaaagtatagcatgaaaccagaggttctcagaatgactgtaagatagcttacatttcctctttttgcctttatctccccaactaaaatacaatggggaagaagtctgcctatgatctttgaatgagctttttaaggaagaaatattatatattgtttgttaaagtttattgaaataaagaatcatttaaatcttcataga

SEQ ID NO: 9306 - protein, 499 aa, Homo sapiens; identical to SEQ ID NO: 1416

SEQ ID NO: 9307 - DNA, 1094 bp, Homo sapiens
gccattaaacaactacaggaagatgctgtcaaccaggaaggcatccttaggaagaggctccaagaaaccagccaacggctggaggatgtggaggagcaggtagggtggctcatggctacattagattcaggggacatctcctcagatgccctgcaaaccatgaaataaaaatggaggaggaacaacaacaacaaacaaaaaaaaaaagcaaagaggaactgcaagttcagtccctagcgactaacagtgagcagaggaagtaaagggggagttgtaagagaggcggtatcaacagcctgctgatgaaagaggcgactctgcagaaagaggcaacttgacatatcaggactttaaccgctgtagaaatagctcaggcataccaagcccatgcaaacacagaattgcagaagttcaggagaggcttatcacttccctgagaagaaaaacacattttcagttttgcctgcatcataagagtgagcactccattgctttctttcctggccacactgctacaatccagcactaactatccatgtccagggtaaggatcgagatcgagaagcccacactgccagtgaaaaagctacgtctttactgcataaattagaggaagcaatttcggaacaacggaaccttcaaactataaatactgaattatcgaacacttgccaggcacttcagcagaagacaaggaaactgaagacagtgttgccacaaactatatggtggtcaagaagcaagaatacatcagacacccctgaccttgaaacatacgtgctggtacacacctctgctggagacaaggtttctccatgttgcccaggctggtcttgaactcctggactcaagtgatcctcccatctcagccgcccaacatgctgggattacaggtgtgagccactgtgccaggtgacaaagtctattttaaaggatacaaatgaacagccagatgaagagatacatcggaaaggtttggaaatgtctcgagcacaggagggtctgtctttgtggagttggggtgtgccatcttcccagcacatggctatgttttagttcaccaaatcagaagctttccaagtgctgtcctttca

SEQ ID NO: 9308 - protein, 50 aa, Homo sapiens
MNSQMKRYIGKVWKCLEHRRVCLCGVGVCHLPSTWLCFSSPNQKLSKCCP

SEQ ID NO: 9309 - DNA, 1316 bp, Homo sapiens
ggactagtggcaaatgactaagacctggaaaagctgaaccctaaaaaaggcagtaagaaaagcctagaagcaacctacactgcacctcagtaaggttgatggtttgcccacaaagaaattttggaattctacttctctaaggacaaatacacacagatgcatatacaaggatatttactggagcattgtttataacagaaaaataccaaaaacatcctgaaatgattgaatacaaggaattggttaaataatttatatctactcaaccagtagaataccataaaatggtgacatagaaatgaagacaggttacctgattgatggctcccaacatctcagccctactggccactcgtgctgcacactggctaagaaactttatactcttctccagcttcttaatgatttcctgtgcctggttgtcatcttcacacagaggtgttaaagactgtatagaaaacagcatattaaaagatatctaacacaagcattcagcgagtgattctaacactgactaagttgcaaatgtggatgacattctaatctcaattatttcggtggaagatgaaaagaagcagcaaagatcaataatgaatgatactgatatattattatcttttttgggtactgggtagatatacgcaggtgatcacaaatcttttatgtctattcttgatcccttttttctttacttcccaaatttgccacatctttcttctacagctaataggatgggctgcaattaattggtaatggtaaagagattatgcttacaaaagaggtgaatgtatcatataaggagcataggttggaattttaagaaacgtaaccaaacatattggaattaaaaatgtctctgacggtatgactgggctggctaggtgaatatacattcattgccttatgaattttcctctcaatcctgtgccctttacacaatatgatgcccttcctgatgaacatccttctcaccagagtacagacaggattaagtgaataacagatttggaagcagacatgacactgctcattacctgtgtgattgtgagcaaatttctaaaactttcccaaatctaaagcaacatgaattataagagatacaacgattttgtatatcattaagaaagaaaaggctgtcaataaaaccattaggcaccaccgactgtaaattgcatcataattttagaaatgttcaaaaaaaatcaacctttctgatttgctgttccttatctgtccagtggggacaatcacgtatcctctccagaaatactgtcatatgataggtaagagatgccaactgcctgttgcacatttgg

SEQ ID NO: 9310 - protein, 53 aa, Homo sapiens
MAPNISALLATRAAHWLRNFILFSSFLMISCAWLSSSHRGVKDCIENSILKDI

SEQ ID NO: 9311 - DNA, 765 bp, Homo sapiens
tttgacaagtggctataatcatctttatttaggcgtattttggggtcaaagcagagtgaacaccgtccctcattacctcgatttattagcacctattcctgggcagatgctgaagaagaaaaatgtgaactaaaaactaaagatgactcagagccatctggagaagaaacagtagaaaggacaaggaagccaagtctttctgaaaagaaaaataatccatcaaagtgggatgtctcttcagtttatgacacaatagcttcctgggcaacaaatctcaagtcctccatcagaaaggctaataaggccctctggctctctattgcattcattgtactgtttgcagctttgatgagcttcctcacaggccaattattccagaagtctgtggatgccgctcccacacagcaagaggactcatggacgtctctagaacatatcttgtggccatttaccagactccgacacaatgggccaccaccagtgtgacagcaggacatcctaatatatggatcttgatttttaagtttcagtatctgaacttcgtaaattagtaacttttagctgggaaagtatagcatgaaaccagaggttctcagaatgactgtaagatagcttacatttcctctttttgcctttatctccccaactaaaatacaatggggaagaagtctgcctatgatctttgaatgagctttttaaggaagaaatattatatattgtttgttaaagtttattgaaataaagaatcatttaaatcttcataga

SEQ ID NO: 9312 - protein, 45 aa, Homo sapiens
MSFLTGQLFQKSVDAAPTQQEDSWTSLEHILWPFTRLRHNGPPPV

SEQ ID NO: 9313 - DNA, 3034 bp, Homo sapiens
actgcagtggagcttgactcttaatggtgagcaaggcaaatgaggcagacaggtggaggggcgaccactgattctgcttcaccagtgttaaataatgtaatcaagagccagtcatattttacagcgaagcgggtcggtttgggaaataactcataccttggggtgggtcggccctcttctcagcaatggctttccttacctggaccaggcggacaggtaggagtcccaaaccatctggcagtaagaaaaagaaagtcaccaaagctgaacgattgaagctgctacaagaggaggaggagagacgactgaaagaggaagaggaagcccgtttgaaatatgagaaagaagaaatggaaaggcttgaaatacagcgaattgagaaagaaaaatggcatcgacttgaagcaaaagatctagaaaggagaaatgaagaacttgaagaactttatttattagagaggtgttttcctgaagcagagaaattgaaacaggaaactaaattgctttctcagtggaagcactacattcaatgtgatgggagtcctgatccttcagtagcccaagaaatgaacacgtttattagtttgtggaaagagaaaacaaatgagacttttgaggaagtgattgagaagagtaaagtagtgctaaatttaattgagaaattgaaatttattttactggaaactccaccatgtgatttgcaagataaaaatataatacagtaccaagaatcaatactacaactgcaggagctccttcatcttaaattcggtgtagccacagaaatacttctcaaacaagctagtactttggcagatctggacagtggaaatatggaaaaagtcattaaagatgaaaatgttactctgtatgtgtgggcaaacctcaagaagaatccaaggcacagaagtgttagattctctgaaacacaaattggatttgagattccaaggatattagcaacaagtgacattgctgtacgactcctgcatacccactatgatcatgtttctgcactgcaccctgtttcaacaccatcaaaagaatacacttctgcagtaactgagcttgtcaaagatgatgttaagaatgtagaaaaagcaatcagcaaggaggtcgaagaagagtccaaacaacaagaaagagggtctcacttaattcaggaggaagaaataaaagttgaggaggaacaaggtgatattgaagtgaaaatgagttctgctgaggaagaatctgaagccataaaatgtgaacgagagatgaaagtattaagtgaaactgtttcagcagcacagttgttgctggtagagaattcttctgaaaagccagatttctttgaagacaatgtggtggatttatgccagttcacaactctgggtggagtataccacttggatattttggagcttcctccacagtgtaaaccagtgaagggatggatgattgtggaaatactcaaagaaggattacagaaatacacatatcctccggaaactacagaagagtttgagacagaaaatgctttcccacctatagaggtcacacttgaggttcatgagaatgtaatcttttttgaggatcctgtggttgtaaggtgggatgctgaaggtaaacattggagaactgatggcatcagcaatgtatcctacaaaccaaaagaaagacttgtaacattcagcctggacacctttggccctgttaccttgattcaagatgctcatattaacatgccgtaccagtcatgggaactaagaccacttgatgtaaataaagtacttttaactgtgactacagtatttactgagattcaaatacaaattaaggaaaacctctgcatgttatcttcaatcaaactaaaagacaagaaacacatctctattttggaaggaacctggatgactcctattcctttcattattgctttgaaagaagctggactgaatatctttcctactagacactctcatttttatgttattataaacaataaggttcctttggtagaagtgaaagcttatcgacagatggccctactaagttctgcttttgcatttggttggagcaagtggaacctactatgtaattctacaaaagtcgtatttaaggtgagggaacaccttactgaagcatgtactgagaatcctaattgggcccttttaatgtttagtggtgacagagcacaaagactgaagatcaaggaagagagtgaggcattttctgaagcacttaaagaagaaactgagtttcattctactttatatcacatggtgaaggattttgcttctgaggaagcaatggagaaagtcaggagttccaactgtcagtttgtcaactctgtgtgccacatgctgctctctaccagattgctcagctactcctaacctccacttacaaactgtattgtaagtatgaagaaccaagcatggtgaaagacaggtatttctgcaacacaatgtaatgagtgaatgaatacatttcaaatcaactattaaaaattttctaatctgcattttctactcaagttttattttaaaaacagtatttttttttcctttgaatacttggcctgttaagaatttcagctttcactctatgaagatttaaatgattctttatttcaataaactttaacaaacaatatataatatttcttccttaaaaagctcattcaaagatcataggcagacttcttccccattgtattttagttggggagataaaggcaaaaagaggaaatgtaagctatcttacagtcattctgagaacctctggtttcatgctatactttcccagctaaaagttactaatttacgaagttcagatactgaaacttaaaaatcaagatccatatattaggatgtcctgctgtcacactggtggtggcccattgtgtcggagtctggtaaatggccacaagatatgttctagagacgtccatgagtcctcttgctgtgtgggagcggcatccacagacttctggaataattggcctgtgaggaagctcatcaaagctgcaaacagtacaatgaatgca

SEQ ID NO: 9314 - protein, 731 aa, Homo sapiens
MAFLTWTRRTGRSPKPSGSKKKKVTKAERLKLLQEEEERRLKEEEEARLKYEKEEMERLEIQRIEKEKWHRLEAKDLERRNEELEELYLLERCFPEAEKLKQETKLLSQWKHYIQCDGSPDPSVAQEMNTFISLWKEKTNETFEEVIEKSKVVLNLIEKLKFILLETPPCDLQDKNIIQYQESILQLQELLHLKFGVATEILLKQASTLADLDSGNMEKVIKDENVTLYVWANLKKNPRHRSVRFSETQIGFEIPRILATSDIAVRLLHTHYDHVSALHPVSTPSKEYTSAVTELVKDDVKNVEKAISKEVEEESKQQERGSHLIQEEEIKVEEEQGDIEVKMSSAEEESEAIKCEREMKVLSETVSAAQLLLVENSSEKPDFFEDNVVDLCQFTTLGGVYHLDILELPPQCKPVKGWMIVEILKEGLQKYTYPPETTEEFETENAFPPIEVTLEVHENVIFFEDPVVVRWDAEGKHWRTDGISNVSYKPKERLVTFSLDTFGPVTLIQDAHINMPYQSWELRPLDVNKVLLTVTTVFTEIQIQIKENLCMLSSIKLKDKKHISILEGTWMTPIPFIIALKEAGLNIFPTRHSHFYVIINNKVPLVEVKAYRQMALLSSAFAFGWSKWNLLCNSTKVVFKVREHLTEACTENPNWALLMFSGDRAQRLKIKEESEAFSEALKEETEFHSTLYHMVKDFASEEAMEKVRSSNCQFVNSVCHMLLSTRLLSYS

SEQ ID NO: 9315 - DNA, 2886 bp, Homo sapiens
gtcgtccgggcaacccgggagcgtttgtccacacaatttctgctccgactctgcggactactgcagtggagcttgactcttaatgtctggcagtaagaaaaagaaagtcaccaaagctgaacgattgaagctgctacaagaggaggaggagagacgactgaaagaggaagaggaagcccgtttgaaatatgagaaagaagaaatggaaaggcttgaaatacagcgaattgagaaagaaaaatggcatcgacttgaagcaaaagatctagaaaggagaaatgaagaacttgaagaactttatttattagagaggtgttttcctgaagcagagaaattgaaacaggaaactaaattgctttctcagtggaagcactacattcaatgtgatgggagtcctgatccttcagtagcccaagaaatgaacacgtttattagtttgtggaaagagaaaacaaatgagacttttgaggaagtgattgagaagagtaaagtagtgctaaatttaattgagaaattgaaatttattttactggaaactccaccatgtgatttgcaagataaaaatataatacagtaccaagaatcaatactacaactgcaggagctccttcatcttaaattcggtgtagccacagaaatacttctcaaacaagctagtactttggcagatctggacagtggaaatatggaaaaagtcattaaagatgaaaatgttactctgtatgtgtgggcaaacctcaagaagaatccaaggcacagaagtgttagattctctgaaacacaaattggatttgagattccaaggatattagcaacaagtgacattgctgtacgactcctgcatacccactatgatcatgtttctgcactgcaccctgtttcaacaccatcaaaagaatacacttctgcagtaactgagcttgtcaaagatgatgttaagaatgtagaaaaagcaatcagcaaggaggtcgaagaagagtccaaacaacaagaaagagggtctcacttaattcaggaggaagaaataaaagttgaggaggaacaaggtgatattgaagtgaaaatgagttctgctgaggaagaatctgaagccataaaatgtgaacgagagatgaaagtattaagtgaaactgtttcagcagcacagttgttgctggtagagaattcttctgaaaagccagatttctttgaagacaatgtggtggatttatgccagttcacaactctgggtggagtataccacttggatattttggagcttcctccacagtgtaaaccagtgaagggatggatgattgtggaaatactcaaagaaggattacagaaatacacatatcctccggaaactacagaagagtttgagacagaaaatgctttcccacctatagaggtcacacttgaggttcatgagaatgtaatcttttttgaggatcctgtggttgtaaggtgggatgctgaaggtaaacattggagaactgatggcatcagcaatgtatcctacaaaccaaaagaaagacttgtaacattcagcctggacacctttggccctgttaccttgattcaagatgctcatattaacatgccgtaccagtcatgggaactaagaccacttgatgtaaataaagtacttttaactgtgactacagtatttactgagattcaaatacaaattaaggaaaacctctgcatgttatcttcaatcaaactaaaagacaagaaacacatctctattttggaaggaacctggatgactcctattcctttcattattgctttgaaagaagctggactgaatatctttcctactagacactctcatttttatgttattataaacaataaggttcctttggtagaagtgaaagcttatcgacagatggccctactaagttctgcttttgcatttggttggagcaagtggaacctactatgtaattctacaaaagtcgtatttaaggtgagggaacaccttactgaagcatgtactgagaatcctaattgggcccttttaatgtttagtggtgacagagcacaaagactgaagatcaaggaagagagtgaggcattttctgaagcacttaaagaagaaactgagtttcattctactttatatcacatggtgaaggattttgcttctgaggaagcaatggagaaagtcaggagttccaactgtcagtttgtcaactctgtgtgccacatgctgctctctaccagattgctcagctactcctaacctccacttacaaactgtattgtaagtatgaagaaccaagcatggtgaaagacaggtatttctgcaacacaatgtaatgagtgaatgaatacatttcaaatcaactattaaaaattttctaatctgcattttctactcaagttttattttaaaaacagtatttttttttcctttgaatacttggcctgttaagaatttcagctttcactctatgaagatttaaatgattctttatttcaataaactttaacaaacaatatataatatttcttccttaaaaagctcattcaaagatcataggcagacttcttccccattgtattttagttggggagataaaggcaaaaagaggaaatgtaagctatcttacagtcattctgagaacctctggtttcatgctatactttcccagctaaaagttactaatttacgaagttcagatactgaaacttaaaaatcaagatccatatattaggatgtcctgctgtcacactggtggtggcccattgtgtcggagtctggtaaatggccacaagatatgttctagagacgtccatgagtcctcttgctgtgtgggagcggcatccacagacttctggaataattggcctgtgaggaagctcatcaaagctgcaaacagtacaatgaatgca

SEQ ID NO: 9316 - protein, 716 aa, Homo sapiens
MSGSKKKKVTKAERLKLLQEEEERRLKEEEEARLKYEKEEMERLEIQRIEKEKWHRLEAKDLERRNEELEELYLLERCFPEAEKLKQETKLLSQWKHYIQCDGSPDPSVAQEMNTFISLWKEKTNETFEEVIEKSKVVLNLIEKLKFILLETPPCDLQDKNIIQYQESILQLQELLHLKFGVATEILLKQASTLADLDSGNMEKVIKDENVTLYVWANLKKNPRHRSVRFSETQIGFEIPRILATSDIAVRLLHTHYDHVSALHPVSTPSKEYTSAVTELVKDDVKNVEKAISKEVEEESKQQERGSHLIQEEEIKVEEEQGDIEVKMSSAEEESEAIKCEREMKVLSETVSAAQLLLVENSSEKPDFFEDNVVDLCQFTTLGGVYHLDILELPPQCKPVKGWMIVEILKEGLQKYTYPPETTEEFETENAFPPIEVTLEVHENVIFFEDPVVVRWDAEGKHWRTDGISNVSYKPKERLVTFSLDTFGPVTLIQDAHINMPYQSWELRPLDVNKVLLTVTTVFTEIQIQIKENLCMLSSIKLKDKKHISILEGTWMTPIPFIIALKEAGLNIFPTRHSHFYVIINNKVPLVEVKAYRQMALLSSAFAFGWSKWNLLCNSTKVVFKVREHLTEACTENPNWALLMFSGDRAQRLKIKEESEAFSEALKEETEFHSTLYHMVKDFASEEAMEKVRSSNCQFVNSVCHMLLSTRLLSYS

SEQ ID NO: 9317 - DNA, 2491 bp, Homo sapiens
gtcgtccgggcaacccgggagcgtttgtccacacaatttctgctccgactctgcggactactgcagtggagcttgactcttaatgtctggcagtaagaaaaagaaagtcaccaaagctgaacgattgaagctgctacaagaggaggaggagagacgactgaaagaggaagaggaagcccgtttgaaatatgagaaagaagaaatggaaaggcttgaaatacagcgaattgagaaagaaaaatggcatcgacttgaagcaaaagatctagaaaggagaaatgaagaacttgaagaactttatttattagagaggtgttttcctgaagcagagaaattgaaacaggaaactaaattgctttctcagtggaagcactacattcaatgtgatgggagtcctgatccttcagtagcccaagaaatgaacacgtttattagtttgtggaaagagaaaacaaatgagacttttgaggaagtgattgagaagagtaaagtagtgctaaatttaattgagaaattgaaatttattttactggaaactccaccatgtgatttgcaagataaaaatataatacagtaccaagaatcaatactacaactgcaggagctccttcatcttaaattcggtgtagccacagaaatacttctcaaacaagctagtactttggcagatctggacagtggaaatatggaaaaagtcattaaagatgaaaatgttactctgtatgtgtgggcaaacctcaagaagaatccaaggcacagaagtgttagattctctgaaacacaaattggatttgagattccaaggatattagcaacaagtgacattgctgtacgactcctgcatacccactatgatcatgtttctgcactgcaccctgtttcaacaccatcaaaagaatacacttctgcagtaactgagcttgtcaaagatgatgttaagaatgtagaaaaagcaatcagcaaggaggtcgaagaagagtccaaacaacaagaaagagggtctcacttaattcaggaggaagaaataaaagttgaggaggaacaaggtgatattgaagtgaaaatgagttctgctgaggaagaatctgaagccataaaatgtgaacgagagatgaaagtattaagtgaaactgtttcagcagcacagttgttgctggtagagaattcttctgaaaagccagatttctttgaagacaatgtggtggatttatgccagttcacaactctgggtggagtataccacttggatattttggagcttcctccacagtgtaaaccagtgaagggatggatgattgtggaaatactcaaagaaggattacagaaatacacatatcctccggaaactacagaagagtttgagacagaaaatgctttcccacctatagaggtcacacttgaggttcatgagaatgtaatcttttttgaggatcctgtggttgtaaggtgggatgctgaaggtaaacattggagaactgatggcatcagcaatgtatcctacaaaccaaaagaaagacttgtaacattcagcctggacacctttggccctgttaccttgattcaagatgctcatattaacatgccgtaccagtcatgggaactaagaccacttgatgtaaataaagtacttttaactgtgactacagtatttactgagattcaaatacaaattaaggaaaacctctgcatgttatcttcaatcaaactaaaagacaagaaacacatctctattttggaaggaacctggatgactcctattcctttcattattgctttgaaagaagctggactgaatatctttcctactagacactctcatttttatgttattataaacaataaggttcctttggtagaagtgaaagcttatcgacagatggccctactaagttctgcttttgcatttggttggagcaagtggaacctactatgtaattctacaaaagtcgtatttaaggtgagggaacaccttactgaagcatgtactgagaatcctaattgggcccttttaatgtttagtggtgacagagcacaaagactgaagatcaaggaagagagtgaggcattttctgaagcacttaaagaagaaactgagtttcattctactttatatcacatggtgaaggattttgcttctgaggaagcaatggagaaagtcaggagttccaactgtcagtttgtcaactctgtgtgccacatgctgctctctaccagattgctcagctactcctaacctccacttacaaactgtattgtaagtatgaagaaccaagcatggtgaaagacaggtatttctgcaacacaatgtaatgagtgaatgaatacatttcaaatcaactattaaaaattttctaatctgcattttctactcaagttttattttaaaaacagtatttttttttcctttgaatacttggcctgttaagaatttcagctttcactctatgaagatttaaatgattctttatttcaataaactttaacaaacaat

SEQ ID NO: 9318 - protein, 716 aa, Homo sapiens; identical to SEQ ID NO: 9316

SEQ ID NO: 9319 - DNA, 2446 bp, Homo sapiens
actgcagtggagcttgactcttaatggtgagcaaggcaaatgaggcagacaggtggaggggcgaccactgattctgcttcaccagtgttaaataatgtaatcaagagccagtcatattttacagcgaagcgggtcggtttgggaaataactcataccttggggtgggtcggccctcttctcagcaatggctttccttacctggaccaggcggacaggtaggagtcccaaaccatctggcagtaagaaaaagaaagtcaccaaagctgaacgattgaagctgctacaagaggaggaggagagacgactgaaagaggaagaggaagcccgtttgaaatatgagaaagaagaaatggaaaggcttgaaatacagcgaattgagaaagaaaaatggcatcgacttgaagcaaaagatctagaaaggagaaatgaagaacttgaagaactttatttattagagaggtgttttcctgaagcagagaaattgaaacaggaaactaaattgctttctcagtggaagcactacattcaatgtgatgggagtcctgatccttcagtagcccaagaaatgaacacgtttattagtttgtggaaagagaaaacaaatgagacttttgaggaagtgattgagaagagtaaagtagtgctaaatttaattgagaaattgaaatttattttactggaaactccaccatgtgatttgcaagataaaaatataatacagtaccaagaatcaatactacaactgcaggagctccttcatcttaaattcggtgtagccacagaaatacttctcaaacaagctagtactttggcagatctggacagtggaaatatggaaaaagtcattaaagatgaaaatgttactctgtatgtgtgggcaaacctcaagaagaatccaaggcacagaagtgttagattctctgaaacacaaattggatttgagattccaaggatattagcaacaagtgacattgctgtacgactcctgcatacccactatgatcatgtttctgcactgcaccctgtttcaacaccatcaaaagaatacacttctgcagtaactgagcttgtcaaagatgatgttaagaatgtagaaaaagcaatcagcaaggaggtcgaagaagagtccaaacaacaagaaagagggtctcacttaattcaggaggaagaaataaaagttgaggaggaacaaggtgatattgaagtgaaaatgagttctgctgaggaagaatctgaagccataaaatgtgaacgagagatgaaagtattaagtgaaactgtttcagcagcacagttgttgctggtagagaattcttctgaaaagccagatttctttgaagacaatgtggtggatttatgccagttcacaactctgggtggagtataccacttggatattttggagcttcctccacagtgtaaaccagtgaagggatggatgattgtggaaatactcaaagaaggattacagaaatacacatatcctccggaaactacagaagagtttgagacagaaaatgctttcccacctatagaggtcacacttgaggttcatgagaatgtaatcttttttgaggatcctgtggttgtaaggtgggatgctgaaggtaaacattggagaactgatggcatcagcaatgtatcctacaaaccaaaagaaagacttgtaacattcagcctggacacctttggccctgttaccttgattcaagatgctcatattaacatgccgtaccagtcatgggaactaagaccacttgatgtaaataaagtacttttaactgtgactacagtatttactgagattcaaatacaaattaaggaaaacctctgcatgttatcttcaatcaaactaaaagacaagaaacacatctctattttggaaggaacctggatgactcctattcctttcattattgctttgaaagaagctggactgaatatctttcctactagacactctcatttttatgttattataaacaataaggttcctttggtagaagtgaaagcttatcgacagatggccctactaagttctgcttttgcatttggttggagcaagtggaacctactatgtaattctacaaaagtcgtatttaagtggtgacagagcacaaagactgaagatcaaggaagagagtgaggcattttctgaagcacttaaagaagaaactgagtttcattctactttatatcacatggtgaaggattttgcttctgaggaagcaatggagaaagtcaggagttccaactgtcagtttgtcaactctgtgtgccacatgctgctctctaccagattgctcagctactcctaacctccacttacaaactgtattgtaagtatgaagaaccaagcatggtgaaagacaggtatttctgcaacacaatgtaatgagtgaatgaatacatttcaaatcaactattaaaaattttctaatctgc

SEQ ID NO: 9320 - protein, 641 aa, Homo sapiens
MAFLTWTRRTGRSPKPSGSKKKKVTKAERLKLLQEEEERRLKEEEEARLKYEKEEMERLEIQRIEKEKWHRLEAKDLERRNEELEELYLLERCFPEAEKLKQETKLLSQWKHYIQCDGSPDPSVAQEMNTFISLWKEKTNETFEEVIEKSKVVLNLIEKLKFILLETPPCDLQDKNIIQYQESILQLQELLHLKFGVATEILLKQASTLADLDSGNMEKVIKDENVTLYVWANLKKNPRHRSVRFSETQIGFEIPRILATSDIAVRLLHTHYDHVSALHPVSTPSKEYTSAVTELVKDDVKNVEKAISKEVEEESKQQERGSHLIQEEEIKVEEEQGDIEVKMSSAEEESEAIKCEREMKVLSETVSAAQLLLVENSSEKPDFFEDNVVDLCQFTTLGGVYHLDILELPPQCKPVKGWMIVEILKEGLQKYTYPPETTEEFETENAFPPIEVTLEVHENVIFFEDPVVVRWDAEGKHWRTDGISNVSYKPKERLVTFSLDTFGPVTLIQDAHINMPYQSWELRPLDVNKVLLTVTTVFTEIQIQIKENLCMLSSIKLKDKKHISILEGTWMTPIPFIIALKEAGLNIFPTRHSHFYVIINNKVPLVEVKAYRQMALLSSAFAFGWSKWNLLCNSTKVVFKW

SEQ ID NO: 9321 - DNA, 2360 bp, Homo sapiens
gtcgtccgggcaacccgggagcgtttgtccacacaatttctgctccgactctgcggactactgcagtggagcttgactcttaatgtctggcagtaagaaaaagaaagtcaccaaagctgaacgattgaagctgctacaagaggaggaggagagacgactgaaagaggaagaggaagcccgtttgaaatatgagaaagaagaaatggaaaggcttgaaatacagcgaattgagaaagaaaaatggcatcgacttgaagcaaaagatctagaaaggagaaatgaagaacttgaagaactttatttattagagaggtgttttcctgaagcagagaaattgaaacaggaaactaaattgctttctcagtggaagcactacattcaatgtgatgggagtcctgatccttcagtagcccaagaaatgaacacgtttattagtttgtggaaagagaaaacaaatgagacttttgaggaagtgattgagaagagtaaagtagtgctaaatttaattgagaaattgaaatttattttactggaaactccaccatgtgatttgcaagataaaaatataatacagtaccaagaatcaatactacaactgcaggagctccttcatcttaaattcggtgtagccacagaaatacttctcaaacaagctagtactttggcagatctggacagtggaaatatggaaaaagtcattaaagatgaaaatgttactctgtatgtgtgggcaaacctcaagaagaatccaaggcacagaagtgttagattctctgaaacacaaattggatttgagattccaaggatattagcaacaagtgacattgctgtacgactcctgcatacccactatgatcatgtttctgcactgcaccctgtttcaacaccatcaaaagaatacacttctgcagtaactgagcttgtcaaagatgatgttaagaatgtagaaaaagcaatcagcaaggaggtcgaagaagagtccaaacaacaagaaagagggtctcacttaattcaggaggaagaaataaaagttgaggaggaacaaggtgatattgaagtgaaaatgagttctgctgaggaagaatctgaagccataaaatgtgaacgagagatgaaagtattaagtgaaactgtttcagcagcacagttgttgctggtagagaattcttctgaaaagccagatttctttgaagacaatgtggtggatttatgccagttcacaactctgggtggagtataccacttggatattttggagcttcctccacagtgtaaaccagtgaagggatggatgattgtggaaatactcaaagaaggattacagaaatacacatatcctccggaaactacagaagagtttgagacagaaaatgctttcccacctatagaggtcacacttgaggttcatgagaatgtaatcttttttgaggatcctgtggttgtaaggtgggatgctgaaggtaaacattggagaactgatggcatcagcaatgtatcctacaaaccaaaagaaagacttgtaacattcagcctggacacctttggccctgttaccttgattcaagatgctcatattaacatgccgtaccagtcatgggaactaagaccacttgatgtaaataaagtacttttaactgtgactacagtatttactgagattcaaatacaaattaaggaaaacctctgcatgttatcttcaatcaaactaaaagacaagaaacacatctctattttggaaggaacctggatgactcctattcctttcattattgctttgaaagaagctggactgaatatctttcctactagacactctcatttttatgttattataaacaataaggttcctttggtagaagtgaaagcttatcgacagatggccctactaagttctgcttttgcatttggttggagcaagtggaacctactatgtaattctacaaaagtcgtatttaaggtgagggaacaccttactgaagcatgtactgagaatcctaattgggcccttttaatgtttagtggtgacagagcacaaagactgaagatcaaggaagagagtgaggcattttctgaagcacttaaagaagaaactgagtttcattctactttatatcacatggtgaaggattttgcttctgaggaagcaatggagaaagtcaggagttccaactgtcagtttgtcaactctgtgtgccacatgctgctctctaccagattgctcagctactcctaacctccacttacaaactgtattgtaagtatgaagaaccaagcatggtgaaagacaggtatttctgcaacacaatgtaatgagtgaatgaatacatttcaaatcaactattaaaaattttctaatctgc

SEQ ID NO: 9322 - protein, 716 aa, Homo sapiens; identical to SEQ ID NO: 9316

SEQ ID NO: 9323 - DNA, 2557 bp, Homo sapiens
ggctgacggcaggggaggagccgggtccactgccgggtggaggggcaaggcgagtgtgtgtccttatcctagcaattggggcgcgggcctgtgagccagttggagttgcggcggcgggaacgattgggctgagcagaggacgacatgttgcttttcgtggagcaggtagcatctaaaggaactggtttaaatcctaatgccaaagtatggcaagaaattgctcctggaaatactgatgccaccccagtaactcatggaactgaaagctcttggcatgaaatagcagctacatcaggtgctcatcctgagggtaatgcagagctctcagaagatatatgtaaagaatatgaagtaatgtattcttcatcttgtgaaaccacaagaaatactacaggcattgaagaatcaactgatgggatgattttaggaccaagtcataagcgttgtattgtaattcttagagagattcctgaaacaacaccaatagaggaagtgaaaggtttgttcaaaagtgaaaactgccccaaagtgataagctgtgagtttgcacacaatagcaactggtatatcactttccagtcagacacagatgcacaacaggcttttaaatacttaagagaagaagttaaaacatttcagggcaagccaattatggcaaggataaaagccatcaatacattttttgctaagaatggttatcgattaatggattctagtatctatagtcaccccattcaaactcaagcacagtatgcctccccagtctttatgcagcctgtatataatcctcaccaacagtactcggtctatagtattgtgcctcagtcttggtctccaaatcctacaccttactttgaaacaccactggctccctttcccaatggtagttttgtgaatggctttaattcgccaggatcttataaaacaaatgctgctgctatgaatatgggtcgaccattccaaaaaaatcgtgtgaagcctcagtttaggtcatctggtggttcagaacactcaacagagggctctgtatccttgggggatggacagttgaacagatatagttcaagaaactttccagctgaacggcataaccccacagtaactgggcatcaggagcaaacttaccttcagaaggagacttccactttgcaggtggaacagaatggggactatggtaggggcaggagaactctcttcagaggtcgaagacgacgagaagatgacaggatctcaagacctcatccttcaacagctgaatcaaaggctccaacaccaaagtttgacttattagcctcaaattttccacctttacctggaagttcatcaagaatgccaggtgaactcgttttggagaataggatgtctgatgttgttaaaggtgtctacaaagaaaaggataatgaagagttgacaattagttgcccagtgcctgcagatgagcagacagaatgcacttctgcccagcaactcaatatgagtaccagttctccatgtgctgctgagcttactgcattaagcacaactcagcaagaaaaggatctaatagaagattcctctgttcagaaggatggtctcaatcagacaactataccagtttctcctccaagtactacaaagccatcgagggaaccccgaaagttaagttatgctgaagtgtgccagaagccccctaaagagccatcttcagttcttgtgcagccactacgggaacttcgctccaatgtggtgtctcccaccaaaaatgaagacaatggagctcctgagaactccgttgagaaaccacatgagaagccagaagcaagggctagtaaggattattctggcttccgaggcaatataatccccaggggagcagcaggaaaaatcagggaacagagacgccagtttagccatagggctatacctcagggagtgactcgacgtaatggcaaagagcaatatgtgccacccagatcaccaaagtaaaaaacaacaaaactattcaaaaacttcactctcttcccattaaacttgaactgtggctatattgaactgttttggaggggagggggtagccaggaaggaaacaagagaaagtacgtccatttcattatggattttggagttgtgagtgataggatcccaaaattcatctctaatgtggtttttaaatgctggaggattccaatcaatataaatatatatatatatatacacacacatatataaaaagtataatttttctatttttgtttttggttttaatttgcagagatttgctgccaggaatcaattttgagggttcagatttagcttggaagaaaaaaaagaaacatacatccttcagtataggagatgagggaatgagagaaaatattttttgaagaagcatttctgtaaaattagaaattactttttttaatctatttaaagtttggcttgaagaatgccatctctgactatatggccttgtattgcaaagcggatcagtggctggggtgcctgttgtgggtgtgagtgtgtacaagagcgattgaagccaaatctgttgtcatgttagtaaatgatttgaaaactg

SEQ ID NO: 9324 - protein, 606 aa, Homo sapiens
MLLFVEQVASKGTGLNPNAKVWQEIAPGNTDATPVTHGTESSWHEIAATSGAHPEGNAELSEDICKEYEVMYSSSCETTRNTTGIEESTDGMILGPSHKRCIVILREIPETTPIEEVKGLFKSENCPKVISCEFAHNSNWYITFQSDTDAQQAFKYLREEVKTFQGKPIMARIKAINTFFAKNGYRLMDSSIYSHPIQTQAQYASPVFMQPVYNPHQQYSVYSIVPQSWSPNPTPYFETPLAPFPNGSFVNGFNSPGSYKTNAAAMNMGRPFQKNRVKPQFRSSGGSEHSTEGSVSLGDGQLNRYSSRNFPAERHNPTVTGHQEQTYLQKETSTLQVEQNGDYGRGRRTLFRGRRRREDDRISRPHPSTAESKAPTPKFDLLASNFPPLPGSSSRMPGELVLENRMSDVVKGVYKEKDNEELTISCPVPADEQTECTSAQQLNMSTSSPCAAELTALSTTQQEKDLIEDSSVQKDGLNQTTIPVSPPSTTKPSREPRKLSYAEVCQKPPKEPSSVLVQPLRELRSNVVSPTKNEDNGAPENSVEKPHEKPEARASKDYSGFRGNIIPRGAAGKIREQRRQFSHRAIPQGVTRRNGKEQYVPPRSPK

SEQ ID NO: 9325 - DNA, 6247 bp, Homo sapiens
ggctgacggcaggggaggagccgggtccactgccgggtggaggggcaaggcgagtgtgtgtccttatcctagcaattggggcgcgggcctgtgagccagttggagttgcggcggcgggaacgattgggctgagcagaggacgacatgttgcttttcgtggagcaggtagcatctaaaggaactggtttaaatcctaatgccaaagtatggcaagaaattgctcctggaaatactgatgccaccccagtaactcatggaactgaaagctcttggcatgaaatagcagctacatcaggtgctcatcctgagggtaatgcagagctctcagaagatatatgtaaagaatatgaagtaatgtattcttcatcttgtgaaaccacaagaaatactacaggcattgaagaatcaactgatgggatgattttaggaccagaagatctgagttaccaaatatatgatgtttccggagaaagcaattcagcagtttctacagaagacctaaaagaatgtctgaagaaacaattagaattctgtttttcacgagaaaatttgtcaaaggatctttacttgatatctcaaatggatagtgatcagttcatcccaatttggacagttgccaacatggaagaaataaaaaagttgactacagaccctgatctaattcttgaagtgttaagatcttctcccatggtacaagttgatgagaagggtgagaaagtgagaccaagtcataagcgttgtattgtaattcttagagagattcctgaaacaacaccaatagaggaagtgaaaggtttgttcaaaagtgaaaactgccccaaagtgataagctgtgagtttgcacacaatagcaactggtatatcactttccagtcagacacagatgcacaacaggcttttaaatacttaagagaagaagttaaaacatttcagggcaagccaattatggcaaggataaaagccatcaatacattttttgctaagaatggttatcgattaatggattctagtatctatagtcaccccattcaaactcaagcacagtatgcctccccagtctttatgcagcctgtatataatcctcaccaacagtactcggtctatagtattgtgcctcagtcttggtctccaaatcctacaccttactttgaaacaccactggctccctttcccaatggtagttttgtgaatggctttaattcgccaggatcttataaaacaaatgctgctgctatgaatatgggtcgaccattccaaaaaaatcggagaactctcttcagaggtcgaagacgacgagaagatgacaggatctcaagacctcatccttcaacagctgaatcaaaggctccaacaccaaagtttgacttattagcctcaaattttccacctttacctggaagttcatcaagaatgccaggtgaactcgttttggagaataggatgtctgatgttgttaaaggtgtctacaaagaaaaggataatgaagagttgacaattagttgcccagtgcctgcagatgagcagacagaatgcacttctgcccagcaactcaatatgagtaccagttctccatgtgctgctgagcttactgcattaagcacaactcagcaagaaaaggatctaatagaagattcctctgttcagaaggatggtctcaatcagacaactataccagtttctcctccaagtactacaaagccatcgagggcaagtactgcttcaccatgtaataataacataaatgcagctacagctgtggctctacaggaaccccgaaagttaagttatgctgaagtgtgccagaagccccctaaagagccatcttcagttcttgtgcagccactacgggaacttcgctccaatgtggtgtctcccaccaaaaatgaagacaatggagctcctgagaactccgttgagaaaccacatgagaagccagaagcaagggctagtaaggattattctggcttccgaggcaatataatccccaggggagcagcaggaaaaatcagggaacagagacgccagtttagccatagggctatacctcagggagtgactcgacgtaatggcaaagagcaatatgtgccacccagatcaccaaagtaaaaaacaacaaaactattcaaaaacttcactctcttcccattaaacttgaactgtggctatattgaactgttttggaggggagggggtagccaggaaggaaacaagagaaagtacgtccatttcattatggattttggagttgtgagtgataggatcccaaaattcatctctaatgtggtttttaaatgctggaggattccaatcaatataaatatatatatatatatacacacacatatataaaaagtataatttttctatttttgtttttggttttaatttgcagagatttgctgccaggaatcaattttgagggttcagatttagcttggaagaaaaaaaagaaacatacatccttcagtataggagatgagggaatgagagaaaatattttttgaagaagcatttctgtaaaattagaaattactttttttaatctatttaaagtttggcttgaagaatgccatctctgactatatggccttgtattgcaaagcggatcagtggctggggtgcctgttgtgggtgtgagtgtgtacaagagcgattgaagccaaatctgttgtcatgttagtaaatgatttgaaaactgaatgtaatacttgagtagatttttttttctagtttgaaatttagtctgtctttttgaccttactaatatttcatttaacaagttgtaaaactctgattgtacttagagatgtgactaccaatcagtttgatactcaaggaaagggggttattcaagaaattgaaaatttcatcttggacctcagtgcataggtcaaatggatttcagaggtttaaacttccctgtgattcccccgaatacccccaaaatgagaaacaaaattttttttcttactccatttgttactctctgttctttgactgcccacccacagaaaagcaaaataaccaactacctactcaattgtgtgtttgtaattgctttgagcagtctagtcaaatcatataaattgttctaaatttcagaattgaacattgaagtattaactcttctgttcacacatttagaattttagctcccaagatggtagggcagactgaccgtacagtaatttatttgtcgttagtgttaaagattaagcatagtaactgactcttaagtgttaaataatgtagaagtaaaaaaattttttttaaaggcttaatttgggaggggggacttatttctgtttacagtgtattaccttccttccctcctcttctccccccacacccaacaaaatacagtttggaattcactgaaacagtaccagcaagtcatgagattttttagtaaagatgagaaagatggttgaagaaaattagtgcataatttctcagtgaataaagttgtagctctcatatactaaatagacaagtttacatgctgttatttagaaaatgactaaaatattaaaaaccgtgttgtgttaatctgttttaagtcataccatgttcagagttctatgtaaggtgggttttatttttcttttaagggatagtttgtaatagtaagaactgtcccatatgttagtaaattacatatgtacaaattgaaactgtaaattgtgaacactggaaagcaccattgtgacatagagtaaacatcttagtaatatattaaagtgaatgtaaatggtggttaaaattacattactgtgaaattcatcttccaactctaagttaagctttggagatacatgttagtggttaactgttaagagctttgaaaacactgcacatatctgtacaagccagaattactatttctttgacttattattagcttggcagttgcttttgatttgattgttttatgacatggtatactactatatttactcagtttgaaactattcatttctacacactatttttaaaaattgcctactaggtgaaacataacaataaaactacctgtgctgaaatttgggggaagtttaggtcctttaaaaaaacatattaatcattgactacatctatgataaaagtgcttattttggtttactaagataatgcagttggtggaaatgataaacgttttaagtgttaacatcctttgaatgcgttggatttcagagaataaacattttgtaaaaatcacttggtaaggattataaacttaattactgcacttaaaatgaaacattactttttttaaacaatgtgtcacaaatgtaggtctgtattacttgtatgcttgtgtgacttactgttagtccagctctaaaaatttaaaggttgtaattgaaatacaagaaaagagccttcttttagaagaaagcaagtatatttttgcttttacttcaaatgttatttaaagtagaaatttaatttgtagatataacctttaaaaattttctcattaagacaatgtttttaatttaatttgcctcattacatctaatagttcccatttgatggcatgtatagggaagagtgagagagtgtgtgtgtgtgtatgtgtgtgtaatatttatatatattcacagtatgtatttagcatttattttattacagcagatttaaagtttgtatctaaataatgcctatgagttgtgtgaagctcttggcttttttccaacgttactttgtaactaatgagggtggatgttcattgtagtttatttatttggttctttagatggaggaatttaaaaaatcaaatttttctcttcacctttatgacttgacatttccttgatctgttggaggctaaaagtaggtataaatgatattgaatgttgggtatagtgatactctgccatagttcttactgcatgaagagaacaagagtcacacaagttcaccactttgcacttcatagagaaggtacatagagacattgcaaaacctgtctccatttgctatcctgataattaaggttttcataatacctagggcctgtctctgagtaattttaattttgccaaatacactgacatttaaaatagtgatccatctaaatttttttcagctgggttttgaggaatataagagctttcaatgataaaggtttgttgtagttgtcttatgtgctgaatttgcagatgatcagatgctgtgcagaattctgatttatttttgtttcctaaaattaagatagcttgaatattatttcacattcctttttcttttttaaataaacaggtttgctttggaaaggcttaatgatggaatgttagcatcttcactagggtaaagaagaacaaaaagaatgttgctggaacgtaaaatagtatttaaaagttaatgaacacttctctagttttcttagttatggccttaataattagtctcttggcttaaatgtccactggttttactttgacacagttgaacaacactggggttaagtctctggtatttaggctggcaatatatatattaaccatattttaaaagtaccaattttgtttttacagaaaagataaaactcaaaagagaacagtgtattccttctgaggggcttttataaattattaactataatatatgatggattttttcctaattttttatatttccttacaattttggtggccattaatttaactttaggcttttgggcatatgctagtctgagcttccgaaaagatacatatatgtttcccttttcattagctgaatgaggatattttaagaagttgaaagagaatttattttcaagttgtgagtaaatcctcctttgaaattcacctgattattagataacttaaagtttatttttaaaagctgacaactttttatgaatcttcgagttgacagttcctaaaagcgtaactcagatattaatgggctgtgtattaaatggttttattttcagttttgcagcacagaacactgttgaaatatccatatcaacttgatttttttaacctaattcaggtgtcctttgcatctcttaaatgttgggggtgggggtcagagccagttatccggcttctgttttgtcgattgcttagatttgttcctgttgtcaaaactgttacccccaaaattggtgtgacacatgctcatgcataaaatgttaaaatgagtacatccttgtatttgtatttgttttcaacatcgccaaggtgctatgggaaattaacaaaattagaaaaaaaataaaattattaaaaagcag

SEQ ID NO: 9326 - protein, 653 aa, Homo sapiens
MLLFVEQVASKGTGLNPNAKVWQEIAPGNTDATPVTHGTESSWHEIAATSGAHPEGNAELSEDICKEYEVMYSSSCETTRNTTGIEESTDGMILGPEDLSYQIYDVSGESNSAVSTEDLKECLKKQLEFCFSRENLSKDLYLISQMDSDQFIPIWTVANMEEIKKLTTDPDLILEVLRSSPMVQVDEKGEKVRPSHKRCIVILREIPETTPIEEVKGLFKSENCPKVISCEFAHNSNWYITFQSDTDAQQAFKYLREEVKTFQGKPIMARIKAINTFFAKNGYRLMDSSIYSHPIQTQAQYASPVFMQPVYNPHQQYSVYSIVPQSWSPNPTPYFETPLAPFPNGSFVNGFNSPGSYKTNAAAMNMGRPFQKNRRTLFRGRRRREDDRISRPHPSTAESKAPTPKFDLLASNFPPLPGSSSRMPGELVLENRMSDVVKGVYKEKDNEELTISCPVPADEQTECTSAQQLNMSTSSPCAAELTALSTTQQEKDLIEDSSVQKDGLNQTTIPVSPPSTTKPSRASTASPCNNNINAATAVALQEPRKLSYAEVCQKPPKEPSSVLVQPLRELRSNVVSPTKNEDNGAPENSVEKPHEKPEARASKDYSGFRGNIIPRGAAGKIREQRRQFSHRAIPQGVTRRNGKEQYVPPRSPK

SEQ ID NO: 9327 - DNA, 6106 bp, Homo sapiens
ggctgacggcaggggaggagccgggtccactgccgggtggaggggcaaggcgagtgtgtgtccttatcctagcaattggggcgcgggcctgtgagccagttggagttgcggcggcgggaacgattgggctgagcagaggacgacatgttgcttttcgtggagcaggtagcatctaaaggaactggtttaaatcctaatgccaaagtatggcaagaaattgctcctggaaatactgatgccaccccagtaactcatggaactgaaagctcttggcatgaaatagcagctacatcaggtgctcatcctgagggtaatgcagagctctcagaagatatatgtaaagaatatgaagtaatgtattcttcatcttgtgaaaccacaagaaatactacaggcattgaagaatcaactgatgggatgattttaggaccaagtcataagcgttgtattgtaattcttagagagattcctgaaacaacaccaatagaggaagtgaaaggtttgttcaaaagtgaaaactgccccaaagtgataagctgtgagtttgcacacaatagcaactggtatatcactttccagtcagacacagatgcacaacaggcttttaaatacttaagagaagaagttaaaacatttcagggcaagccaattatggcaaggataaaagccatcaatacattttttgctaagaatggttatcgattaatggattctagtatctatagtcaccccattcaaactcaagcacagtatgcctccccagtctttatgcagcctgtatataatcctcaccaacagtactcggtctatagtattgtgcctcagtcttggtctccaaatcctacaccttactttgaaacaccactggctccctttcccaatggtagttttgtgaatggctttaattcgccaggatcttataaaacaaatgctgctgctatgaatatgggtcgaccattccaaaaaaatcgtgtgaagcctcagtttaggtcatctggtggttcagaacactcaacagagggctctgtatccttgggggatggacagttgaacagatatagttcaagaaactttccagctgaacggcataaccccacagtaactgggcatcaggagcaaacttaccttcagaaggagacttccactttgcaggtggaacagaatggggactatggtaggggcaggagaactctcttcagaggtcgaagacgacgagaagatgacaggatctcaagacctcatccttcaacagctgaatcaaaggctccaacaccaaagtttgacttattagcctcaaattttccacctttacctggaagttcatcaagaatgccaggtgaactcgttttggagaataggatgtctgatgttgttaaaggtgtctacaaagaaaaggataatgaagagttgacaattagttgcccagtgcctgcagatgagcagacagaatgcacttctgcccagcaactcaatatgagtaccagttctccatgtgctgctgagcttactgcattaagcacaactcagcaagaaaaggatctaatagaagattcctctgttcagaaggatggtctcaatcagacaactataccagtttctcctccaagtactacaaagccatcgagggaaccccgaaagttaagttatgctgaagtgtgccagaagccccctaaagagccatcttcagttcttgtgcagccactacgggaacttcgctccaatgtggtgtctcccaccaaaaatgaagacaatggagctcctgagaactccgttgagaaaccacatgagaagccagaagcaagggctagtaaggattattctggcttccgaggcaatataatccccaggggagcagcaggaaaaatcagggaacagagacgccagtttagccatagggctatacctcagggagtgactcgacgtaatggcaaagagcaatatgtgccacccagatcaccaaagtaaaaaacaacaaaactattcaaaaacttcactctcttcccattaaacttgaactgtggctatattgaactgttttggaggggagggggtagccaggaaggaaacaagagaaagtacgtccatttcattatggattttggagttgtgagtgataggatcccaaaattcatctctaatgtggtttttaaatgctggaggattccaatcaatataaatatatatatatatatacacacacatatataaaaagtataatttttctatttttgtttttggttttaatttgcagagatttgctgccaggaatcaattttgagggttcagatttagcttggaagaaaaaaaagaaacatacatccttcagtataggagatgagggaatgagagaaaatattttttgaagaagcatttctgtaaaattagaaattactttttttaatctatttaaagtttggcttgaagaatgccatctctgactatatggccttgtattgcaaagcggatcagtggctggggtgcctgttgtgggtgtgagtgtgtacaagagcgattgaagccaaatctgttgtcatgttagtaaatgatttgaaaactgaatgtaatacttgagtagatttttttttctagtttgaaatttagtctgtctttttgaccttactaatatttcatttaacaagttgtaaaactctgattgtacttagagatgtgactaccaatcagtttgatactcaaggaaagggggttattcaagaaattgaaaatttcatcttggacctcagtgcataggtcaaatggatttcagaggtttaaacttccctgtgattcccccgaatacccccaaaatgagaaacaaaattttttttcttactccatttgttactctctgttctttgactgcccacccacagaaaagcaaaataaccaactacctactcaattgtgtgtttgtaattgctttgagcagtctagtcaaatcatataaattgttctaaatttcagaattgaacattgaagtattaactcttctgttcacacatttagaattttagctcccaagatggtagggcagactgaccgtacagtaatttatttgtcgttagtgttaaagattaagcatagtaactgactcttaagtgttaaataatgtagaagtaaaaaaattttttttaaaggcttaatttgggaggggggacttatttctgtttacagtgtattaccttccttccctcctcttctccccccacacccaacaaaatacagtttggaattcactgaaacagtaccagcaagtcatgagattttttagtaaagatgagaaagatggttgaagaaaattagtgcataatttctcagtgaataaagttgtagctctcatatactaaatagacaagtttacatgctgttatttagaaaatgactaaaatattaaaaaccgtgttgtgttaatctgttttaagtcataccatgttcagagttctatgtaaggtgggttttatttttcttttaagggatagtttgtaatagtaagaactgtcccatatgttagtaaattacatatgtacaaattgaaactgtaaattgtgaacactggaaagcaccattgtgacatagagtaaacatcttagtaatatattaaagtgaatgtaaatggtggttaaaattacattactgtgaaattcatcttccaactctaagttaagctttggagatacatgttagtggttaactgttaagagctttgaaaacactgcacatatctgtacaagccagaattactatttctttgacttattattagcttggcagttgcttttgatttgattgttttatgacatggtatactactatatttactcagtttgaaactattcatttctacacactatttttaaaaattgcctactaggtgaaacataacaataaaactacctgtgctgaaatttgggggaagtttaggtcctttaaaaaaacatattaatcattgactacatctatgataaaagtgcttattttggtttactaagataatgcagttggtggaaatgataaacgttttaagtgttaacatcctttgaatgcgttggatttcagagaataaacattttgtaaaaatcacttggtaaggattataaacttaattactgcacttaaaatgaaacattactttttttaaacaatgtgtcacaaatgtaggtctgtattacttgtatgcttgtgtgacttactgttagtccagctctaaaaatttaaaggttgtaattgaaatacaagaaaagagccttcttttagaagaaagcaagtatatttttgcttttacttcaaatgttatttaaagtagaaatttaatttgtagatataacctttaaaaattttctcattaagacaatgtttttaatttaatttgcctcattacatctaatagttcccatttgatggcatgtatagggaagagtgagagagtgtgtgtgtgtgtatgtgtgtgtaatatttatatatattcacagtatgtatttagcatttattttattacagcagatttaaagtttgtatctaaataatgcctatgagttgtgtgaagctcttggcttttttccaacgttactttgtaactaatgagggtggatgttcattgtagtttatttatttggttctttagatggaggaatttaaaaaatcaaatttttctcttcacctttatgacttgacatttccttgatctgttggaggctaaaagtaggtataaatgatattgaatgttgggtatagtgatactctgccatagttcttactgcatgaagagaacaagagtcacacaagttcaccactttgcacttcatagagaaggtacatagagacattgcaaaacctgtctccatttgctatcctgataattaaggttttcataatacctagggcctgtctctgagtaattttaattttgccaaatacactgacatttaaaatagtgatccatctaaatttttttcagctgggttttgaggaatataagagctttcaatgataaaggtttgttgtagttgtcttatgtgctgaatttgcagatgatcagatgctgtgcagaattctgatttatttttgtttcctaaaattaagatagcttgaatattatttcacattcctttttcttttttaaataaacaggtttgctttggaaaggcttaatgatggaatgttagcatcttcactagggtaaagaagaacaaaaagaatgttgctggaacgtaaaatagtatttaaaagttaatgaacacttctctagttttcttagttatggccttaataattagtctcttggcttaaatgtccactggttttactttgacacagttgaacaacactggggttaagtctctggtatttaggctggcaatatatatattaaccatattttaaaagtaccaattttgtttttacagaaaagataaaactcaaaagagaacagtgtattccttctgaggggcttttataaattattaactataatatatgatggattttttcctaattttttatatttccttacaattttggtggccattaatttaactttaggcttttgggcatatgctagtctgagcttccgaaaagatacatatatgtttcccttttcattagctgaatgaggatattttaagaagttgaaagagaatttattttcaagttgtgagtaaatcctcctttgaaattcacctgattattagataacttaaagtttatttttaaaagctgacaactttttatgaatcttcgagttgacagttcctaaaagcgtaactcagatattaatgggctgtgtattaaatggttttattttcagttttgcagcacagaacactgttgaaatatccatatcaacttgatttttttaacctaattcaggtgtcctttgcatctcttaaatgttgggggtgggggtcagagccagttatccggcttctgttttgtcgattgcttagatttgttcctgttgtcaaaactgttacccccaaaattggtgtgacacatgctcatgcataaaatgttaaaatgagtacatccttgtatttgtatttgttttcaacatcgccaaggtgctatgggaaattaacaaaattagaaaaaaaataaaattattaaaaagcag

SEQ ID NO: 9328 - protein, 606 aa, Homo sapiens; identical to SEQ ID NO: 9324

SEQ ID NO: 9329 - DNA, 6247 bp, Homo sapiens
ggctgacggcaggggaggagccgggtccactgccgggtggaggggcaaggcgagtgtgtgtccttatcctagcaattggggcgcgggcctgtgagccagttggagttgcggcggcgggaacgattgggctgagcagaggacgacatgttgcttttcgtggagcaggtagcatctaaaggaactggtttaaatcctaatgccaaagtatggcaagaaattgctcctggaaatactgatgccaccccagtaactcatggaactgaaagctcttggcatgaaatagcagctacatcaggtgctcatcctgagggtaatgcagagctctcagaagatatatgtaaagaatatgaagtaatgtattcttcatcttgtgaaaccacaagaaatactacaggcattgaagaatcaactgatgggatgattttaggaccagaagatctgagttaccaaatatatgatgtttccggagaaagcaattcagcagtttctacagaagacctaaaagaatgtctgaagaaacaattagaattctgtttttcacgagaaaatttgtcaaaggatctttacttgatatctcaaatggatagtgatcagttcatcccaatttggacagttgccaacatggaagaaataaaaaagttgactacagaccctgatctaattcttgaagtgttaagatcttctcccatggtacaagttgatgagaagggtgagaaagtgagaccaagtcataagcgttgtattgtaattcttagagagattcctgaaacaacaccaatagaggaagtgaaaggtttgttcaaaagtgaaaactgccccaaagtgataagctgtgagtttgcacacaatagcaactggtatatcactttccagtcagacacagatgcacaacaggcttttaaatacttaagagaagaagttaaaacatttcagggcaagccaattatggctccctttcccaatggtagttttgtgaatggctttaattcgccaggatcttataaaacaaatgctgctgctatgaatatgggtcgaccattccaaaaaaatcgtgtgaagcctcagtttaggtcatctggtggttcagaacactcaacagagggctctgtatccttgggggatggacagttgaacagatatagttcaagaaactttccagctgaacggcataaccccacagtaactgggcatcaggagcaaacttaccttcagaaggagacttccactttgcaggtggaacagaatggggactatggtaggggcaggagaactctcttcagaggtcgaagacgacgagaagatgacaggatctcaagacctcatccttcaacagctgaatcaaaggctccaacaccaaagtttgacttattagcctcaaattttccacctttacctggaagttcatcaagaatgccaggtgaactcgttttggagaataggatgtctgatgttgttaaaggtgtctacaaagaaaaggataatgaagagttgacaattagttgcccagtgcctgcagatgagcagacagaatgcacttctgcccagcaactcaatatgagtaccagttctccatgtgctgctgagcttactgcattaagcacaactcagcaagaaaaggatctaatagaagattcctctgttcagaaggatggtctcaatcagacaactataccagtttctcctccaagtactacaaagccatcgagggcaagtactgcttcaccatgtaataataacataaatgcagctacagctgtggctctacaggaaccccgaaagttaagttatgctgaagtgtgccagaagccccctaaagagccatcttcagttcttgtgcagccactacgggaacttcgctccaatgtggtgtctcccaccaaaaatgaagacaatggagctcctgagaactccgttgagaaaccacatgagaagccagaagcaagggctagtaaggattattctggcttccgaggcaatataatccccaggggagcagcaggaaaaatcagggaacagagacgccagtttagccatagggctatacctcagggagtgactcgacgtaatggcaaagagcaatatgtgccacccagatcaccaaagtaaaaaacaacaaaactattcaaaaacttcactctcttcccattaaacttgaactgtggctatattgaactgttttggaggggagggggtagccaggaaggaaacaagagaaagtacgtccatttcattatggattttggagttgtgagtgataggatcccaaaattcatctctaatgtggtttttaaatgctggaggattccaatcaatataaatatatatatatatatacacacacatatataaaaagtataatttttctatttttgtttttggttttaatttgcagagatttgctgccaggaatcaattttgagggttcagatttagcttggaagaaaaaaaagaaacatacatccttcagtataggagatgagggaatgagagaaaatattttttgaagaagcatttctgtaaaattagaaattactttttttaatctatttaaagtttggcttgaagaatgccatctctgactatatggccttgtattgcaaagcggatcagtggctggggtgcctgttgtgggtgtgagtgtgtacaagagcgattgaagccaaatctgttgtcatgttagtaaatgatttgaaaactgaatgtaatacttgagtagatttttttttctagtttgaaatttagtctgtctttttgaccttactaatatttcatttaacaagttgtaaaactctgattgtacttagagatgtgactaccaatcagtttgatactcaaggaaagggggttattcaagaaattgaaaatttcatcttggacctcagtgcataggtcaaatggatttcagaggtttaaacttccctgtgattcccccgaatacccccaaaatgagaaacaaaattttttttcttactccatttgttactctctgttctttgactgcccacccacagaaaagcaaaataaccaactacctactcaattgtgtgtttgtaattgctttgagcagtctagtcaaatcatataaattgttctaaatttcagaattgaacattgaagtattaactcttctgttcacacatttagaattttagctcccaagatggtagggcagactgaccgtacagtaatttatttgtcgttagtgttaaagattaagcatagtaactgactcttaagtgttaaataatgtagaagtaaaaaaattttttttaaaggcttaatttgggaggggggacttatttctgtttacagtgtattaccttccttccctcctcttctccccccacacccaacaaaatacagtttggaattcactgaaacagtaccagcaagtcatgagattttttagtaaagatgagaaagatggttgaagaaaattagtgcataatttctcagtgaataaagttgtagctctcatatactaaatagacaagtttacatgctgttatttagaaaatgactaaaatattaaaaaccgtgttgtgttaatctgttttaagtcataccatgttcagagttctatgtaaggtgggttttatttttcttttaagggatagtttgtaatagtaagaactgtcccatatgttagtaaattacatatgtacaaattgaaactgtaaattgtgaacactggaaagcaccattgtgacatagagtaaacatcttagtaatatattaaagtgaatgtaaatggtggttaaaattacattactgtgaaattcatcttccaactctaagttaagctttggagatacatgttagtggttaactgttaagagctttgaaaacactgcacatatctgtacaagccagaattactatttctttgacttattattagcttggcagttgcttttgatttgattgttttatgacatggtatactactatatttactcagtttgaaactattcatttctacacactatttttaaaaattgcctactaggtgaaacataacaataaaactacctgtgctgaaatttgggggaagtttaggtcctttaaaaaaacatattaatcattgactacatctatgataaaagtgcttattttggtttactaagataatgcagttggtggaaatgataaacgttttaagtgttaacatcctttgaatgcgttggatttcagagaataaacattttgtaaaaatcacttggtaaggattataaacttaattactgcacttaaaatgaaacattactttttttaaacaatgtgtcacaaatgtaggtctgtattacttgtatgcttgtgtgacttactgttagtccagctctaaaaatttaaaggttgtaattgaaatacaagaaaagagccttcttttagaagaaagcaagtatatttttgcttttacttcaaatgttatttaaagtagaaatttaatttgtagatataacctttaaaaattttctcattaagacaatgtttttaatttaatttgcctcattacatctaatagttcccatttgatggcatgtatagggaagagtgagagagtgtgtgtgtgtgtatgtgtgtgtaatatttatatatattcacagtatgtatttagcatttattttattacagcagatttaaagtttgtatctaaataatgcctatgagttgtgtgaagctcttggcttttttccaacgttactttgtaactaatgagggtggatgttcattgtagtttatttatttggttctttagatggaggaatttaaaaaatcaaatttttctcttcacctttatgacttgacatttccttgatctgttggaggctaaaagtaggtataaatgatattgaatgttgggtatagtgatactctgccatagttcttactgcatgaagagaacaagagtcacacaagttcaccactttgcacttcatagagaaggtacatagagacattgcaaaacctgtctccatttgctatcctgataattaaggttttcataatacctagggcctgtctctgagtaattttaattttgccaaatacactgacatttaaaatagtgatccatctaaatttttttcagctgggttttgaggaatataagagctttcaatgataaaggtttgttgtagttgtcttatgtgctgaatttgcagatgatcagatgctgtgcagaattctgatttatttttgtttcctaaaattaagatagcttgaatattatttcacattcctttttcttttttaaataaacaggtttgctttggaaaggcttaatgatggaatgttagcatcttcactagggtaaagaagaacaaaaagaatgttgctggaacgtaaaatagtatttaaaagttaatgaacacttctctagttttcttagttatggccttaataattagtctcttggcttaaatgtccactggttttactttgacacagttgaacaacactggggttaagtctctggtatttaggctggcaatatatatattaaccatattttaaaagtaccaattttgtttttacagaaaagataaaactcaaaagagaacagtgtattccttctgaggggcttttataaattattaactataatatatgatggattttttcctaattttttatatttccttacaattttggtggccattaatttaactttaggcttttgggcatatgctagtctgagcttccgaaaagatacatatatgtttcccttttcattagctgaatgaggatattttaagaagttgaaagagaatttattttcaagttgtgagtaaatcctcctttgaaattcacctgattattagataacttaaagtttatttttaaaagctgacaactttttatgaatcttcgagttgacagttcctaaaagcgtaactcagatattaatgggctgtgtattaaatggttttattttcagttttgcagcacagaacactgttgaaatatccatatcaacttgatttttttaacctaattcaggtgtcctttgcatctcttaaatgttgggggtgggggtcagagccagttatccggcttctgttttgtcgattgcttagatttgttcctgttgtcaaaactgttacccccaaaattggtgtgacacatgctcatgcataaaatgttaaaatgagtacatccttgtatttgtatttgttttcaacatcgccaaggtgctatgggaaattaacaaaattagaaaaaaaataaaattattaaaaagcag

SEQ ID NO: 9330 - protein, 653 aa, Homo sapiens; identical to SEQ ID NO: 1424

SEQ ID NO: 9331 - DNA, 6460 bp, Homo sapiens
ggctgacggcaggggaggagccgggtccactgccgggtggaggggcaaggcgagtgtgtgtccttatcctagcaattggggcgcgggcctgtgagccagttggagttgcggcggcgggaacgattgggctgagcagaggacgacatgttgcttttcgtggagcaggtagcatctaaaggaactggtttaaatcctaatgccaaagtatggcaagaaattgctcctggaaatactgatgccaccccagtaactcatggaactgaaagctcttggcatgaaatagcagctacatcaggtgctcatcctgagggtaatgcagagctctcagaagatatatgtaaagaatatgaagtaatgtattcttcatcttgtgaaaccacaagaaatactacaggcattgaagaatcaactgatgggatgattttaggaccagaagatctgagttaccaaatatatgatgtttccggagaaagcaattcagcagtttctacagaagacctaaaagaatgtctgaagaaacaattagaattctgtttttcacgagaaaatttgtcaaaggatctttacttgatatctcaaatggatagtgatcagttcatcccaatttggacagttgccaacatggaagaaataaaaaagttgactacagaccctgatctaattcttgaagtgttaagatcttctcccatggtacaagttgatgagaagggtgagaaagtgagaccaagtcataagcgttgtattgtaattcttagagagattcctgaaacaacaccaatagaggaagtgaaaggtttgttcaaaagtgaaaactgccccaaagtgataagctgtgagtttgcacacaatagcaactggtatatcactttccagtcagacacagatgcacaacaggcttttaaatacttaagagaagaagttaaaacatttcagggcaagccaattatggcaaggataaaagccatcaatacattttttgctaagaatggttatcgattaatggattctagtatctatagtcaccccattcaaactcaagcacagtatgcctccccagtctttatgcagcctgtatataatcctcaccaacagtactcggtctatagtattgtgcctcagtcttggtctccaaatcctacaccttactttgaaacaccactggctccctttcccaatggtagttttgtgaatggctttaattcgccaggatcttataaaacaaatgctgctgctatgaatatgggtcgaccattccaaaaaaatcgtgtgaagcctcagtttaggtcatctggtggttcagaacactcaacagagggctctgtatccttgggggatggacagttgaacagatatagttcaagaaactttccagctgaacggcataaccccacagtaactgggcatcaggagcaaacttaccttcagaaggagacttccactttgcaggtggaacagaatggggactatggtaggggcaggagaactctcttcagaggtcgaagacgacgagaagatgacaggatctcaagacctcatccttcaacagctgaatcaaaggctccaacaccaaagtttgacttattagcctcaaattttccacctttacctggaagttcatcaagaatgccaggtgaactcgttttggagaataggatgtctgatgttgttaaaggtgtctacaaagaaaaggataatgaagagttgacaattagttgcccagtgcctgcagatgagcagacagaatgcacttctgcccagcaactcaatatgagtaccagttctccatgtgctgctgagcttactgcattaagcacaactcagcaagaaaaggatctaatagaagattcctctgttcagaaggatggtctcaatcagacaactataccagtttctcctccaagtactacaaagccatcgagggcaagtactgcttcaccatgtaataataacataaatgcagctacagctgtggctctacaggaaccccgaaagttaagttatgctgaagtgtgccagaagccccctaaagagccatcttcagttcttgtgcagccactacgggaacttcgctccaatgtggtgtctcccaccaaaaatgaagacaatggagctcctgagaactccgttgagaaaccacatgagaagccagaagcaagggctagtaaggattattctggcttccgaggcaatataatccccaggggagcagcaggaaaaatcagggaacagagacgccagtttagccatagggctatacctcagggagtgactcgacgtaatggcaaagagcaatatgtgccacccagatcaccaaagtaaaaaacaacaaaactattcaaaaacttcactctcttcccattaaacttgaactgtggctatattgaactgttttggaggggagggggtagccaggaaggaaacaagagaaagtacgtccatttcattatggattttggagttgtgagtgataggatcccaaaattcatctctaatgtggtttttaaatgctggaggattccaatcaatataaatatatatatatatatacacacacatatataaaaagtataatttttctatttttgtttttggttttaatttgcagagatttgctgccaggaatcaattttgagggttcagatttagcttggaagaaaaaaaagaaacatacatccttcagtataggagatgagggaatgagagaaaatattttttgaagaagcatttctgtaaaattagaaattactttttttaatctatttaaagtttggcttgaagaatgccatctctgactatatggccttgtattgcaaagcggatcagtggctggggtgcctgttgtgggtgtgagtgtgtacaagagcgattgaagccaaatctgttgtcatgttagtaaatgatttgaaaactgaatgtaatacttgagtagatttttttttctagtttgaaatttagtctgtctttttgaccttactaatatttcatttaacaagttgtaaaactctgattgtacttagagatgtgactaccaatcagtttgatactcaaggaaagggggttattcaagaaattgaaaatttcatcttggacctcagtgcataggtcaaatggatttcagaggtttaaacttccctgtgattcccccgaatacccccaaaatgagaaacaaaattttttttcttactccatttgttactctctgttctttgactgcccacccacagaaaagcaaaataaccaactacctactcaattgtgtgtttgtaattgctttgagcagtctagtcaaatcatataaattgttctaaatttcagaattgaacattgaagtattaactcttctgttcacacatttagaattttagctcccaagatggtagggcagactgaccgtacagtaatttatttgtcgttagtgttaaagattaagcatagtaactgactcttaagtgttaaataatgtagaagtaaaaaaattttttttaaaggcttaatttgggaggggggacttatttctgtttacagtgtattaccttccttccctcctcttctccccccacacccaacaaaatacagtttggaattcactgaaacagtaccagcaagtcatgagattttttagtaaagatgagaaagatggttgaagaaaattagtgcataatttctcagtgaataaagttgtagctctcatatactaaatagacaagtttacatgctgttatttagaaaatgactaaaatattaaaaaccgtgttgtgttaatctgttttaagtcataccatgttcagagttctatgtaaggtgggttttatttttcttttaagggatagtttgtaatagtaagaactgtcccatatgttagtaaattacatatgtacaaattgaaactgtaaattgtgaacactggaaagcaccattgtgacatagagtaaacatcttagtaatatattaaagtgaatgtaaatggtggttaaaattacattactgtgaaattcatcttccaactctaagttaagctttggagatacatgttagtggttaactgttaagagctttgaaaacactgcacatatctgtacaagccagaattactatttctttgacttattattagcttggcagttgcttttgatttgattgttttatgacatggtatactactatatttactcagtttgaaactattcatttctacacactatttttaaaaattgcctactaggtgaaacataacaataaaactacctgtgctgaaatttgggggaagtttaggtcctttaaaaaaacatattaatcattgactacatctatgataaaagtgcttattttggtttactaagataatgcagttggtggaaatgataaacgttttaagtgttaacatcctttgaatgcgttggatttcagagaataaacattttgtaaaaatcacttggtaaggattataaacttaattactgcacttaaaatgaaacattactttttttaaacaatgtgtcacaaatgtaggtctgtattacttgtatgcttgtgtgacttactgttagtccagctctaaaaatttaaaggttgtaattgaaatacaagaaaagagccttcttttagaagaaagcaagtatatttttgcttttacttcaaatgttatttaaagtagaaatttaatttgtagatataacctttaaaaattttctcattaagacaatgtttttaatttaatttgcctcattacatctaatagttcccatttgatggcatgtatagggaagagtgagagagtgtgtgtgtgtgtatgtgtgtgtaatatttatatatattcacagtatgtatttagcatttattttattacagcagatttaaagtttgtatctaaataatgcctatgagttgtgtgaagctcttggcttttttccaacgttactttgtaactaatgagggtggatgttcattgtagtttatttatttggttctttagatggaggaatttaaaaaatcaaatttttctcttcacctttatgacttgacatttccttgatctgttggaggctaaaagtaggtataaatgatattgaatgttgggtatagtgatactctgccatagttcttactgcatgaagagaacaagagtcacacaagttcaccactttgcacttcatagagaaggtacatagagacattgcaaaacctgtctccatttgctatcctgataattaaggttttcataatacctagggcctgtctctgagtaattttaattttgccaaatacactgacatttaaaatagtgatccatctaaatttttttcagctgggttttgaggaatataagagctttcaatgataaaggtttgttgtagttgtcttatgtgctgaatttgcagatgatcagatgctgtgcagaattctgatttatttttgtttcctaaaattaagatagcttgaatattatttcacattcctttttcttttttaaataaacaggtttgctttggaaaggcttaatgatggaatgttagcatcttcactagggtaaagaagaacaaaaagaatgttgctggaacgtaaaatagtatttaaaagttaatgaacacttctctagttttcttagttatggccttaataattagtctcttggcttaaatgtccactggttttactttgacacagttgaacaacactggggttaagtctctggtatttaggctggcaatatatatattaaccatattttaaaagtaccaattttgtttttacagaaaagataaaactcaaaagagaacagtgtattccttctgaggggcttttataaattattaactataatatatgatggattttttcctaattttttatatttccttacaattttggtggccattaatttaactttaggcttttgggcatatgctagtctgagcttccgaaaagatacatatatgtttcccttttcattagctgaatgaggatattttaagaagttgaaagagaatttattttcaagttgtgagtaaatcctcctttgaaattcacctgattattagataacttaaagtttatttttaaaagctgacaactttttatgaatcttcgagttgacagttcctaaaagcgtaactcagatattaatgggctgtgtattaaatggttttattttcagttttgcagcacagaacactgttgaaatatccatatcaacttgatttttttaacctaattcaggtgtcctttgcatctcttaaatgttgggggtgggggtcagagccagttatccggcttctgttttgtcgattgcttagatttgttcctgttgtcaaaactgttacccccaaaattggtgtgacacatgctcatgcataaaatgttaaaatgagtacatccttgtatttgtatttgttttcaacatcgccaaggtgctatgggaaattaacaaaattagaaaaaaaataaaattattaaaaagcag

SEQ ID NO: 9332 - protein, 724 aa, Homo sapiens
MLLFVEQVASKGTGLNPNAKVWQEIAPGNTDATPVTHGTESSWHEIAATSGAHPEGNAELSEDICKEYEVMYSSSCETTRNTTGIEESTDGMILGPEDLSYQIYDVSGESNSAVSTEDLKECLKKQLEFCFSRENLSKDLYLISQMDSDQFIPIWTVANMEEIKKLTTDPDLILEVLRSSPMVQVDEKGEKVRPSHKRCIVILREIPETTPIEEVKGLFKSENCPKVISCEFAHNSNWYITFQSDTDAQQAFKYLREEVKTFQGKPIMARIKAINTFFAKNGYRLMDSSIYSHPIQTQAQYASPVFMQPVYNPHQQYSVYSIVPQSWSPNPTPYFETPLAPFPNGSFVNGFNSPGSYKTNAAAMNMGRPFQKNRVKPQFRSSGGSEHSTEGSVSLGDGQLNRYSSRNFPAERHNPTVTGHQEQTYLQKETSTLQVEQNGDYGRGRRTLFRGRRRREDDRISRPHPSTAESKAPTPKFDLLASNFPPLPGSSSRMPGELVLENRMSDVVKGVYKEKDNEELTISCPVPADEQTECTSAQQLNMSTSSPCAAELTALSTTQQEKDLIEDSSVQKDGLNQTTIPVSPPSTTKPSRASTASPCNNNINAATAVALQEPRKLSYAEVCQKPPKEPSSVLVQPLRELRSNVVSPTKNEDNGAPENSVEKPHEKPEARASKDYSGFRGNIIPRGAAGKIREQRRQFSHRAIPQGVTRRNGKEQYVPPRSPK

SEQ ID NO: 9333 - DNA, 1599 bp, Homo sapiens
cgggtccactgccgggtggaggggcaaggcgagtgtgtgtccttatcctagcaattggggcgcgggcctgtgagccagttggagttgcggcggcgggaacgattgggctgagcagaggacgacatgttgcttttcgtggagcaggtagcatctaaaggaactggtttaaatcctaatgccaaagtatggcaagaaattgctcctggaaatactgatgccaccccagtaactcatggaactgaaagctcttggcatgaaatagcagctacatcaggtgctcatcctgagggtaatgcagagctctcagaagatatatgtaaagaatatgaagtaatgtattcttcatcttgtgaaaccacaagaaatactacaggcattgaagaatcaactgatgggatgattttaggaccagaagatctgagttaccaaatatatgatgtttccggagaaagcaattcagcagtttctacagaagacctaaaagaatgtctgaagaaacaattagaattctgtttttcacgagaaaatttgtcaaaggatctttacttgatatctcaaatggatagtgatcagttcatcccaatttggacagttgccaacatggaagaaataaaaaagttgactacagaccctgatctaattcttgaagtgttaagatcttctcccatggtacaagttgatgagaagggtgagaaagtgagaccaagtcataagcgttgtattgtaattcttagagagattcctgaaacaacaccaatagaggaagtgaaaggtttgttcaaaagtgaaaactgccccaaagtgataagctgtgagtttgcacacaatagcaactggtatatcactttccagtcagacacagatgcacaacaggcttttaaatacttaagagaagaagttaaaacatttcagggcaagccaattatggcaaggataaaagccatcaatacattttttgctaagaatggttatcgattaatggattctagtatctatagtcaccccattcaaactcaagcacagtatgcctccccagtctttatgcagcctgtatataatcctcaccaacagtactcggtctatagtattgtgcctcagtcttggtctccaaatcctacaccttactttgaaacaccactggctccctttcccaatggtagttttgtgaatggctttaattcgccaggatcttataaaacaaatgctgctgctatgaatatgggtcgaccattccaaaaaaatcgtgtgaagcctcagtttaggtcatctggtggttcagaacactcaacagagggctctgtatccttgggggatggacagttgaacagatatagttcaagaaactttccagctgaacggcataaccccacagtaactgggcatcaggagcaaacttaccttcagaaggagacttccactttgcaggtggaacagaatggggactatggtaggggcaggtaagaaaataaagtacctgaaaacctttgataataatgtgatcatcctgaataattgaagaacatgatcttcataataattaaatgagcatttaattattggtatatggttatattaaataaatacgttattttcagaaca

SEQ ID NO: 9334 - protein, 445 aa, Homo sapiens
MLLFVEQVASKGTGLNPNAKVWQEIAPGNTDATPVTHGTESSWHEIAATSGAHPEGNAELSEDICKEYEVMYSSSCETTRNTTGIEESTDGMILGPEDLSYQIYDVSGESNSAVSTEDLKECLKKQLEFCFSRENLSKDLYLISQMDSDQFIPIWTVANMEEIKKLTTDPDLILEVLRSSPMVQVDEKGEKVRPSHKRCIVILREIPETTPIEEVKGLFKSENCPKVISCEFAHNSNWYITFQSDTDAQQAFKYLREEVKTFQGKPIMARIKAINTFFAKNGYRLMDSSIYSHPIQTQAQYASPVFMQPVYNPHQQYSVYSIVPQSWSPNPTPYFETPLAPFPNGSFVNGFNSPGSYKTNAAAMNMGRPFQKNRVKPQFRSSGGSEHSTEGSVSLGDGQLNRYSSRNFPAERHNPTVTGHQEQTYLQKETSTLQVEQNGDYGRGR

SEQ ID NO: 9335 - DNA, 1970 bp, Homo sapiens
cgggtccactgccgggtggaggggcaaggcgagtgtgtgtccttatcctagcaattggggcgcgggcctgtgagccagttggagttgcggcggcgggaacgattgggctgagcagaggacgacatgttgcttttcgtggagcaggtagcatctaaaggaactggtttaaatcctaatgccaaagtatggcaagaaattgctcctggaaatactgatgccaccccagtaactcatggaactgaaagctcttggcatgaaatagcagctacatcaggtgctcatcctgagggtaatgcagagctctcagaagatatatgtaaagaatatgaagtaatgtattcttcatcttgtgaaaccacaagaaatactacaggcattgaagaatcaactgatgggatgattttaggaccagaagatctgagttaccaaatatatgatgtttccggagaaagcaattcagcagtttctacagaagacctaaaagaatgtctgaagaaacaattagaattctgtttttcacgagaaaatttgtcaaaggatctttacttgatatctcaaatggatagtgatcagttcatcccaatttggacagttgccaacatggaagaaataaaaaagttgactacagaccctgatctaattcttgaagtgttaagatcttctcccatggtacaagttgatgagaagggtgagaaagtgagaccaagtcataagcgttgtattgtaattcttagagagattcctgaaacaacaccaatagaggaagtgaaaggtttgttcaaaagtgaaaactgccccaaagtgataagctgtgagtttgcacacaatagcaactggtatatcactttccagtcagacacagatgcacaacaggcttttaaatacttaagagaagaagttaaaacatttcagggcaagccaattatggctccctttcccaatggtagttttgtgaatggctttaattcgccaggatcttataaaacaaatgctgctgctatgaatatgggtcgaccattccaaaaaaatcggagaactctcttcagaggtcgaagacgacgagaagatgacaggatctcaagacctcatccttcaacagctgaatcaaaggctccaacaccaaagtttgacttattagcctcaaattttccacctttacctggaagttcatcaagaatgccaggtgaactcgttttggagaataggatgtctgatgttgttaaaggtgtctacaaagaaaaggataatgaagagttgacaattagttgcccagtgcctgcagatgagcagacagaatgcacttctgcccagcaactcaatatgagtaccagttctccatgtgctgctgagcttactgcattaagcacaactcagcaagaaaaggatctaatagaagattcctctgttcagaaggatggtctcaatcagacaactataccagtttctcctccaagtactacaaagccatcgagggcaagtactgcttcaccatgtaataataacataaatgcagctacagctgtggctctacaggaaccccgaaagttaagttatgctgaagtgtgccagaagccccctaaagagccatcttcagttcttgtgcagccactacgggaacttcgctccaatgtggtgtctcccaccaaaaatgaagacaatggagctcctgagaactccgttgagaaaccacatgagaagccagaagcaagggctagtaaggattattctggcttccgaggcaatataatccccaggggagcagcaggaaaaatcagggaacagagacgccagtttagccatagggctatacctcagggagtgactcgacgtaatggcaaagagcaatatgtgccacccagatcaccaaagtaaaaaacaacaaaactattcaaaaacttcactctcttcccattaaacttgaactgtggctatattgaactgttttggaggggagggggtagccaggaagg

SEQ ID NO: 9336 - protein, 582 aa, Homo sapiens
MLLFVEQVASKGTGLNPNAKVWQEIAPGNTDATPVTHGTESSWHEIAATSGAHPEGNAELSEDICKEYEVMYSSSCETTRNTTGIEESTDGMILGPEDLSYQIYDVSGESNSAVSTEDLKECLKKQLEFCFSRENLSKDLYLISQMDSDQFIPIWTVANMEEIKKLTTDPDLILEVLRSSPMVQVDEKGEKVRPSHKRCIVILREIPETTPIEEVKGLFKSENCPKVISCEFAHNSNWYITFQSDTDAQQAFKYLREEVKTFQGKPIMAPFPNGSFVNGFNSPGSYKTNAAAMNMGRPFQKNRRTLFRGRRRREDDRISRPHPSTAESKAPTPKFDLLASNFPPLPGSSSRMPGELVLENRMSDVVKGVYKEKDNEELTISCPVPADEQTECTSAQQLNMSTSSPCAAELTALSTTQQEKDLIEDSSVQKDGLNQTTIPVSPPSTTKPSRASTASPCNNNINAATAVALQEPRKLSYAEVCQKPPKEPSSVLVQPLRELRSNVVSPTKNEDNGAPENSVEKPHEKPEARASKDYSGFRGNIIPRGAAGKIREQRRQFSHRAIPQGVTRRNGKEQYVPPRSPK

SEQ ID NO: 9337 - DNA, 2895 bp, Homo sapiens
cgggtccactgccgggtggaggggcaaggcgagtgtgtgtccttatcctagcaattggggcgcgggcctgtgagccagttggagttgcggcggcgggaacgattgggctgagcagaggacgacatgttgcttttcgtggagcaggtagcatctaaaggaactggtttaaatcctaatgccaaagtatggcaagaaattgctcctggaaatactgatgccaccccagtaactcatggaactgaaagctcttggcatgaaatagcagctacatcaggtgctcatcctgagggtaatgcagagctctcagaagatatatgtaaagaatatgaagtaatgtattcttcatcttgtgaaaccacaagaaatactacaggcattgaagaatcaactgatgggatgattttaggaccagaagatctgagttaccaaatatatgatgtttccggagaaagcaattcagcagtttctacagaagacctaaaagaatgtctgaagaaacaattagaattctgtttttcacgagaaaatttgtcaaaggatctttacttgatatctcaaatggatagtgatcagttcatcccaatttggacagttgccaacatggaagaaataaaaaagttgactacagaccctgatctaattcttgaagtgttaagatcttctcccatggtacaagttgatgagaagggtgagaaagtgagaccaagtcataagcgttgtattgtaattcttagagagattcctgaaacaacaccaatagaggaagtgaaaggtttgttcaaaagtgaaaactgccccaaagtgataagctgtgagtttgcacacaatagcaactggtatatcactttccagtcagacacagatgcacaacaggcttttaaatacttaagagaagaagttaaaacatttcagggcaagccaattatggcaaggataaaagccatcaatacattttttgctaagaatggttatcgattaatggattctagtatctatagtcaccccattcaaactcaagcacagtatgcctccccagtctttatgcagcctgtatataatcctcaccaacagtactcggtctatagtattgtgcctcagtcttggtctccaaatcctacaccttactttgaaacaccactggctccctttcccaatggtagttttgtgaatggctttaattcgccaggatcttataaaacaaatgctgctgctatgaatatgggtcgaccattccaaaaaaatcgtgtgaagcctcagtttaggtcatctggtggttcagaacactcaacagagggctctgtatccttgggggatggacagttgaacagatatagttcaagaaactttccagctgaacggcataaccccacagtaactgggcatcaggagcaaacttaccttcagaaggagacttccactttgcaggtggaacagaatggggactatggtaggggcaggagaactctcttcagaggtcgaagacgacgagaagatgacaggatctcaagacctcatccttcaacagctgaatcaaaggctccaacaccaaagtttgacttattagcctcaaattttccacctttacctggaagttcatcaagaatgccaggtgaactcgttttggagaataggatgtctgatgttgttaaaggtgtctacaaagaaaaggataatgaagagttgacaattagttgcccagtgcctgcagatgagcagacagaatgcacttctgcccagcaactcaatatgagtaccagttctccatgtgctgctgagcttactgcattaagcacaactcagcaagaaaaggatctaatagaagattcctctgttcagaaggatggtctcaatcagacaactataccagtttctcctccaagtactacaaagccatcgagggcaagtactgcttcaccatgtaataataacataaatgcagctacagctgtggctctacaggaaccccgaaagttaagttatgctgaagtgtgccagaagccccctaaagagccatcttcagttcttgtgcagccactacgggaacttcgctccaatgtggtgtctcccaccaaaaatgaagacaatggagctcctgagaactccgttgagaaaccacatgagaagccagaagcaagggctagtaaggattattctggcttccgaggcaatataatccccaggggagcagcaggaaaaatcagggaacagagacgccagtttagccatagggctatacctcagggagtgactcgacgtaatggcaaagagcaatatgtgccacccagatcaccaaagtaaaaaacaacaaaactattcaaaaacttcactctcttcccattaaacttgaactgtggctatattgaactgttttggaggggagggggtagccaggaaggaaacaagagaaagtacgtccatttcattatggattttggagttgtgagtgataggatcccaaaattcatctctaatgtggtttttaaatgctggaggattccaatcaatataaatatatatatatatatacacacacatatataaaaagtataatttttctatttttgtttttggttttaatttgcagagatttgctgccaggaatcaattttgagggttcagatttagcttggaagaaaaaaaagaaacatacatccttcagtataggagatgagggaatgagagaaaatattttttgaagaagcatttctgtaaaattagaaattactttttttaatctatttaaagtttggcttgaagaatgccatctctgactatatggccttgtattgcaaagcggatcagtggctggggtgcctgttgtgggtgtgagtgtgtacaagagcgattgaagccaaatctgttgtcatgttagtaaatgatttgaaaactgaatgt

SEQ ID NO: 9338 - protein, 724 aa, Homo sapiens; identical to SEQ ID NO: 9332

SEQ ID NO: 9339 - DNA, 3738 bp, Homo sapiens
cgggtccactgccgggtggaggggcaaggcgagtgtgtgtccttatcctagcaattggggcgcgggcctgtgagccagttggagttgcggcggcgggaacgattgggctgagcagaggacgacatgttgcttttcgtggagcaggtagcatctaaaggaactggtttaaatcctaatgccaaagtatggcaagaaattgctcctggaaatactgatgccaccccagtaactcatggaactgaaagctcttggcatgaaatagcagctacatcaggtgctcatcctgagggtaatgcagagctctcagaagatatatgtaaagaatatgaagtaatgtattcttcatcttgtgaaaccacaagaaatactacaggcattgaagaatcaactgatgggatgattttaggaccagaagatctgagttaccaaatatatgatgtttccggagaaagcaattcagcagtttctacagaagacctaaaagaatgtctgaagaaacaattagaattctgtttttcacgagaaaatttgtcaaaggatctttacttgatatctcaaatggatagtgatcagttcatcccaatttggacagttgccaacatggaagaaataaaaaagttgactacagaccctgatctaattcttgaagtgttaagatcttctcccatggtacaagttgatgagaagggtgagaaagtgagaccaagtcataagcgttgtattgtaattcttagagagattcctgaaacaacaccaatagaggaagtgaaaggtttgttcaaaagtgaaaactgccccaaagtgataagctgtgagtttgcacacaatagcaactggtatatcactttccagtcagacacagatgcacaacaggcttttaaatacttaagagaagaagttaaaacatttcagggcaagccaattatggctccctttcccaatggtagttttgtgaatggctttaattcgccaggatcttataaaacaaatgctgctgctatgaatatgggtcgaccattccaaaaaaatcgtgtgaagcctcagtttaggtcatctggtggttcagaacactcaacagagggctctgtatccttgggggatggacagttgaacagatatagttcaagaaactttccagctgaacggcataaccccacagtaactgggcatcaggagcaaacttaccttcagaaggagacttccactttgcaggtggaacagaatggggactatggtaggggcaggagaactctcttcagaggtcgaagacgacgagaagatgacaggatctcaagacctcatccttcaacagctgaatcaaaggctccaacaccaaagtttgacttattagcctcaaattttccacctttacctggaagttcatcaagaatgccaggtgaactcgttttggagaataggatgtctgatgttgttaaaggtgtctacaaagaaaaggataatgaagagttgacaattagttgcccagtgcctgcagatgagcagacagaatgcacttctgcccagcaactcaatatgagtaccagttctccatgtgctgctgagcttactgcattaagcacaactcagcaagaaaaggatctaatagaagattcctctgttcagaaggatggtctcaatcagacaactataccagtttctcctccaagtactacaaagccatcgagggcaagtactgcttcaccatgtaataataacataaatgcagctacagctgtggctctacaggaaccccgaaagttaagttatgctgaagtgtgccagaagccccctaaagagccatcttcagttcttgtgcagccactacgggaacttcgctccaatgtggtgtctcccaccaaaaatgaagacaatggagctcctgagaactccgttgagaaaccacatgagaagccagaagcaagggctagtaaggattattctggcttccgaggcaatataatccccaggggagcagcaggaaaaatcagggaacagagacgccagtttagccatagggctatacctcagggagtgactcgacgtaatggcaaagagcaatatgtgccacccagatcaccaaagtaaaaaacaacaaaactattcaaaaacttcactctcttcccattaaacttgaactgtggctatattgaactgttttggaggggagggggtagccaggaaggaaacaagagaaagtacgtccatttcattatggattttggagttgtgagtgataggatcccaaaattcatctctaatgtggtttttaaatgctggaggattccaatcaatataaatatatatatatatatacacacacatatataaaaagtataatttttctatttttgtttttggttttaatttgcagagatttgctgccaggaatcaattttgagggttcagatttagcttggaagaaaaaaaagaaacatacatccttcagtataggagatgagggaatgagagaaaatattttttgaagaagcatttctgtaaaattagaaattactttttttaatctatttaaagtttggcttgaagaatgccatctctgactatatggccttgtattgcaaagcggatcagtggctggggtgcctgttgtgggtgtgagtgtgtacaagagcgattgaagccaaatctgttgtcatgttagtaaatgatttgaaaactgaatgtaatacttgagtagatttttttttctagtttgaaatttagtctgtctttttgaccttactaatatttcatttaacaagttgtaaaactctgattgtacttagagatgtgactaccaatcagtttgatactcaaggaaagggggttattcaagaaattgaaaatttcatcttggacctcagtgcataggtcaaatggatttcagaggtttaaacttccctgtgattcccccgaatacccccaaaatgagaaacaaaattttttttcttactccatttgttactctctgttctttgactgcccacccacagaaaagcaaaataaccaactacctactcaattgtgtgtttgtaattgctttgagcagtctagtcaaatcatataaattgttctaaatttcagaattgaacattgaagtattaactcttctgttcacacatttagaattttagctcccaagatggtagggcagactgaccgtacagtaatttatttgtcgttagtgttaaagattaagcatagtaactgactcttaagtgttaaataatgtagaagtaaaaaaattttttttaaaggcttaatttgggaggggggacttatttctgtttacagtgtattaccttccttccctcctcttctccccccacacccaacaaaatacagtttggaattcactgaaacagtaccagcaagtcatgagattttttagtaaagatgagaaagatggttgaagaaaattagtgcataatttctcagtgaataaagttgtagctctcatatactaaatagacaagtttacatgctgttatttagaaaatgactaaaatattaaaaaccgtgttgtgttaatctgttttaagtcataccatgttcagagttctatgtaaggtgggttttatttttcttttaagggatagtttgtaatagtaagaactgtcccatatgttagtaaattacatatgtacaaattgaaactgtaaattgtgaacactggaaagcaccattgtgacatagagtaaacatcttagtaatatattaaagtgaatgtaaatggtggtt

SEQ ID NO: 9340 - protein, 653 aa, Homo sapiens; identical to SEQ ID NO: 1424

SEQ ID NO: 9341 - DNA, 395 bp, Homo sapiens
cttttatagattatcccattatgagaggtacagagtaataacaaacccaattaaagacatagaaagatgaaatatgaaggaaggattcaaacccaaggcagcctgactccagaaacaaaggattaaccacacaatgattacaactcacagattattacaattgcaagaagtacctaagcatgtggttataggcgggaaggaaacatgacctgctatagtaaccagaccagattggtgttctccccacttacaaagtattatttatttatttatttatttatttatttatttatttatttattttgtgatgaagtcttgctgtctcccaggctgggctgcagtggcaagatcttggctcatgcactccagcctgggtgacacagcgagacttcatc

SEQ ID NO: 9342 - protein, 57 aa, Homo sapiens
MTCYSNQTRLVFSPLTKYYLFIYLFIYLFIYLFCDEVLLSPRLGCSGKILAHALQPG

SEQ ID NO: 9343 - DNA, 298 bp, Homo sapiens
tggattgcaggcatgagccactgtgccccgcctatgagtacagtttttagatgataatgattatattatagctcttggaagatgttttatagtcctaaccatggcaaaatggggggactcggccaggtggggtggctgatgcctcctcccaaagtgctggaattagaggcatgcactaccctgcccatccttcaaaaccaatcattttaaatccagtagttaatctgtagtatagggtggttttaattaaattaaacttacagccaattttgaacgtgactgctacggacagggctaa

SEQ ID NO: 9344 - protein, 42 aa, Homo sapiens
MFYSPNHGKMGGLGQVGWLMPPPKVLELEACTTLPILQNQSF

SEQ ID NO: 9345 - DNA, 2653 bp, Homo sapiens
acgtgacctttgctcatggcggcggcggcggcggcggcggtgctggtggtgctcggcggccggagccggatcctgtagccgggtgtgggcccgtgtctgtccgtccctccttcggccccctctcttgtcttccggagtgtggctggcggagctgggatggcggaacgaggcctggagccgtcgccggccgcggtggcggcgctgccgcctgaagtgcgggcgcagctggcggagctggagctggagctctcggagggggacatcacccagaagggctatgaaaagaaaaggtccaaactcctatctccttacagcccgcagacacaagaaactgattcagcagtacagaaagaacttagaaaccagacacctgctccatctgcagctcaaacttctgctccctctaagtaccaccgaactcgatctgggggagccagggatgaacgatatcgatcagatatccacacagaagcagttcaggctgcactggcaaagcataaagaacagaagatggctttgcccatgccaaccaaaaggcgatccacatttgttcagtctcctgcagatgcctgcacacctcctgacacatcttcggcctctgaggatgagggctctctgagacgccaagctgcgctctctgctgccttgcaacagagcttacagaatgctgagtcctggatcaaccgttcaattcagggatcgtccacttcttcatccgcatcttctacgctgtcccacggagaggtcaaaggaaccagtgggtctctagctgatgtatttgccaatactcgaatagagaatttctctgctcctcctgatgtcactacaactacctcttcctcctcatcatcttcctcaattcgcccagcaaacattgacctgcccccctcggggatagttaaaggcatgcacaaaggatccaacaggtccagccttatggatacagctgatggtgttcctgtcagtagcagagtatctacaaaaatccagcagcttctgaacactctgaaacgacccaaaaggcctcccttaaaggaattttttgtggatgactctgaagaaattgtggaagtacctcagccagaccccaaccagcccaagccggagggacggcagatgacccctgtgaaaggagagcctttaggagtcatctgtaactggcctcctgctcttgaatctgccctgcagcgctggggtaccactcaagcaaaatgctcctgtctgactgcactggacatgacagggaaaccagtttacactcttacatatggtgagtctgcaagattccagatccttctctcctgagagttcttcagaatatcatgggtagtgtttttatctagatacttagcagttgctggccattatgtttcagtagattttttcaataatttaaaaggatcctaagctctaagtaaagctattgccaaatattttcatttgctaaagcaacatttgcaagccagctaatatttaaaagacagcaaaaagaagagagactttgtacatccatagatgttttaacattacaagaggattttagaaaaacatttggtattgatgtatggtgaaaatcagatggttttatctaacagttgaaactgattacttgttaaatctttattccatcctgcttcttgattataataggcacaaaattctgtaatgaacaaagaatgagtacttttccgtttaattttgcatactagctaaaatttttctttttaaaataacttcaaggaaaaatggggtcaaccctgggctatgagattttgtactagtttattcaaacagattccttttctcctttgcaagtggagcacagtgtccatagacctagatggaaaataatctttgaggaaaaacaaggttttatttaaagaattacgcaggttgacatagtttaaactttggatgcccctctgaataaattgtatgtaaaataacgtagctatttaaaataacatgatttcccttatctcataatctaaaataagaatttctaagagtggttgagggaagggagtaggaaaagaaaagcattttttgtttgtttttgtcaaaattgttttaacattcacctcagaagctgtatatacatttcattcatataacccttaaagaaagcatttagctggccaaatctttgcatgtttatttaacatctatgaatacatccatatgttcatacagataatttccattttaatgtttgtttttactaaattacagcagtatggaatgtttaatcatttgagtcatgtttttgctttgcagtttcctcaagtgtctgataccacctatgtaagtggtttttcagaaaaagcttacaacatttctgaagatatttgtaaattttttaaaaaactggccgggcacagttggctcatgcctgtaatcccaacactttgggaggctgagacaggtggatcacctgaggccaggaatttgagaccagcccagacaacatggcgaaacctcatctctattaaaaatacaaaaattagccggatgtggtgacacacacctgtagtcccagctacttgagaggctgaggcaagaattactcaaacagggagacagacagaggttgcagtgagccgagattgcaccactgcactccagcctgggcgacagagtgagactctgtctt

SEQ ID NO: 9346 - protein, 382 aa, Homo sapiens
MAERGLEPSPAAVAALPPEVRAQLAELELELSEGDITQKGYEKKRSKLLSPYSPQTQETDSAVQKELRNQTPAPSAAQTSAPSKYHRTRSGGARDERYRSDIHTEAVQAALAKHKEQKMALPMPTKRRSTFVQSPADACTPPDTSSASEDEGSLRRQAALSAALQQSLQNAESWINRSIQGSSTSSSASSTLSHGEVKGTSGSLADVFANTRIENFSAPPDVTTTTSSSSSSSSIRPANIDLPPSGIVKGMHKGSNRSSLMDTADGVPVSSRVSTKIQQLLNTLKRPKRPPLKEFFVDDSEEIVEVPQPDPNQPKPEGRQMTPVKGEPLGVICNWPPALESALQRWGTTQAKCSCLTALDMTGKPVYTLTYGESARFQILLS

SEQ ID NO: 9347 - DNA, 915 bp, Homo sapiens
tctcgccctgtcgcccaggctggagtgcagtggctcactgcaatctctgcctcccgggttcaagcgattctcctgcctcagcctctccagcagctgggactacaggcgcatgccaccacacctggctaattttttgtattttttttgagacagagttttgctcttgttgtccatgctggagtgcagtggtgtgatcttggctcactgcaacctccaccacccaggttcaagtgattctcctgcctcagcctcccaggtagctgggattacaggcattcgccaccacacccagcaaatttttgtatttttagtagagacagggtttctccatgttggtcaggctggtcttgaactcctgacctcaggtgattcacctacatcggcctcccatagtgctgtgattacaggcatgagtcaccgcgcccggtgcatttttttgtatttttaatgaagacaggatttcactgtgttagctaggatggtctcgatctcttgaccttgtgatctgtgccactactcttatatatcatgttcccatatttccatggcattctaagagctctggtctgttttattggatatagataactgtagttatgtttgttacgtcaatgccagctgtttttattactctgctttgtgttgtgtcttcacatctagtaggatacatcaattaaaaaggcatcatttcaccctcaaattaatcttaaaaagtcaatgtagtcccaattaaatttcatctattttctcaaggaatttggcaaacattctaaaatttgaatggaaaaatgaaagtcattttcaaaattgatttacccctttggggtcctgttaactgcttaatctaagtagttcacagtttttgtgtgtgtgcctatttgggcattttatatgtctcgaaatttatccatttca

SEQ ID NO: 9348 - protein, 91 aa, Homo sapiens [sequence omitted]

SEQ ID NO: 9349 - DNA, 4730 bp, Homo sapiens
agaaactgattcagcagtacagaaagaacttagaaaccagacacctgctccatctgcagctcaaacttctgctccctctaagtaccaccgaactcgatctgggggagccagggatgaacgatatcgatcagatatccacacagaagcagttcaggctgcactggcaaagcataaagaacagaagatggctttgcccatgccaaccaaaaggcgatccacatttgttcagtctcctgcagatgcctgcacacctcctgacacatcttcggcctctgaggatgagggctctctgagacgccaagctgcgctctctgctgccttgcaacagagcttacagaatgctgagtcctggatcaaccgttcaattcagggatcgtccacttcttcatccgcatcttctacgctgtcccacggagaggtcaaaggaaccagtgggtctctagctgatgtatttgccaatactcgaatagagaatttctctgctcctcctgatgtcactacaactacctcttcctcctcatcatcttcctcaattcgcccagcaaacattgacctgcccccctcggggatagttaaaggcatgcacaaaggatccaacaggtccagccttatggatacagctgatggtgttcctgtcagtagcagagtatctacaaaaatccagcagcttctgaacactctgaaacgacccaaaaggcctcccttaaaggaattttttgtggatgactctgaagaaattgtggaagtacctcagccagaccccaaccagcccaagccggagggacggcagatgacccctgtgaaaggagagcctttaggagtcatctgtaactggcctcctgctcttgaatctgccctgcagcgctggggtaccactcaagcaaaatgctcctgtctgactgcactggacatgacagggaaaccagtttacactcttacatatggaaagttgtggagcagaagtttaaagttggcctacacacttcttaataaactggggaccaaaaatgaacctgtgttaaaacctggagacagggtagccctggtttaccccaacaatgatccagtcatgtttatggtggctttctatggatgcctcctggcagaagtgattccagtgcctatagaggtacctcttaccagaaaggatgctggaggtcagcagattggcttcttgctaggaagctgtggtattgccttagctcttaccagtgaagtttgtctaaaaggactgccaaaaacccagaatggagaaattgtacagtttaaaggttggccccggctcaaatgggttgtaacagattccaagtacctttcaaagccaccgaaagactggcagccacacatctcacctgctgggacagaaccggcatacattgaggggaaacaatagtaaatgtcttagactttaagaaggatgctgggctgtggcacggcatgtttgcgaatgtaatgaataagatgcacacaatcagcgtaccctactctgttatgaaaacctgtcctctctcttgggtccaaagagtacatgctcacaaagccaaggtagctttagtaaaatgtcgggacttgcactgggctatgatggcacatcgggaccaaagagacgtgagcttgagttccctccgaatgttaattgtgactgatggagctaacccctggtccgtgtcatcctgtgatgccttcctgagtctgttccaaagtcatggactgaagcctgaggccatctgtccgtgcgccacgtctgctgaagccatgactgtagcaatccgcaggcctggagttccaggagcccctttgccaggaagagccattctctcaatgaatggattgagctatggggtaatacgggtcaatactgaagataaaaattcagcactgacggtccaggatgtagggcatgtaatgcctggtgggatgatgtgcattgtgaaaccagatggacctccccagctctgcaaaacagatgaaattggagaaatctgtgttagctccagaactggaggcatgatgtactttgggcttgctggtgtgacaaaaaatacatttgaggtaattccagtgaattctgcaggctctcctgttggggatgtgccattcatccgatcaggattgctggggtttgtagggccgggtagtttggtgttcgtggttgggaaaatggatggcttactgatggttagtggtcgaagacataatgctgatgacattgttgctactggattggctgtagaatcaataaagactgtttatagaggaagaattgctgtgttttctgtgtctgtattttatgatgagcgcattgtggtggttgcggaacaaagacctgatgcttctgaggaagatagtttccagtggatgagccgcgtgctgcaggcgatcgatagcattcatcaagtgggggtttattgtcttgctctggtgccagccaatacattgccaaaaactccactaggaggaatccatatatctcagacgaaacaactctttctggagggatcactgcatccttgcaacatcctcatgtgcccccatacatgtgtgacaaacttgccaaagccccggcaaaaacaaccaggtgtaggccctgcttccgtgatggttgggaatctggttgctggaaaacgtatagcacaagctgctggaagggatctgggacaaatagaagagaatgatttggtgaggaagcaccagtttctggcagagatcctacagtggcgagcccaggcgactcctgaccatgtactcttcatgctgttaaatgccaagggaaccactgtatgcacagccagctgccttcagcttcataagcgagcagagaggattgcatctgttcttggtgataagggacatctaaatgcaggagataatgtggtgttgctctatccacctggcattgagttaatcgccgccttctatggctgcctgtatgcgggctgtatacctgtgaccgtcagacctccacatgctcagaacctcacggccacgctgcccactgtccgaatgattgttgatgtcagcaaagcagcctgtattctcaccagtcagaccctaatgaggctactgaggtcccgagaggcagcagcagctgtggatgtgaaaacctggccaaccatcattgacacagatgatttacccaggaaaaggttacctcagctgtataaaccgcccactcctgagatgttggcatatcttgattttagtgtctccacaactggcatgcttacaggagtgaagatgtcccactctgcagtgaacgctctgtgtcgagccatcaagctccagtgtgagttgtactcttctcggcagatcgccatctgccttgacccttactgtggacttggcttcgcgctctggtgtctctgcagtgtctattcaggccaccagtctgtcttaattcctcctatggagttagagaacaaccttttcctctggctctccacagtcaaccagtacaaaataagggacactttctgctcctattcagtgatggagctctgcaccaaaggtcttgggaaccaagtggaagtgctaaagaccagagggatcaacctctcctgcgtccggacctgtgtggtggtggcggaggagaggccccgcgttgcactccagcagtccttctctaagctcttcaaagacatcgggctgtccccgcgggctgtcagcaccacttttggatcaagagtcaatgtagcaatatgtttacagggaacctcagggcctgatccgactactgtgtatgtggatctgaaatcactaagacatgacagggttcgtctcgtggaacgtggcgcccctcagagtttgcttctctcagagtctggaaagattttacctggagtgaaagtggttattgttaatcctgagaccaaagggccggttggagactctcaccttggagagatttgggtgaacagtccccatacagccagcggctactacaccatctatgatagcgagactcttcaagctgatcatttcaacactcgcctcagctttggagatgcagctcagacactctgggctcggacaggataccttggttttgtccgccggaccgagctcacagcggccactggagagcgtcatgatgcattgtatgtggtgggagcgctggatgaaacactggagctgagaggattacgataccacccaattgatattgagacctcggtgtcccggatccacagaagcattgctgaatgtgccgtgttcacatggaccaacttgcttgtggtggttgtggaactgtgcggctctgaacaggaagccctagatctggtcccattagtgaccaacgtggtcctggaagagcattacctcatcgttggcgtcgtggttgtggtggacccaggtgtcatcccgatcaactccagaggagagaagcagaggatgcacctccgtgatagcttcctagctgaccagttagaccccatctacgtggcttataacatgtaaccagccttgtggggactgcagtgggccattctgaagaatcacaaagacagaagacctctggctaagagcaggcttcaaacgatgtgaaataagctgagatggctacatgatattcttcatctcatcctgtgggattctgcaatcataaaacacaggaaaggggaattctgtgatggcaaatgaaaaaaatgttaacatttggtagacatgtgctttgacatagcgtgagcagcacattactaaagcaattacatgcatgttgcatttttttc

SEQ ID NO: 9350 - protein, 1006 aa, Homo sapiens [sequence omitted]

SEQ ID NO: 9351 - DNA, 4833 bp, Homo sapiens
agaaactgattcagcagtacagaaagaacttagaaaccagacacctgctccatctgcagctcaaacttctgctccctctaagtaccaccgaactcgatctgggggagccagggatgaacgatatcgatcagatatccacacagaagcagttcaggctgcactggcaaagcataaagaacagaagatggctttgcccatgccaaccaaaaggcgatccacatttgttcagtctcctgcagatgcctgcacacctcctgacacatcttcggcctctgaggatgagggctctctgagacgccaagctgcgctctctgctgccttgcaacagagcttacagaatgctgagtcctggatcaaccgttcaattcagggatcgtccacttcttcatccgcatcttctacgctgtcccacggagaggtcaaaggaaccagtgggtctctagctgatgtatttgccaatactcgaatagagaatttctctgctcctcctgatgtcactacaactacctcttcctcctcatcatcttcctcaattcgcccagcaaacattgacctgcccccctcggggatagttaaaggcatgcacaaaggatccaacaggtccagccttatggatacagctgatggtgttcctgtcagtagcagagtatctacaaaaatccagcagcttctgaacactctgaaacgacccaaaaggcctcccttaaaggaattttttgtggatgactctgaagaaattgtggaagtacctcagccagaccccaaccagcccaagccggagggacggcagatgacccctgtgaaaggagagcctttaggagtcatctgtaactggcctcctgctcttgaatctgccctgcagcgctggggtaccactcaagcaaaatgctcctgtctgactgcactggacatgacagggaaaccagtttacactcttacatatggaaagttgtggagcagaagtttaaagttggcctacacacttcttaataaactggggaccaaaaatgaacctgtgttaaaacctggagacagggtagccctggtttaccccaacaatgatccagtcatgtttatggtggctttctatggatgcctcctggcagaagtgattccagtgcctatagaggtacctcttaccagaaaggatgctggaggtcagcagattggcttcttgctaggaagctgtggtattgccttagctcttaccagtgaagtttgtctaaaaggactgccaaaaacccagaatggagaaattgtacagtttaaaggttggccccggctcaaatgggttgtaacagattccaagtacctttcaaagccaccgaaagactggcagccacacatctcacctgctgggacagaaccggcatacattgagtataaaacaagcaaagaagggagtgtaatgggagttacagtatcccggcttgcaatgttgtctcactgccaagctctgtcgcaggcctgcaattattctgaaggggaaacaatagtaaatgtcttagactttaagaaggatgctgggctgtggcacggcatgtttgcgaatgtaatgaataagatgcacacaatcagcgtaccctactctgttatgaaaacctgtcctctctcttgggtccaaagagtacatgctcacaaagccaaggtagctttagtaaaatgtcgggacttgcactgggctatgatggcacatcgggaccaaagagacgtgagcttgagttccctccgaatgttaattgtgactgatggagctaacccctggtccgtgtcatcctgtgatgccttcctgagtctgttccaaagtcatggactgaagcctgaggccatctgtccgtgcgccacgtctgctgaagccatgactgtagcaatccgcaggcctggagttccaggagcccctttgccaggaagagccattctctcaatgaatggattgagctatggggtaatacgggtcaatactgaagataaaaattcagcactgacggtccaggatgtagggcatgtaatgcctggtgggatgatgtgcattgtgaaaccagatggacctccccagctctgcaaaacagatgaaattggagaaatctgtgttagctccagaactggaggcatgatgtactttgggcttgctggtgtgacaaaaaatacatttgaggtaattccagtgaattctgcaggctctcctgttggggatgtgccattcatccgatcaggattgctggggtttgtagggccgggtagtttggtgttcgtggttgggaaaatggatggcttactgatggttagtggtcgaagacataatgctgatgacattgttgctactggattggctgtagaatcaataaagactgtttatagaggaagaattgctgtgttttctgtgtctgtattttatgatgagcgcattgtggtggttgcggaacaaagacctgatgcttctgaggaagatagtttccagtggatgagccgcgtgctgcaggcgatcgatagcattcatcaagtgggggtttattgtcttgctctggtgccagccaatacattgccaaaaactccactaggaggaatccatatatctcagacgaaacaactctttctggagggatcactgcatccttgcaacatcctcatgtgcccccatacatgtgtgacaaacttgccaaagccccggcaaaaacaaccaggtgtaggccctgcttccgtgatggttgggaatctggttgctggaaaacgtatagcacaagctgctggaagggatctgggacaaatagaagagaatgatttggtgaggaagcaccagtttctggcagagatcctacagtggcgagcccaggcgactcctgaccatgtactcttcatgctgttaaatgccaagggaaccactgtatgcacagccagctgccttcagcttcataagcgagcagagaggattgcatctgttcttggtgataagggacatctaaatgcaggagataatgtggtgttgctctatccacctggcattgagttaatcgccgccttctatggctgcctgtatgcgggctgtatacctgtgaccgtcagacctccacatgctcagaacctcacggccacgctgcccactgtccgaatgattgttgatgtcagcaaagcagcctgtattctcaccagtcagaccctaatgaggctactgaggtcccgagaggcagcagcagctgtggatgtgaaaacctggccaaccatcattgacacagatgatttacccaggaaaaggttacctcagctgtataaaccgcccactcctgagatgttggcatatcttgattttagtgtctccacaactggcatgcttacaggagtgaagatgtcccactctgcagtgaacgctctgtgtcgagccatcaagctccagtgtgagttgtactcttctcggcagatcgccatctgccttgacccttactgtggacttggcttcgcgctctggtgtctctgcagtgtctattcaggccaccagtctgtcttaattcctcctatggagttagagaacaaccttttcctctggctctccacagtcaaccagtacaaaataagggacactttctgctcctattcagtgatggagctctgcaccaaaggtcttgggaaccaagtggaagtgctaaagaccagagggatcaacctctcctgcgtccggacctgtgtggtggtggcggaggagaggccccgcgttgcactccagcagtccttctctaagctcttcaaagacatcgggctgtccccgcgggctgtcagcaccacttttggatcaagagtcaatgtagcaatatgtttacagggaacctcagggcctgatccgactactgtgtatgtggatctgaaatcactaagacatgacagggttcgtctcgtggaacgtggcgcccctcagagtttgcttctctcagagtctggaaagattttacctggagtgaaagtggttattgttaatcctgagaccaaagggccggttggagactctcaccttggagagatttgggtgaacagtccccatacagccagcggctactacaccatctatgatagcgagactcttcaagctgatcatttcaacactcgcctcagctttggagatgcagctcagacactctgggctcggacaggataccttggttttgtccgccggaccgagctcacagcggccactggagagcgtcatgatgcattgtatgtggtgggagcgctggatgaaacactggagctgagaggattacgataccacccaattgatattgagacctcggtgtcccggatccacagaagcattgctgaatgtgccgtgttcacatggaccaacttgcttgtggtggttgtggaactgtgcggctctgaacaggaagccctagatctggtcccattagtgaccaacgtggtcctggaagagcattacctcatcgttggcgtcgtggttgtggtggacccaggtgtcatcccgatcaactccagaggagagaagcagaggatgcacctccgtgatagcttcctagctgaccagttagaccccatctacgtggcttataacatgtaaccagccttgtggggactgcagtgggccattctgaagaatcacaaagacagaagacctctggctaagagcaggcttcaaacgatgtgaaataagctgagatggctacatgatattcttcatctcatcctgtgggattctgcaatcataaaacacaggaaaggggaattctgtgatggcaaatgaaaaaaatgttaacatttggtagacatgtgctttgacatagcgtgagcagcacattactaaagcaattacatgcatgttgcatttttttc

SEQ ID NO: 9352 - protein, 1458 aa, Homo sapiens
MALPMPTKRRSTFVQSPADACTPPDTSSASEDEGSLRRQAALSAALQQSLQNAESWINRSIQGSSTSSSASSTLSHGEVKGTSGSLADVFANTRIENFSAPPDVTTTTSSSSSSSSIRPANIDLPPSGIVKGMHKGSNRSSLMDTADGVPVSSRVSTKIQQLLNTLKRPKRPPLKEFFVDDSEEIVEVPQPDPNQPKPEGRQMTPVKGEPLGVICNWPPALESALQRWGTTQAKCSCLTALDMTGKPVYTLTYGKLWSRSLKLAYTLLNKLGTKNEPVLKPGDRVALVYPNNDPVMFMVAFYGCLLAEVIPVPIEVPLTRKDAGGQQIGFLLGSCGIALALTSEVCLKGLPKTQNGEIVQFKGWPRLKWVVTDSKYLSKPPKDWQPHISPAGTEPAYIEYKTSKEGSVMGVTVSRLAMLSHCQALSQACNYSEGETIVNVLDFKKDAGLWHGMFANVMNKMHTISVPYSVMKTCPLSWVQRVHAHKAKVALVKCRDLHWAMMAHRDQRDVSLSSLRMLIVTDGANPWSVSSCDAFLSLFQSHGLKPEAICPCATSAEAMTVAIRRPGVPGAPLPGRAILSMNGLSYGVIRVNTEDKNSALTVQDVGHVMPGGMMCIVKPDGPPQLCKTDEIGEICVSSRTGGMMYFGLAGVTKNTFEVIPVNSAGSPVGDVPFIRSGLLGFVGPGSLVFVVGKMDGLLMVSGRRHNADDIVATGLAVESIKTVYRGRIAVFSVSVFYDERIVVVAEQRPDASEEDSFQWMSRVLQAIDSIHQVGVYCLALVPANTLPKTPLGGIHISQTKQLFLEGSLHPCNILMCPHTCVTNLPKPRQKQPGVGPASVMVGNLVAGKRIAQAAGRDLGQIEENDLVRKHQFLAEILQWRAQATPDHVLFMLLNAKGTTVCTASCLQLHKRAERIASVLGDKGHLNAGDNVVLLYPPGIELIAAFYGCLYAGCIPVTVRPPHAQNLTATLPTVRMIVDVSKAACILTSQTLMRLLRSREAAAAVDVKTWPTIIDTDDLPRKRLPQLYKPPTPEMLAYLDFSVSTTGMLTGVKMSHSAVNALCRAIKLQCELYSSRQIAICLDPYCGLGFALWCLCSVYSGHQSVLIPPMELENNLFLWLSTVNQYKIRDTFCSYSVMELCTKGLGNQVEVLKTRGINLSCVRTCVVVAEERPRVALQQSFSKLFKDIGLSPRAVSTTFGSRVNVAICLQGTSGPDPTTVYVDLKSLRHDRVRLVERGAPQSLLLSESGKILPGVKVVIVNPETKGPVGDSHLGEIWVNSPHTASGYYTIYDSETLQADHFNTRLSFGDAAQTLWARTGYLGFVRRTELTAATGERHDALYVVGALDETLELRGLRYHPIDIETSVSRIHRSIAECAVFTWTNLLVVVVELCGSEQEALDLVPLVTNVVLEEHYLIVGVVVVVDPGVIPINSRGEKQRMHLRDSFLADQLDPIYVAYNM

SEQ ID NO: 9353 - DNA, 2274 bp, Homo sapiens
accaccgaactcgatctgggggagccagggatgaacgatatcgatcagaattctctcttgtcagaatttactctgaagatatccacacagaagcagttcaggctgcactggcaaagcataaagaacagaagatggctttgcccatgccaaccaaaaggcgatccacatttgttcagtctcctgcagatgcctgcacacctcctgacacatcttcggcctctgaggatgagggctctctgagacgccaagctgcgctctctgctgccttgcaacagagcttacagaatgctgagtcctggatcaaccgttcaattcagggatcgtccacttcttcatccgcatcttctacgctgtcccacggagaggtcaaaggaaccagtgggtctctagctgatgtatttgccaatactcgaatagagaatttctctgctcctcctgatgtcactacaactacctcttcctcctcatcatcttcctcaattcgcccagcaaacattgacctgcccccctcggggatagttaaaggcatgcacaaaggatccaacaggtccagccttatggatacagctgatggtgttcctgtcagtagcagagtatctacaaaaatccagcagcttctgaacactctgaaacgacccaaaaggcctcccttaaaggaattttttgtggatgactctgaagaaattgtggaagtacctcagccagaccccaaccagcccaagccggagggacggcagatgacccctgtgaaaggagagcctttaggagtcatctgtaactggcctcctgctcttgaatctgccctgcagcgctggggtaccactcaagcaaaatgctcctgtctgactgcactggacatgacagggaaaccagtttacactcttacatatggtgagtctgcaagattccagatccttctctcctgagagttcttcagaatatcatgggtagtgtttttatctagatacttagcagttgctggccattatgtttcagtagattttttcaataatttaaaaggatcctaagctctaagtaaagctattgccaaatattttcatttgctaaagcaacatttgcaagccagctaatatttaaaagacagcaaaaagaagagagactttgtacatccatagatgttttaacattacaagaggattttagaaaaacatttggtattgatgtatggtgaaaatcagatggttttatctaacagttgaaactgattacttgttaaatctttattccatcctgcttcttgattataataggcacaaaattctgtaatgaacaaagaatgagtacttttccgtttaattttgcatactagctaaaatttttctttttaaaataacttcaaggaaaaatggggtcaaccctgggctatgagattttgtactagtttattcaaacagattccttttctcctttgcaagtggagcacagtgtccatagacctagatggaaaataatctttgaggaaaaacaaggttttatttaaagaattacgcaggttgacatagtttaaactttggatgcccctctgaataaattgtatgtaaaataacgtagctatttaaaataacatgatttcccttatctcataatctaaaataagaatttctaagagtggttgagggaagggagtaggaaaagaaaagcattttttgtttgtttttgtcaaaattgttttaacattcacctcagaagctgtatatacatttcattcatataacccttaaagaaagcatttagctggccaaatctttgcatgtttatttaacatctatgaatacatccatatgttcatacagataatttccattttaatgtttgtttttactaaattacagcagtatggaatgtttaatcatttgagtcatgtttttgctttgcagtttcctcaagtgtctgataccacctatgtaagtggtttttcagaaaaagcttacaacatttctgaagatatttgtaaattttttaaaaaactggccgggcacagttggctcatgcctgtaatcccaacactttgggaggctgagacaggtggatcacctgaggccaggaatttgagaccagcccagacaacatggcgaaacctcatctctattaaaaatacaaaaattagccggatgtggtgacacacacctgtagtcccagctacttgagaggctgaggcaagaattactcaaacagggagacagacagaggttgcagtgagccgagattgcaccactgcactccagcctgggcgacagagtgagactctgtctt

SEQ ID NO: 9354 - protein, 264 aa, Homo sapiens
MALPMPTKRRSTFVQSPADACTPPDTSSASEDEGSLRRQAALSAALQQSLQNAESWINRSIQGSSTSSSASSTLSHGEVKGTSGSLADVFANTRIENFSAPPDVTTTTSSSSSSSSIRPANIDLPPSGIVKGMHKGSNRSSLMDTADGVPVSSRVSTKIQQLLNTLKRPKRPPLKEFFVDDSEEIVEVPQPDPNQPKPEGRQMTPVKGEPLGVICNWPPALESALQRWGTTQAKCSCLTALDMTGKPVYTLTYGESARFQILLS

SEQ ID NO: 9355 - DNA, 616 bp, Homo sapiens
taggatcatgaattactcctgttacaacaaacatccaaaaagcaataatgtggataaaatggtttctgtgagtaactgaaccagtaacttttcacagagtagtagaagcaatgaaaaatatacggttggatgagacatcttgttaacaaaaatccagatcgaatattcttcagctgggataactccacactgagactggtgttatatcttgcagcttgagcattgcttatggaaatagctatggcttcaggccatactgaaaaacctaacacaaaccataaactatttcctggatactgggagccaaatggaatgtaatttgggcttcttgggtagatccagctcctacctattcgagtattggcaaatacatcagctagagacccactggttcctttgacctctccgtgggacagcgtagaagatgcggatgaagaagtggacgatccctgaattgaacggttgatccaggactcagcattctgtaagctctgttgcaaggcagcagagagcgcagcttggcgtctcagagagccctcatcctcagaggccgaagatgtgtctgtgtggaattagaaaaaaagaagttctcgatcctacctagaacagagacttt

SEQ ID NO: 9356 - protein, 30 aa, Homo sapiens
MECNLGFLGRSSSYLFEYWQIHQLETHWFL

SEQ ID NO: 9357 - DNA, 733 bp, Homo sapiens
gttgagagcagcctaggcaacatagggagaccctgtctctactaaaaatacaaaaattagccagatgtggtggcacacacctgtaatcccagctacttgggaggctgaggcaggaaaattgcttgaacccgggaggtggaggttgcagtaaaccgagattgcgccattgcactctaatctgggcgacagaaccagaccctgtctcaacaaaaaagaaagggaagatggaaaaggtgtgttaaggcagcccggaggcaaacatatccttgagatgcttttggagctattgtagaaagaaagaatgtgtttgttaggactagtcttggctgcaggttgcagaaaaacataaattgcagctcaggcaagaaacaagcatatttttgtcaggtaaaaaaagttcagagctaggtagtccaaaggctaggatagtcactcctcaatcatgttcttctagcttcccatctttttgctctggtgttttgtctgtcacctcttgtcatagatacgctacagaacaaataaccctaaaactcagtgccttgaagtagcaagcatttactttttactcatggaatgtggatctgcttggcttggctgggatccactggacttgacttggctccaggcttaggttgggttcagagctgttccatgtgtctcctcatcatgggaccagcagctacctgggccgtatttttttcaaggcagatggcagaagcaacaaagcaagcca

SEQ ID NO: 9358 - protein, 52 aa, Homo sapiens
MWICLAWLGSTGLDLAPGLGWVQSCSMCLLIMGPAATWAVFFSRQMAEATKQ

SEQ ID NO: 9359 - DNA, 1246 bp, Homo sapiens
atctagttttgtagttcctcaggcctctaatttattttttgctttctgctttattgatcttttgcatgtcccccaaagccagaatctgctcatggaggaaggaaggctaagaactgtccttgaggaacttcatcagtaactctggtaaagcatcctgtggagggagaggagagcccagtcatttgcttagatggtgtttgtgggatcacctgcagatttaaagcctactctgccacagactcgagtaagaaaatgttctcttgatgacacagtgctcctactctatccacattaagtagcacttttgtggtagaactgattcttaaggcaggcctgaaaggccattactaatagaaacacagcctttccaatcctctggaacatattctgtctgggtttttaatgtctgtggaaaaaaactaaacaagtctctgtctcagttaagagaaatctattggtctgaaggtttctgaacctctttctggttctcagcagaagtaactgaagtagatcaggaaggggctgcctcaggaaaattcctagatcctaggaattcagtgagaccctgggaaggaccagcatgctaatcagtgtcagtgaatccacagtctttacttcctgcctcataaagggccaggtctccccagtaccaagtcctttcctcatgaagttgtgttgcctcaggctgtttagggaccattgcctgtcttggtcacatgagtctgtctccttactttagtccctgggcaatccttgcttaatgcttttgttgactcaacaagggcccgaggccttaggttttctattaaggtctctgccccaggcatggtgctctatatcttggccaaataaattactttccttgaatatccaggaatcttttagtctaaagcaatgaggagttatcacctcatcctcaaactccaacaagatctatgccttagtgttgtttttgttgtctgctttgatgtaaaagcaagagtatttggagcaagaagctgcaatgcgccaaatacacaataggccttttctttatcattcatacgacatttctggtttaggtgtatgtagttgggccatgttacttgtccagaggaagagactaaagatataagaataattttttagtcctaaatgctgttttgtttactttctgtcaagatatttacccgtgtcaaattcaaactacagtactgtgtaattatctcattgaatgtgtttcctttgtcttgtgttaataaatatt

SEQ ID NO: 9360 - protein, 36 aa, Homo sapiens
MLFCLLSVKIFTRVKFKLQYCVIISLNVFPLSCVNK

SEQ ID NO: 9361 - DNA, 632 bp, Homo sapiens
atcccattaaaaaaaaattttaaaaaaagaggttataatgaaatggatttaataacactgcctatcccatagggttttgtagactgaattactttgatacacgtaaagttagagctgtgcctagtatatagtaagcactaaataaatgttggatttttttttagacggttccagcctgggcaacaagagcgaaactcagtcaagaaggagggagggaggaagggagggagggagagaaggaaggagggagggaagggaaggaaggctaattcaaaactagtacttatcatcatggccacatctgccaggcaccgatcccacttcctgtcaagcctccactccaacatctccccacccatggctccctatctcatttaatttattgaatattacactgaaagtgaaaaacagaatggttttatgggtactcaaagtatggtttctactgactgcatcacttttgcaccattgtaaagttgaaaaattgttaagttgaaccatcataagtcacagactgtattttattccttttgatgctatttcaaatggaattgttttgtgtattttatttttggaaagttcattgctagtgaatagaaataaaattgacttatgttgctcttgtattcttc

SEQ ID NO: 9362 - protein, 44 aa, Homo sapiens
MLDFFLDGSSLGNKSETQSRRREGGREGGREGRREGREGRLIQN

SEQ ID NO: 9363 - DNA, 1585 bp, Homo sapiens
gcgcggaggcagcgccatagcctaccccaaacgcacactagtgctcagttttgcccccctcccctcccccgcccccgcccccgcccccaggcttgtgtagatcatgccgccagtagcggccctgactgccgaggaaacggtagcttaggacagttggctgttaagtgacactgattctccccgccccgcctgacccccgagaaggaggcttgtcccccgctgcgtgagggggtggggaagtgggtagtgaattcggatctacctgggaggggggagtggaagttcccgccccggagagcggcgaggcggcagccacagttgattatggaagattcccacaagagtaccacgtcagagacagcacctcaacctggttcagcagttcagggagctcacatttctcatattgctcaacaggtatcatctttatcagaaagtgaggagtcccaggactcatccgacagcataggctcctcacagaaagcccacgggatcctagcacggcgcccatcttacagaaaaattttgaaagacttatcttctgaagatacacggggcagaaaaggagacggagaaaattctggagtttctgctgctgtcacttctatgtctgttccaactcccatctatcagactagcagcggacagtacattgccattgccccaaatggagccttacagttggcaagtccaggcacagatggagtacagggacttcagacattaaccatgacaaattcaggcagtactcagcaaggtacaactattcttcagtatgcacagacctctgatggacagcagatacttgtgcccagcaatcaggtggtcgtacaaactgcatcaggagatatgcaaacatatcagatccgaactacaccttcagctacttctctgccacaaactgtggtgatgacatctcctgtgactctcacctctcagacaactaagacagatgacccccaattgaaaagagaaataaggttaatgaaaaacagagaagctgctcgagaatgtcgcagaaagaagaaagaatatgtgaaatgcctggaaaaccgagttgcagtcctggaaaatcaaaataaaactctaatagaagagttaaaaactttgaaggatctttattccaataaaagtgtttgattcctaagaaagaaaatatttttgtggacatgcataaaaattaaatggatttcctagtggagttttataaattaaaaggtcaaaactgaagctttttatttaggcttttccaaatcaaggataaatatcttacgcacgatatctagtgacagaggagaaagtggaaaatgacctcaaggaagctacgggcacaactggaagctttgtagaaattaaacatattcaaggagcaagaaatgaactttcagcagtctaaattttctaaataaccaatagttgccaatctaaaatggcagagaagatgaaatttgataaactgaattttttttaaaaatccatttaccctacaggtttgcatttgtttgctgaaatttacctttttttagttatatatatgtgtgtgtgtgtgtgtaatttctgccaataaattctaaattacaaaggt

SEQ ID NO: 9364 - protein, 271 aa, Homo sapiens; identical to SEQ ID NO: 1428

SEQ ID NO: 9365 - DNA, 1638 bp, Homo sapiens
gcgcggaggcagcgccatagcctaccccaaacgcacactagtgctcagttttgcccccctcccctcccccgcccccgcccccgcccccaggcttgtgtagatcatgccgccagtagcggccctgactgccgaggaaacggtagcttaggacagttggctgttaagtgacactgattctccccgccccgcctgacccccgagaaggaggcttgtcccccgctgcgtgagggggtggggaagtgggtagtgaattcggatctacctgggaggggggagtggaagttcccgccccggagagcggcgaggcggcagccacagttgattatggaagattcccacaagagtaccacgtcagagacagcacctcaacctggttcagcagttcagggagctcacatttctcatattgctcaacaggtatcatctttatcagaaagtgaggagtcccaggactcatccgacagcataggctcctcacagaaagcccacgggatcctagcacggcgcccatcttacagaaaaattttgaaagacttatcttctgaagatacacggggcagaaaaggagacggagaaaattctggagtttctgctgctgtcacttctatgtctgttccaactcccatctatcagactagcagcggacagtacattgccattgccccaaatggagccttacagttggcaagtccaggcacagatggagtacagggacttcagacattaaccatgacaaattcaggcagtactcagcaaggtacaactattcttcagtatgcacagacctctgatggacagcagatacttgtgcccagcaatcaggtggtcgtacaaactgcatcaggagatatgcaaacatatcagatccgaactacaccttcagctacttctctgccacaaactgtggtgatgacatctcctgtgactctcacctctcagacaactaagacagatgacccccaattgaaaagagaaataaggttaatgaaaaacagagaagctgctcgagaatgtcgcagaaagaagaaagaatatgtgaaatgcctggaaaaccgagttgcagtcctggaaaatcaaaataaaactctaatagaagagttaaaaactttgaaggatctttattccaataaaagtgtttgattcctaagaaagaaaatatttttgtggacatgcataaaaattaaatggatttcctagtggagttttataaattaaaaggtcaaaactgaagctttttatttaggcttttccaaatcaaggataaatatcttacgcacgatatctagtgacagaggagaaagtggaaaatgacctcaaggaagctacgggcacaactggaagctttgtagaaattaaacatattcaaggagcaagaaatgaactttcagcagtctaaattttctaaataaccaatagttgccaatctaaaatggcagagaagatgaaatttgataaactgaattttttttaaaaatccatttaccctacaggtttgcatttgtttgctgaaatttacctttttttagttatatatatgtgtgtgtgtgtgtgtaatttctgccaataaattctaaattacaaaggtaagagaaaacctagtacattactaaatatataaagtatatgttctgattatgt

SEQ ID NO: 9366 - protein, 271 aa, Homo sapiens; identical to SEQ ID NO: 1428

SEQ ID NO: 9367 - DNA, 2493 bp, Homo sapiens
gcgcggaggcagcgccatagcctaccccaaacgcacactagtgctcagttttgcccccctcccctcccccgcccccgcccccgcccccaggcttgtgtagatcatgccgccagtagcggccctgactgccgaggaaacggtagcttaggacagttggctgttaagtgacactgattctccccgccccgcctgacccccgagaaggaggcttgtcccccgctgcgtgagggggtggggaagtgggtagtgaattcggatctacctgggaggggggagtggaagttcccgccccggagagcggcgaggcggcagccacagttgattatggaagattcccacaagagtaccacgtcagagacagcacctcaacctggttcagcagttcagggagctcacatttctcatattgctcaacaggtatcatctttatcagaaagtgaggagtcccaggactcatccgacagcataggctcctcacagaaagcccacgggatcctagcacggcgcccatcttacagaaaaattttgaaagacttatcttctgaagatacacggggcagaaaaggagacggagaaaattctggagtttctgctgctgtcacttctatgtctgttccaactcccatctatcagactagcagcggacagtacattgccattgccccaaatggagccttacagttggcaagtccaggcacagatggagtacagggacttcagacattaaccatgacaaattcaggcagtactcagcaaggtacaactattcttcagtatgcacagacctctgatggacagcagatacttgtgcccagcaatcaggtggtcgtacaaactgcatcaggagatatgcaaacatatcagatccgaactacaccttcagctacttctctgccacaaactgtggtgatgacatctcctgtgactctcacctctcagacaactaagacagatgacccccaattgaaaagagaaataaggttaatgaaaaacagagaagctgctcgagaatgtcgcagaaagaagaaagaatatgtgaaatgcctggaaaaccgagttgcagtcctggaaaatcaaaataaaactctaatagaagagttaaaaactttgaaggatctttattccaataaaagtgtttgattcctaagaaagaaaatatttttgtggacatgcataaaaattaaatggatttcctagtggagttttataaattaaaaggtcaaaactgaagctttttatttaggcttttccaaatcaaggataaatatcttacgcacgatatctagtgacagaggagaaagtggaaaatgacctcaaggaagctacgggcacaactggaagctttgtagaaattaaacatattcaaggagcaagaaatgaactttcagcagtctaaattttctaaataaccaatagttgccaatctaaaatggcagagaagatgaaatttgataaactgaattttttttaaaaatccatttaccctacaggtttgcatttgtttgctgaaatttacctttttttagttatatatatgtgtgtgtgtgtgtgtaatttctgccaataaattctaaattacaaaggtaagagaaaacctagtacattactaaatatataaagtatatgttctgattatgtatacttgttctagtgtcaagtctttttaagtgggtttttaaaagtttgttattggacttgaatggatttttgagactaggttaattatttttgaggtcttatcctaaaaggcatctaaggtacatgaatggagtatggtgattttataacattttttatcagaatggaaaaagaactgtttaaaagtttgatacttttaaatagttggtttttttgcttactctggtaatgattttctacaaatacataataaattgtttttttgagtctatattctgtatgcagttgaatatccattacttattctgctgtgctttaatagaatggaatgtttacaggcccttaaaatattatttttaaaaaaccttctgaagatacataccaaagtttttccaagaagattttataatcaatttaataatgtaaggtttatcagattctataatagtatagttattaaggcaattttatgttagagactattttgtaatgtagtgagtggtacctttataagaaaagtgactgccaatatatttttatagctgatctttataaattctaatgttgagtttttaatgattattttaaatgtttatatagtttagtaaaatttgcatctcaaagtatcatttttatattatgggacgttttcagattggctaatatttgcattgtaaattttgtatgcagtttatctaaaattcaaaaatactgtcagtacaccagcgtttaacatctatattccaatttgtatacagtttaaaattgtactgcaaaactattgtgtgctcttacacagtatgcatcatattgttgtctgtgaaattaaaggacatttgatagtctactgaatgt

SEQ ID NO: 9368 - protein, 271 aa, Homo sapiens; identical to SEQ ID NO: 1428

SEQ ID NO: 9369 - DNA, 2521 bp, Homo sapiens
gcgcggaggcagcgccatagcctaccccaaacgcacactagtgctcagttttgcccccctcccctcccccgcccccgcccccgcccccaggcttgtgtagatcatgccgccagtagcggccctgactgccgaggaaacggtagcttaggacagttggctgttaagtgacactgattctccccgccccgcctgacccccgagaaggaggcttgtcccccgctgcgtgagggggtggggaagtgggtagtgaattcggatctacctgggaggggggagtggaagttcccgccccggagagcggcgaggcggcagccacagttgattatggaagattcccacaagagtaccacgtcagagacagcacctcaacctggttcagcagttcagggagctcacatttctcatattgctcaacaggtatcatctttatcagaaagtgaggagtcccaggactcatccgacagcataggctcctcacagaaagcccacgggatcctagcacggcgcccatcttacagaaaaattttgaaagacttatcttctgaagatacacggggcagaaaaggagacggagaaaattctggagtttctgctgctgtcacttctatgtctgttccaactcccatctatcagactagcagcggacagtacattgccattgccccaaatggagccttacagttggcaagtccaggcacagatggagtacagggacttcagacattaaccatgacaaattcaggcagtactcagcaaggtacaactattcttcagtatgcacagacctctgatggacagcagatacttgtgcccagcaatcaggtggtcgtacaaactgcatcaggagatatgcaaacatatcagatccgaactacaccttcagctacttctctgccacaaactgtggtgatgacatctcctgtgactctcacctctcagacaactaagacagatgacccccaattgaaaagagaaataaggttaatgaaaaacagagaagctgctcgagaatgtcgcagaaagaagaaagaatatgtgaaatgcctggaaaaccgagttgcagtcctggaaaatcaaaataaaactctaatagaagagttaaaaactttgaaggatctttattccaataaaagtgtttgattcctaagaaagaaaatatttttgtggacatgcataaaaattaaatggatttcctagtggagttttataaattaaaaggtcaaaactgaagctttttatttaggcttttccaaatcaaggataaatatcttacgcacgatatctagtgacagaggagaaagtggaaaatgacctcaaggaagctacgggcacaactggaagctttgtagaaattaaacatattcaaggagcaagaaatgaactttcagcagtctaaattttctaaataaccaatagttgccaatctaaaatggcagagaagatgaaatttgataaactgaattttttttaaaaatccatttaccctacaggtttgcatttgtttgctgaaatttacctttttttagttatatatatgtgtgtgtgtgtgtgtaatttctgccaataaattctaaattacaaaggtaagagaaaacctagtacattactaaatatataaagtatatgttctgattatgtatacttgttctagtgtcaagtctttttaagtgggtttttaaaagtttgttattggacttgaatggatttttgagactaggttaattatttttgaggtcttatcctaaaaggcatctaaggtacatgaatggagtatggtgattttataacattttttatcagaatggaaaaagaactgtttaaaagtttgatacttttaaatagttggtttttttgcttactctggtaatgattttctacaaatacataataaattgtttttttgagtctatattctgtatgcagttgaatatccattacttattctgctgtgctttaatagaatggaatgtttacaggcccttaaaatattatttttaaaaaaccttctgaagatacataccaaagtttttccaagaagattttataatcaatttaataatgtaaggtttatcagattctataatagtatagttattaaggcaattttatgttagagactattttgtaatgtagtgagtggtacctttataagaaaagtgactgccaatatatttttatagctgatctttataaattctaatgttgagtttttaatgattattttaaatgtttatatagtttagtaaaatttgcatctcaaagtatcatttttatattatgggacgttttcagattggctaatatttgcattgtaaattttgtatgcagtttatctaaaattcaaaaatactgtcagtacaccagcgtttaacatctatattccaatttgtatacagtttaaaattgtactgcaaaactattgtgtgctcttacacagtatgcatcatattgttgtctgtgaaattaaaggacatttgatagtctactgaatgtaaaatataatgcttggtatatgaatgat

SEQ ID NO: 9370 - protein, 271 aa, Homo sapiens; identical to SEQ ID NO: 1428

SEQ ID NO: 9371 - DNA, 1177 bp, Homo sapiens
agttgattatggaagattcccacaagagtaccacgtcagagacagcacctcaacctggttcagcagttcagggagctcacatttctcatattgctcaacaggtattacagaaaaattttgaaagacttatcttctgaagatacacggggcagaaaaggagacggagaaaattctggagtttctgctgctgtcacttctatgtctgttccaactcccatctatcagactagcagcggacagtacattgccattgccccaaatggagccttacagttggcaagtccaggcacagatggagtacagggacttcagacattaaccatgacaaattcaggcagtactcagcaaggtacaactattcttcagtatgcacagacctctgatggacagcagatacttgtgcccagcaatcaggtggtcgtacaaactgcatcaggagatatgcaaacatatcagatccgaactacaccttcagctacttctctgccacaaactgtggtgatgacatctcctgtgactctcacctctcagacaactaagacagatgacccccaattgaaaagagaaataaggttaatgaaaaacagagaagctgctcgagaatgtcgcagaaagaagaaagaatatgtgaaatgcctggaaaaccgagttgcagtcctggaaaatcaaaataaaactctaatagaagagttaaaaactttgaaggatctttattccaataaaagtgtttgattcctaagaaagaaaatatttttgtggacatgcataaaaattaaatggatttcctagtggagttttataaattaaaaggtcaaaactgaagctttttatttaggcttttccaaatcaaggataaatatcttacgcacgatatctagtgacagaggagaaagtggaaaatgacctcaaggaagctacgggcacaactggaagctttgtagaaattaaacatattcaaggagcaagaaatgaactttcagcagtctaaattttctaaataaccaatagttgccaatctaaaatggcagagaagatgaaatttgataaactgaattttttttaaaaatccatttaccctacaggtttgcatttgtttgctgaaatttacctttttttagttatatatatgtgtgtgtgtgtgtgtaatttctgccaataaattctaaattacaaaggt

SEQ ID NO: 9372 - protein, 177 aa, Homo sapiens
MSVPTPIYQTSSGQYIAIAPNGALQLASPGTDGVQGLQTLTMTNSGSTQQGTTILQYAQTSDGQQILVPSNQVVVQTASGDMQTYQIRTTPSATSLPQTVVMTSPVTLTSQTTKTDDPQLKREIRLMKNREAARECRRKKKEYVKCLENRVAVLENQNKTLIEELKTLKDLYSNKSV

SEQ ID NO: 9373 - DNA, 1126 bp, Homo sapiens
ttacagaaaaattttgaaagacttatcttctgaagatacacggggcagaaaaggagacggagaaaattctggagtttctgctgctgtcacttctatgtctgttccaactcccatctatcagactagcagcggacagtacattgccattgccccaaatggagccttacagttggcaagtccaggcacagatggagtacagggacttcagacattaaccatgacaaattcaggcagtactcagcaaggtacaactattcttcagtatgcacagacctctgatggacagcagatacttgtgcccagcaatcaggtggtcgtacaaactgcatcaggagatatgcaaacatatcagatccgaactacaccttcagctacttctctgccacaaactgtggtgatgacatctcctgtgactctcacctctcagacaactaagacagatgacccccaattgaaaagagaaataaggttaatgaaaaacagagaagctgctcgagaatgtcgcagaaagaagaaagaatatgtgaaatgcctggaaaaccgagttgcagtcctggaaaatcaaaataaaactctaatagaagagttaaaaactttgaaggatctttattccaataaaagtgtttgattcctaagaaagaaaatatttttgtggacatgcataaaaattaaatggatttcctagtggagttttataaattaaaaggtcaaaactgaagctttttatttaggcttttccaaatcaaggataaatatcttacgcacgatatctagtgacagaggagaaagtggaaaatgacctcaaggaagctacgggcacaactggaagctttgtagaaattaaacatattcaaggagcaagaaatgaactttcagcagtctaaattttctaaataaccaatagttgccaatctaaaatggcagagaagatgaaatttgataaactgaattttttttaaaaatccatttaccctacaggtttgcatttgtttgctgaaatttacctttttttagttatatatatgtgtgtgtgtgtgtgtaatttctgccaataaattctaaattacaaaggtaagagaaaacctagtacattactaaatatataaagtatatgttctgattatgt

SEQ ID NO: 9374 - protein, 177 aa, Homo sapiens; identical to SEQ ID NO: 9372

SEQ ID NO: 9375 - DNA, 1981 bp, Homo sapiens
ttacagaaaaattttgaaagacttatcttctgaagatacacggggcagaaaaggagacggagaaaattctggagtttctgctgctgtcacttctatgtctgttccaactcccatctatcagactagcagcggacagtacattgccattgccccaaatggagccttacagttggcaagtccaggcacagatggagtacagggacttcagacattaaccatgacaaattcaggcagtactcagcaaggtacaactattcttcagtatgcacagacctctgatggacagcagatacttgtgcccagcaatcaggtggtcgtacaaactgcatcaggagatatgcaaacatatcagatccgaactacaccttcagctacttctctgccacaaactgtggtgatgacatctcctgtgactctcacctctcagacaactaagacagatgacccccaattgaaaagagaaataaggttaatgaaaaacagagaagctgctcgagaatgtcgcagaaagaagaaagaatatgtgaaatgcctggaaaaccgagttgcagtcctggaaaatcaaaataaaactctaatagaagagttaaaaactttgaaggatctttattccaataaaagtgtttgattcctaagaaagaaaatatttttgtggacatgcataaaaattaaatggatttcctagtggagttttataaattaaaaggtcaaaactgaagctttttatttaggcttttccaaatcaaggataaatatcttacgcacgatatctagtgacagaggagaaagtggaaaatgacctcaaggaagctacgggcacaactggaagctttgtagaaattaaacatattcaaggagcaagaaatgaactttcagcagtctaaattttctaaataaccaatagttgccaatctaaaatggcagagaagatgaaatttgataaactgaattttttttaaaaatccatttaccctacaggtttgcatttgtttgctgaaatttacctttttttagttatatatatgtgtgtgtgtgtgtgtaatttctgccaataaattctaaattacaaaggtaagagaaaacctagtacattactaaatatataaagtatatgttctgattatgtatacttgttctagtgtcaagtctttttaagtgggtttttaaaagtttgttattggacttgaatggatttttgagactaggttaattatttttgaggtcttatcctaaaaggcatctaaggtacatgaatggagtatggtgattttataacattttttatcagaatggaaaaagaactgtttaaaagtttgatacttttaaatagttggtttttttgcttactctggtaatgattttctacaaatacataataaattgtttttttgagtctatattctgtatgcagttgaatatccattacttattctgctgtgctttaatagaatggaatgtttacaggcccttaaaatattatttttaaaaaaccttctgaagatacataccaaagtttttccaagaagattttataatcaatttaataatgtaaggtttatcagattctataatagtatagttattaaggcaattttatgttagagactattttgtaatgtagtgagtggtacctttataagaaaagtgactgccaatatatttttatagctgatctttataaattctaatgttgagtttttaatgattattttaaatgtttatatagtttagtaaaatttgcatctcaaagtatcatttttatattatgggacgttttcagattggctaatatttgcattgtaaattttgtatgcagtttatctaaaattcaaaaatactgtcagtacaccagcgtttaacatctatattccaatttgtatacagtttaaaattgtactgcaaaactattgtgtgctcttacacagtatgcatcatattgttgtctgtgaaattaaaggacatttgatagtctactgaatgt

SEQ ID NO: 9376 - protein, 177 aa, Homo sapiens; identical to SEQ ID NO: 9372

SEQ ID NO: 9377 - DNA, 2009 bp, Homo sapiens
ttacagaaaaattttgaaagacttatcttctgaagatacacggggcagaaaaggagacggagaaaattctggagtttctgctgctgtcacttctatgtctgttccaactcccatctatcagactagcagcggacagtacattgccattgccccaaatggagccttacagttggcaagtccaggcacagatggagtacagggacttcagacattaaccatgacaaattcaggcagtactcagcaaggtacaactattcttcagtatgcacagacctctgatggacagcagatacttgtgcccagcaatcaggtggtcgtacaaactgcatcaggagatatgcaaacatatcagatccgaactacaccttcagctacttctctgccacaaactgtggtgatgacatctcctgtgactctcacctctcagacaactaagacagatgacccccaattgaaaagagaaataaggttaatgaaaaacagagaagctgctcgagaatgtcgcagaaagaagaaagaatatgtgaaatgcctggaaaaccgagttgcagtcctggaaaatcaaaataaaactctaatagaagagttaaaaactttgaaggatctttattccaataaaagtgtttgattcctaagaaagaaaatatttttgtggacatgcataaaaattaaatggatttcctagtggagttttataaattaaaaggtcaaaactgaagctttttatttaggcttttccaaatcaaggataaatatcttacgcacgatatctagtgacagaggagaaagtggaaaatgacctcaaggaagctacgggcacaactggaagctttgtagaaattaaacatattcaaggagcaagaaatgaactttcagcagtctaaattttctaaataaccaatagttgccaatctaaaatggcagagaagatgaaatttgataaactgaattttttttaaaaatccatttaccctacaggtttgcatttgtttgctgaaatttacctttttttagttatatatatgtgtgtgtgtgtgtgtaatttctgccaataaattctaaattacaaaggtaagagaaaacctagtacattactaaatatataaagtatatgttctgattatgtatacttgttctagtgtcaagtctttttaagtgggtttttaaaagtttgttattggacttgaatggatttttgagactaggttaattatttttgaggtcttatcctaaaaggcatctaaggtacatgaatggagtatggtgattttataacattttttatcagaatggaaaaagaactgtttaaaagtttgatacttttaaatagttggtttttttgcttactctggtaatgattttctacaaatacataataaattgtttttttgagtctatattctgtatgcagttgaatatccattacttattctgctgtgctttaatagaatggaatgtttacaggcccttaaaatattatttttaaaaaaccttctgaagatacataccaaagtttttccaagaagattttataatcaatttaataatgtaaggtttatcagattctataatagtatagttattaaggcaattttatgttagagactattttgtaatgtagtgagtggtacctttataagaaaagtgactgccaatatatttttatagctgatctttataaattctaatgttgagtttttaatgattattttaaatgtttatatagtttagtaaaatttgcatctcaaagtatcatttttatattatgggacgttttcagattggctaatatttgcattgtaaattttgtatgcagtttatctaaaattcaaaaatactgtcagtacaccagcgtttaacatctatattccaatttgtatacagtttaaaattgtactgcaaaactattgtgtgctcttacacagtatgcatcatattgttgtctgtgaaattaaaggacatttgatagtctactgaatgtaaaatataatgcttggtatatgaatgat

SEQ ID NO: 9378 - protein, 177 aa, Homo sapiens; identical to SEQ ID NO: 9372

SEQ ID NO: 9379 - DNA, 1454 bp, Homo sapiens
gggaagtacctgccgccatcttgctcaccagcctccaaaatgcggctggggctcctgagcgtggcgctgttgtttgtggggagctctcacttatactcagaccactactcgccctctggaaggcacaggctcggcccctcgccggaaccggcggctagttcccagcaggctgaggccgtccgcaagaggctccggcggcggagggagggaggggcgcatgcagagggcaattgtggaacagcaccgcttaaggatgtgttgcaagggtctcggattatagggggcaccgaagcacaagctggcgcatggccgtgggtggtgagcctgcagattaaatatggccgtgttcttgttcatgtatgtgggggaaccctagtgagagagaggtgggtcctcacagctgcccactgcactaaagacgctagcgatcctttaatgtggacagctgtgattggaactaataatatacatggacgctatcctcataccaagaagataaaaattaaagcaatcattattcatccaaacttcattttggaatcttatgtaaatgatattgcactttttcacttaaaaaaagcagtgaggtataatgactatattcagcctatttgcctaccttttgatgttttccaaatcctggacggaaacacaaagtgttttataagtggctggggaagaacaaaagaagaaggtaacgctacaaatattttacaagatgcagaagtgcattatatttctcgagagatgtgtaattctgagaggagttatgggggaataattcctaacacttcattttgtgcaggtgatgaagatggagcttttgatacttgcaggggtgacagtgggggaccattaatgtgctacttaccagaatataaaagattttttgtaatgggaattaccagttacggacatggctgtggtcgaagaggttttcctggtgtctatattgggccatccttctaccaaaagtggctgacagagcatttcttccatgcaagcactcaaggcatacttactataaatattttacgtggccagatcctcatagctttatgttttgtcatcttactagcaacaacataaagaaattctgaaggctttcatatctttattttgcattgtgtccctttctatgttctatataatgaacatcatttattcttctagcaattaattgcctacattagagatttcatgtgaacattttatgggctataagtattgtgacagatatacaattgtaattttggcactgaatcacatgtctccttgaaatatcttgattattttataatcataattctgtatctggaatactcatagagtttgtacaaaatattcagttaaacatatattttatgtgtataaatgccaaataatagtttataattaaaatgaaagctgtcatttggttaaattaataaaaattctttcttagattttattct

SEQ ID NO: 9380 - protein, 349 aa, Homo sapiens
MRLGLLSVALLFVGSSHLYSDHYSPSGRHRLGPSPEPAASSQQAEAVRKRLRRRREGGAHAEGNCGTAPLKDVLQGSRIIGGTEAQAGAWPWVVSLQIKYGRVLVHVCGGTLVRERWVLTAAHCTKDASDPLMWTAVIGTNNIHGRYPHTKKIKIKAIIIHPNFILESYVNDIALFHLKKAVRYNDYIQPICLPFDVFQILDGNTKCFISGWGRTKEEGNATNILQDAEVHYISREMCNSERSYGGIIPNTSFCAGDEDGAFDTCRGDSGGPLMCYLPEYKRFFVMGITSYGHGCGRRGFPGVYIGPSFYQKWLTEHFFHASTQGILTINILRGQILIALCFVILLATT

SEQ ID NO: 9381 - DNA, 3327 bp, Homo sapiens
gggaagtacctgccgccatcttgctcaccagcctccaaaatgcggctggggctcctgagcgtggcgctgttgtttgtggggagctctcacttatactcagaccactactcgccctctggaaggcacaggctcggcccctcgccggaaccggcggctagttcccagcaggctgaggccgtccgcaagaggctccggcggcggagggagggaggggcgcatgcagagggcaattgtggaacagcaccgcttaaggatgtgttgcaagggtctcggattatagggggcaccgaagcacaagctggcgcatggccgtgggtggtgagcctgcagattaaatatggccgtgttcttgttcatgtatgtgggggaaccctagtgagagagaggtgggtcctcacagctgcccactgcactaaagacgctagcgatcctttaatgtggacagctgtgattggaactaataatatacatggacgctatcctcataccaagaagataaaaattaaagcaatcattattcatccaaacttcattttggaatcttatgtaaatgatattgcactttttcacttaaaaaaagcagtgaggtataatgactatattcagcctatttgcctaccttttgatgttttccaaatcctggacggaaacacaaagtgttttataagtggctggggaagaacaaaagaagaaggtaacgctacaaatattttacaagatgcagaagtgcattatatttctcgagagatgtgtaattctgagaggagttatgggggaataattcctaacacttcattttgtgcaggtgatgaagatggagcttttgatacttgcagggtaagaccaagtaattttcctttaaaatattttctgaagccagaagggaacttgtcaaacaaggcctttgataactttctggtggtcttaattatcaggcctaaaaataataaatcattttttctcctttttaactatttcaacaatccaaatcttcttggttcctgattccatggtttctgctgtcatcagtaggcagaatttaccttgaattcttttttttaatcattacctttgagatataattcacctagttaaaagtgtacagctcaattttttttttatttgagatagtctcgctttgtcacccatgctggagtgcagtgacacaatctctgttcactgcaacctctgcctcccaggttcaagcgattctcatccctcagcctcctaggtagctggaattacaggcacacatcactatgcccggccattctttttttttttttttgtattttcagtagagacagggcttcaccttgttgaccaggctggtcttgaactcctgacctcaagtgatctgcccaccttggcctcccaaagtgctgggattacaggggtgagccactgcgcccagcctgttactgtcttttttattataaccatccttgtgggtgcgcagtggtatctcatagtggttttaatttgcatttccttaatgactaatgatgttgagcatttttgcatgtatttattagccatttatatatcttctttacagaatgtctatttggatcccttcctcatttttaaattgagttgtctttttatcactgagttataagcatttttcatatattctggatacaagtcccttaccagatacataatgtacaaaatttttctcccattctgtagactgttttttcacttttctgaggttatcatttgcagcacaaatgttaatttttttaatgaagtacaattgatccattttttgttttgtctcatgcttttttactcttcctttattcctcttttcttcactatttccaaagctactagtccttcactcctgagtaacccatgctctcaccttttcctactcattctcatttctgcaatctaaagtttatcttttctgtgtccttttccttaaaaatcttgctgaatgaaatagtaaagaatccaatctaagtgaattgcattcctaggccaaacatcctcatcatcaaaaaataattattcaatgcctgccttatatagagaatcggaaacagttatctcagtgtccttgttgttttcagtgcattaacaggccttagtaacagcatttgggtgcattcctaattttgtatagactatgaaagtgacctgtcatttataatactactgagaggctttgccatttatgctcattttcctgcactagctattgtcaacacttagaaacttgtcttctattgcaagatgccagtttactcctctccctggcaagcaaaccacacacgtgcctaaaagaatccttcatacatcttaaagttatcctttccacacgcagtattcagcaagagaatattctaataatagacagttttgacaatattttgcacacttcctaaattatatttctcctaagtaattatatttaaaaatccaaacaatttgatttatagtattctggctcaaaaccaggcagatgagaaatttatctaccagctatatggttcctccaaatacctgggtaaaattgaattcctcctgtttgagttggaagtttaagctcaaaatctagtgatctttataaattgggggtatattgaaaatgtgtatttatataaatgtatgtttgatgtaaataatttattccagtgttactgttgcttgaagaatactagaagtaacaaacactattttgggacttttttgacagggtgacagtgggggaccattaatgtgctacttaccagaatataaaagattttttgtaatgggaattaccagttacggacatggctgtggtcgaagaggttttcctggtgtctatattgggccatccttctaccaaaagtggctgacagagcatttcttccatgcaagcactcaaggcatacttactataaatattttacgtggccagatcctcatagctttatgttttgtcatcttactagcaacaacataaagaaattctgaaggctttcatatctttattttgcattgtgtccctttctatgttctatataatgaacatcatttattcttctagcaattaattgcctacattagagatttcatgtgaacattttatgggctataagtattgtgacagatatacaattgtaattttggcactgaatcacatgtctccttgaaatatcttgattattttataatcataattctgtatctggaatactcatagagtttgtacaaaatattcagttaaacatatattttatgtgtataaatgccaaataatagtttataattaaaatgaaagctgtcatttggttaaattaataaaaattctttcttagattttattct

SEQ ID NO: 9382 - protein, 321 aa, Homo sapiens
MRLGLLSVALLFVGSSHLYSDHYSPSGRHRLGPSPEPAASSQQAEAVRKRLRRRREGGAHAEGNCGTAPLKDVLQGSRIIGGTEAQAGAWPWVVSLQIKYGRVLVHVCGGTLVRERWVLTAAHCTKDASDPLMWTAVIGTNNIHGRYPHTKKIKIKAIIIHPNFILESYVNDIALFHLKKAVRYNDYIQPICLPFDVFQILDGNTKCFISGWGRTKEEGNATNILQDAEVHYISREMCNSERSYGGIIPNTSFCAGDEDGAFDTCRVRPSNFPLKYFLKPEGNLSNKAFDNFLVVLIIRPKNNKSFFLLFNYFNNPNLLGS

SEQ ID NO: 9383 - DNA, 1189 bp, Homo sapiens
gcctctcgccccgcctcccgcgctccccgtcaggttcaaagccccctcccgcctaacgtcttcagcccagccaggctgcccttcttccctgcggagggagggcctgggcggtcgcgttggcgggagggaggttacctttcccagtctcgctctggccgcctgagccaggaggaagcagcggcgaggtctgcgggaggcatggcgggagctccggacgagcgccggcggggccccgcggcaggggagcagctgcagcagcaacacgtctcttgccaggtcttccccgagcgtctggcccaggggaatccccagcaagggttcttctccagcttcttcaccagcaaccagaagtgccagcttaggctcctgaagacgctggagacaaatccatatgtcaaacttctgcttgatgctatgaaacactcaggttgtgctgttaacaaagatagacacttttcttgcgaagactgtaatggaaatgtcagtggaggttttgatgcttcaacatctcagatagttttgtgccagaataatatccataatcaggcccatatgaacagagtggtcacacacgagcttattcatgcatttgatcattgtcgtgcccatgtcgactggttcaccaacatcagacatttggcgtgctcagaggttcgagctgctaaccttagtggagactgctcacttgtcaatgaaatattcaggttacattttggattaaaacaacaccaccagacttgtgtgcgagacagagccactctttctatcctggctgttaggaatatcagcaaagaagtagctaaaaaggctgttgatgaagtttttgaatcttgtttcaatgaccatgaaccttttggaaggatcccacataacaagacttatgcaagatatgctcacagagactttgaaaaccgtgatcggtattattcaaatatatgagcacaatgacatttttatattacagagcttccatcatcatgaagaaaaaaaaatttggttctcaagtgaacaaacatataaaatgtaaacaatccctacaatccagataaaacagagaagactgtgattctagcatattatcagaaaaagtaactatggcaaaaaatgaaactgctttaaactccaaggcagaaattgtatctttatagctaaccatttagtaaataaatacattacatttttgtatttt

SEQ ID NO: 9384 - protein, 246 aa, Homo sapiens; identical to SEQ ID NO: 1432

SEQ ID NO: 9385 - DNA, 1319 bp, Homo sapiens
gcctctcgccccgcctcccgcgctccccgtcaggttcaaagccccctcccgcctaacgtcttcagcccagccaggctgcccttcttccctgcggagggagggcctgggcggtcgcgttggcgggagggaggttacctttcccagtctcgctctggccgcctgagccaggaggaagcagcggcgaggtctgcgggaggcatggcgggagctccggacgagcgccggcggggccccgcggcaggggagcagctgcagcagcaacacgtctcttgccaggtcttccccgagcgtctggcccaggggaatccccagcaagggttcttctccagcttcttcaccagcaaccagaagtgccagcttaggctcctgaagacgctggagacaaatccatatgtcaaacttctgcttgatgctatgaaacactcaggttgtgctgttaacaaagatagacacttttcttgcgaagactgtaatggaaatgtcagtggaggttttgatgcttcaacatctcagatagttttgtgccagaataatatccataatcaggcccatatgaacagagtggtcacacacgagcttattcatgcatttgatcattgtcgtgcccatgtcgactggttcaccaacatcagacatttggcgtgctcagaggttcgagctgctaaccttagtggagactgctcacttgtcaatgaaatattcaggttacattttggattaaaacaacaccaccagacttgtgtgcgagacagagccactctttctatcctggctgttaggaatatcagcaaagaagtagctaaaaaggctgttgatgaagtttttgaatcttgtttcaatgaccatgaaccttttggaaggatcccacataacaagacttatgcaagatatgctcacagagactttgaaaaccgtgatcggtattattcaaatatatgagcacaatgacatttttatattacagagcttccatcatcatgaagaaaaaaaaatttggttctcaagtgaacaaacatataaaatgtaaacaatccctacaatccagataaaacagagaagactgtgattctagcatattatcagaaaaagtaactatggcaaaaaatgaaactgctttaaactccaaggcagaaattgtatctttatagctaaccatttagtaaataaatacattacatttttgtattttagtcatttgtttttattacatgtgattattttaaaatttgattatgaaacctgtgaagtgtgctcttccatgatgttgataggtgaccactgttggtatttacattaaatgtaaagaaatgtgtactgat

SEQ ID NO: 9386 - protein, 246 aa, Homo sapiens; identical to SEQ ID NO: 1432

SEQ ID NO: 9387 - DNA, 1169 bp, Homo sapiens
ttcagcccagccaggctgcccttcttccctgcggagggagggcctgggcggtcgcgttggcgggagggaggttacctttcccagtctcgctctggccgcctgagccaggaggaagcagcggcgaggtctgcgggaggcatggcgggagctccggacgagcgccggcggggccccgcggcaggggagcagctgcagcagcaacacgtctcttgccaggtcttccccgagcgtctggcccaggggaatccccagcaagggttcttctccagcttcttcaccagcaaccagaagtgccagcttaggctcctgaagacgctggagacaagtaggagccatgacctggaggctgtggttccacagaatggatccatatgtcaaacttctgcttgatgctatgaaacactcaggttgtgctgttaacaaagatagacacttttcttgcgaagactgtaatggaaatgtcagtggaggttttgatgcttcaacatctcagatagttttgtgccagaataatatccataatcaggcccatatgaacagagtggtcacacacgagcttattcatgcatttgatcattgtcgtgcccatgtcgactggttcaccaacatcagacatttggcgtgctcagaggttcgagctgctaaccttagtggagactgctcacttgtcaatgaaatattcaggttacattttggattaaaacaacaccaccagacttgtgtgcgagacagagccactctttctatcctggctgttaggaatatcagcaaagaagtagctaaaaaggctgttgatgaagtttttgaatcttgtttcaatgaccatgaaccttttggaaggatcccacataacaagacttatgcaagatatgctcacagagactttgaaaaccgtgatcggtattattcaaatatatgagcacaatgacatttttatattacagagcttccatcatcatgaagaaaaaaaaatttggttctcaagtgaacaaacatataaaatgtaaacaatccctacaatccagataaaacagagaagactgtgattctagcatattatcagaaaaagtaactatggcaaaaaatgaaactgctttaaactccaaggcagaaattgtatctttatagctaaccatttagtaaataaatacattacatttttgtatttt

SEQ ID NO: 9388 - protein, 194 aa, Homo sapiens
MTWRLWFHRMDPYVKLLLDAMKHSGCAVNKDRHFSCEDCNGNVSGGFDASTSQIVLCQNNIHNQAHMNRVVTHELIHAFDHCRAHVDWFTNIRHLACSEVRAANLSGDCSLVNEIFRLHFGLKQHHQTCVRDRATLSILAVRNISKEVAKKAVDEVFESCFNDHEPFGRIPHNKTYARYAHRDFENRDRYYSNI

SEQ ID NO: 9389 - DNA, 1299 bp, Homo sapiens
ttcagcccagccaggctgcccttcttccctgcggagggagggcctgggcggtcgcgttggcgggagggaggttacctttcccagtctcgctctggccgcctgagccaggaggaagcagcggcgaggtctgcgggaggcatggcgggagctccggacgagcgccggcggggccccgcggcaggggagcagctgcagcagcaacacgtctcttgccaggtcttccccgagcgtctggcccaggggaatccccagcaagggttcttctccagcttcttcaccagcaaccagaagtgccagcttaggctcctgaagacgctggagacaagtaggagccatgacctggaggctgtggttccacagaatggatccatatgtcaaacttctgcttgatgctatgaaacactcaggttgtgctgttaacaaagatagacacttttcttgcgaagactgtaatggaaatgtcagtggaggttttgatgcttcaacatctcagatagttttgtgccagaataatatccataatcaggcccatatgaacagagtggtcacacacgagcttattcatgcatttgatcattgtcgtgcccatgtcgactggttcaccaacatcagacatttggcgtgctcagaggttcgagctgctaaccttagtggagactgctcacttgtcaatgaaatattcaggttacattttggattaaaacaacaccaccagacttgtgtgcgagacagagccactctttctatcctggctgttaggaatatcagcaaagaagtagctaaaaaggctgttgatgaagtttttgaatcttgtttcaatgaccatgaaccttttggaaggatcccacataacaagacttatgcaagatatgctcacagagactttgaaaaccgtgatcggtattattcaaatatatgagcacaatgacatttttatattacagagcttccatcatcatgaagaaaaaaaaatttggttctcaagtgaacaaacatataaaatgtaaacaatccctacaatccagataaaacagagaagactgtgattctagcatattatcagaaaaagtaactatggcaaaaaatgaaactgctttaaactccaaggcagaaattgtatctttatagctaaccatttagtaaataaatacattacatttttgtattttagtcatttgtttttattacatgtgattattttaaaatttgattatgaaacctgtgaagtgtgctcttccatgatgttgataggtgaccactgttggtatttacattaaatgtaaagaaatgtgtactgat

SEQ ID NO: 9390 - protein, 194 aa, Homo sapiens; identical to SEQ ID NO: 9388

SEQ ID NO: 9391 - DNA, 1197 bp, Homo sapiens
gccaggaggaagcagcggcgaggtctgcgggaggcatggcgggagctccggacgagcgccggcggggccccgcggcaggggagcagctgcagcagcaacacgtctcttgccaggtcttccccgagcgtctggcccaggggaatccccagcaagggttcttctccagcttcttcaccagcaaccagaagtgccagcttaggctcctgaagacgctggagacaaatccatatgtcaaacttctgcttgatgctatgaaacactcaggttgtgctgttaacaaagatagacacttttcttgcgaagactgtaatggaaatgtcagtggaggttttgatgcttcaacatctcagagatggggttttgctctgttgcccaggctggtcccgaactcctgggctcaaggaatctgcctgcctcagcctctcaaagtactgggattataggcatgagccactgcacccaacctcattgtatatgctcatgacaacctgggtttttcttcatgacaactgtcattgcatatagttttgtgccagaataatatccataatcaggcccatatgaacagagtggtcacacacgagcttattcatgcatttgatcattgtcgtgcccatgtcgactggttcaccaacatcagacatttggcgtgctcagaggttcgagctgctaaccttagtggagactgctcacttgtcaatgaaatattcaggttacattttggattaaaacaacaccaccagacttgtgtgcgagacagagccactctttctatcctggctgttaggaatatcagcaaagaagtagctaaaaaggctgttgatgaagtttttgaatcttgtttcaatgaccatgaaccttttggaaggatcccacataacaagacttatgcaagatatgctcacagagactttgaaaaccgtgatcggtattattcaaatatatgagcacaatgacatttttatattacagagcttccatcatcatgaagaaaaaaaaatttggttctcaagtgaacaaacatataaaatgtaaacaatccctacaatccagataaaacagagaagactgtgattctagcatattatcagaaaaagtaactatggcaaaaaatgaaactgctttaaactccaaggcagaaattgtatctttatagctaaccatttagtaaataaatacattacatttttgtatttt

SEQ ID NO: 9392 - protein, 135 aa, Homo sapiens
MAGAPDERRRGPAAGEQLQQQHVSCQVFPERLAQGNPQQGFFSSFFTSNQKCQLRLLKTLETNPYVKLLLDAMKHSGCAVNKDRHFSCEDCNGNVSGGFDASTSQRWGFALLPRLVPNSWAQGICLPQPLKVLGL

SEQ ID NO: 9393 - DNA, 1327 bp, Homo sapiens
gccaggaggaagcagcggcgaggtctgcgggaggcatggcgggagctccggacgagcgccggcggggccccgcggcaggggagcagctgcagcagcaacacgtctcttgccaggtcttccccgagcgtctggcccaggggaatccccagcaagggttcttctccagcttcttcaccagcaaccagaagtgccagcttaggctcctgaagacgctggagacaaatccatatgtcaaacttctgcttgatgctatgaaacactcaggttgtgctgttaacaaagatagacacttttcttgcgaagactgtaatggaaatgtcagtggaggttttgatgcttcaacatctcagagatggggttttgctctgttgcccaggctggtcccgaactcctgggctcaaggaatctgcctgcctcagcctctcaaagtactgggattataggcatgagccactgcacccaacctcattgtatatgctcatgacaacctgggtttttcttcatgacaactgtcattgcatatagttttgtgccagaataatatccataatcaggcccatatgaacagagtggtcacacacgagcttattcatgcatttgatcattgtcgtgcccatgtcgactggttcaccaacatcagacatttggcgtgctcagaggttcgagctgctaaccttagtggagactgctcacttgtcaatgaaatattcaggttacattttggattaaaacaacaccaccagacttgtgtgcgagacagagccactctttctatcctggctgttaggaatatcagcaaagaagtagctaaaaaggctgttgatgaagtttttgaatcttgtttcaatgaccatgaaccttttggaaggatcccacataacaagacttatgcaagatatgctcacagagactttgaaaaccgtgatcggtattattcaaatatatgagcacaatgacatttttatattacagagcttccatcatcatgaagaaaaaaaaatttggttctcaagtgaacaaacatataaaatgtaaacaatccctacaatccagataaaacagagaagactgtgattctagcatattatcagaaaaagtaactatggcaaaaaatgaaactgctttaaactccaaggcagaaattgtatctttatagctaaccatttagtaaataaatacattacatttttgtattttagtcatttgtttttattacatgtgattattttaaaatttgattatgaaacctgtgaagtgtgctcttccatgatgttgataggtgaccactgttggtatttacattaaatgtaaagaaatgtgtactgat

SEQ ID NO: 9394 - protein, 135 aa, Homo sapiens; identical to SEQ ID NO: 9392

SEQ ID NO: 9395 - DNA, 760 bp, Homo sapiens
tcagcctcccaaagtgctgggattacaagtgagagccactgctccccacctacttaagggtcttaaggacacttcagacttgaaatgtttttgtgccagaataatatccataatcaggcccatatgaacagagtggtcacacacgagcttattcatgcatttgatcattgtcgtgcccatgtcgactggttcaccaacatcagacatttggcgtgctcagaggttcgagctgctaaccttagtggagactgctcacttgtcaatgaaatattcaggttacattttggattaaaacaacaccaccagacttgtgtgcgagacagagccactctttctatcctggctgttaggaatatcagcaaagaagtagctaaaaaggctgttgatgaagtttttgaatcttgtttcaatgaccatgaaccttttggaaggatcccacataacaagacttatgcaagatatgctcacagagactttgaaaaccgtgatcggtattattcaaatatatgagcacaatgacatttttatattacagagcttccatcatcatgaagaaaaaaaaatttggttctcaagtgaacaaacatataaaatgtaaacaatccctacaatccagataaaacagagaagactgtgattctagcatattatcagaaaaagtaactatggcaaaaaatgaaactgctttaaactccaaggcagaaattgtatctttatagctaaccatttagtaaataaatacattacatttttgtatttt

SEQ ID NO: 9396 - protein, 141 aa, Homo sapiens
MFLCQNNIHNQAHMNRVVTHELIHAFDHCRAHVDWFTNIRHLACSEVRAANLSGDCSLVNEIFRLHFGLKQHHQTCVRDRATLSILAVRNISKEVAKKAVDEVFESCFNDHEPFGRIPHNKTYARYAHRDFENRDRYYSNI

SEQ ID NO: 9397 - DNA, 890 bp, Homo sapiens
tcagcctcccaaagtgctgggattacaagtgagagccactgctccccacctacttaagggtcttaaggacacttcagacttgaaatgtttttgtgccagaataatatccataatcaggcccatatgaacagagtggtcacacacgagcttattcatgcatttgatcattgtcgtgcccatgtcgactggttcaccaacatcagacatttggcgtgctcagaggttcgagctgctaaccttagtggagactgctcacttgtcaatgaaatattcaggttacattttggattaaaacaacaccaccagacttgtgtgcgagacagagccactctttctatcctggctgttaggaatatcagcaaagaagtagctaaaaaggctgttgatgaagtttttgaatcttgtttcaatgaccatgaaccttttggaaggatcccacataacaagacttatgcaagatatgctcacagagactttgaaaaccgtgatcggtattattcaaatatatgagcacaatgacatttttatattacagagcttccatcatcatgaagaaaaaaaaatttggttctcaagtgaacaaacatataaaatgtaaacaatccctacaatccagataaaacagagaagactgtgattctagcatattatcagaaaaagtaactatggcaaaaaatgaaactgctttaaactccaaggcagaaattgtatctttatagctaaccatttagtaaataaatacattacatttttgtattttagtcatttgtttttattacatgtgattattttaaaatttgattatgaaacctgtgaagtgtgctcttccatgatgttgataggtgaccactgttggtatttacattaaatgtaaagaaatgtgtactgat

SEQ ID NO: 9398 - protein, 141 aa, Homo sapiens; identical to SEQ ID NO: 9396

SEQ ID NO: 9399 - DNA, 450 bp, Homo sapiens
gccccgggagcccagggcagggctcaggccgggtagccctgagaagcagggcccattgaatatgtgtgaaatgcagaacactcagtaaatgggctgcagtggaaatcccgcatctgtgataccggaggggtttgtgtatttctggctgctggtagataagaaccagaaatttctgtgtgctgaaaactagagcacagaaagattggtgcttgttatatgagtttgcttggggacttccccagccagttctgtgctcctcaaggcgggaaaccatgcttgccaatcttttggactcatttttaatcggcttggaaatttaatcagaataatgccaggtatggaaaccaccgcctgggattaaagcatcagtgaagatgctgcttaggaggaattcagattttagagaagaaaggaggtcatgagagctcattactggatcactgaactggt

SEQ ID NO: 9400 - protein, 33 aa, Homo sapiens
MGCSGNPASVIPEGFVYFWLLVDKNQKFLCAEN

SEQ ID NO: 9401 - DNA, 429 bp, Homo sapiens
ttcctggaaggggagaggtactgaggttgagtctatccccaatggccaatgatgtcatcaatcatgcctaaataatgaagcctccataaaaactcaaaaggatgggatttggagaacttctggaatgctgagcatgtggaggtgcctggagagggcatggaagctccacatgcctgcccacatactttgcactgtgcatcccttccatctggctgttcatctgtatcctttcattgtgagaacaagctcattcttgtacctttcctccgtggatttggtgatcacaacaagggacttatccatcattggagtggccacaatctgaacaagttccacccactgcctgagagtcctgccctgaattttagactttgatcataaaaaaatggataatataatttaacagtgaataaattagatatcaatgaa

SEQ ID NO: 9402 - protein, 72 aa, Homo sapiens
MEAPHACPHTLHCASLPSGCSSVSFHCENKLILVPFLRGFGDHNKGLIHHWSGHNLNKFHPLPESPALNFRL

SEQ ID NO: 9403 - DNA, 2188 bp, Homo sapiens
actccgtgacttcctggaaggggagaggtactgaggttgagtctatccccaatggccaatgatgtcatcaatcatgcctaaataatgaagcctccataaaaactcaaaaggatgggatttggagaacttctggaatgctgagcatgtggaggtgcctggagagggcatggaagctccacatgcctgcccacatactttgcactgtgcatcccttccatctggctgttcatctgtatcctttgtaatatcctttataataaataggtattatggtttggatgtatgtgtccctccaaaattcatatgctggaacttaaactctaacgtaatagtgttaaaaggtgggatctttggtgaagtgattaagtcaagagggttgtacccttatgaatgggattaatgcccttataaaagaaaatgaagggagtgcccagccctttcagccccttctaccatgtgaggatgcagcaagaaaatgccatgttggaaggagagagtagccctcaccagacactgaatctgctggtgccttgatcttgaacttcccagtctctagaactgtaaaaaaaaaagtgtttattatttataaattacccaatctaaggtatcttttatagcagccctaacagactgagacaataagtaaatataagtgtttttccccgagttctgtgagtcactctagttaactaatcgaatccagggaaagggcagtgagaacccccaatttatataaagccagttggtcagaaatacaggtcacaacctgggacttgtgcttggcatctgaagtgtggggcagtcttgtggggctaagctgttggatctgatgctaactctggatagacagtgtcagagttgaattatagaacatccagctggtgtccactggaaaactgattctggctggtggggagaaatccctacatattttggtgaccagaggggaagtattctgcaatgacgatgatagaaggaaaagcagtttggttttttttccttgggacatatcacataatggtaagggctcatgatctggagcagactacctgagttcaaatcccagcttcaccactaaccagttatgtaatttgttgagcacttattatctgccaggcactgtgctaagtgccttgcatgtattaatattatctcatgagtaaagagacacagagaggttgagtatcttatcctagatctcacagaagagcagggatcttaacacaggcatctgatttcagagcccacattcttaaccatgcactctagcctggttgacagagcgagattctgtctctcaaaataaataaatatataaatgtttatcttatccaaaaacagcctcacagaaacacccagaataatgtttgaccaggtatctgggcactgtggcccagcgaagttggcacataaaattaactatcacagcttccatccatcaaaataggtaaaaagactcagagaaggtggtaatggggagacagggaaatgtttggacatggagtagcccagcaggaccagcctgagaggcccctattacatggtgatggccagggacccactaaacacaccaacacccagtgaaagcaacaacaataggggtgggggtagaatagcagactcatttggcccacacactctctcaggcccttcttactaaacctcctatctgtagggatagtgtgaaaggatttggcagggtcctgtatgagaaacctcacaaagtttggattgtcttttacaaccatgagctgaaggcccatttggtcagggactcttcagtttgggatgtgacactcttggattagggggatctgaagatcttctgtaaagcactacttggtttccatcaagctgtggagggagtgctcttggacactaaaaaaaaaaaaaacaccttctcacttcctcatttgggactgtcaagccaagaatgcaaggagaggtatacagaaaacacctcatttggagttatttactttaactgctcagcattgtgagaacaagctcattcttgtacctttcctccgtggatttggtgatcacaacaagggacttatccatcattggagtggccacaatctgaacaagttccacccactgcctgagagtcctgccctgaattttagactttgatcataaaaaaatggataatataatttaacagtgaataaattagatatcaatg

SEQ ID NO: 9404 - protein, 77 aa, Homo sapiens
MEAPHACPHTLHCASLPSGCSSVSFVISFIINRYYGLDVCVPPKFICWNLNSNVIVLKGGIFGEVIKSRGLYPYEWD

SEQ ID NO: 9405 - DNA, 591 bp, Homo sapiens
tcagcaattacttgatgatgcacgtgtcaagagtcattctacatgctggagataccgtggtacagaagacagaggaggtccttgccctagtggagtcagcaagctaaaaagaaaacagaaaaactagtggcaagtacaatgaagaaaaccagatcaaagttttgggatggagtggtggaggtgttgaatgagagtccctacactaaatccgccagccagacaaagccgcctgatggagcgttggctgtgaggagacagagcatcccaggggatgactttcacaatagcatccatttctttactgagccatagctggcagaaataagggattcacaattgccgcaacagatcatgtatgctgaatgcaaaattattcttttcttctcatctctttgaacctgagtttgcttccattggacagctcttataaaatttgtgattttgtttccttaggaaagtgtgagtcatattattgtaatacaatgagtcatatatatgtctttccaacaaaacattttgaagaaatatctttaaatgtctttaccccaaaacgtcaatattttgaagctttgatttgtgaatgacacaaaa

SEQ ID NO: 9406 - protein, 57 aa, Homo sapiens
MKKTRSKFWDGVVEVLNESPYTKSASQTKPPDGALAVRRQSIPGDDFHNSIHFFTEP

SEQ ID NO: 9407 - DNA, 2349 bp, Homo sapiens
agaacgcagaccagcccaagctgacagcttgatatgccttcttctgctgcctggttttgggggctgtatgacgtactggtcggtagtaaagattaatatgtaagaaatgtggagctaggatcaagtcatactccacagcctgcctggcaaactatgttttacttctgactttgctctctcgctgagaacattaatctgtcaagctggcgggctcctttgatagcaactttcccaggggcatgatgtggcaatgccacctctcagcccaggactaccgctattaccccgtggacggctactccctgcttaaacgcttccctcttcatcctcttacaggacccagatgccctgtccaaacagtgggacaatggttggaaagcattgggctacctcagtacgagaaccacctgatggctaatggatttgacaatgtgcagtttatgggaagcaatgttatggaagatcaggatttgttggaaattggaatccttaattctgggcacagacaaagaattctacaggcaatccagctccttccaaagatgagacccattgggcatgatggctaccatcccacctctgtagctgagtggctggattccattgaactgggcgactacaccaaagcctttctaattaatggctacacttcgatggacctgttgaaaaaaatctgggaggttgaacttattaatgttttaaaaatcaatttgattggccacaggaaacgtattttggcatctctgggagacaggctgcacgacgatcccccacagaagccccctcggtccatcaccctcaggacaggagactggggagaaccttccattaccttgcgacctccgaatgaagccacagcctctaccccggtacagtactggcagcatcacccagaaaagcttatcttccagtcgtgtgattacaaagctttttatttaggttctatgctgataaaagagcttagggggacagaatcaacccaagatgcttgtgcaaaaatgcgggctaactgtcagaagtctacagagcaaatgaagaaggtccctactattattctttctgtctcatataaaggagtcaaatttattgatgcaacaaataagaacataattgctgagcatgaaattcgtaatatctcctgtgctgcccaggacccagaagacctctcaacatttgcctatatcacaaaagatttgaagtctaatcaccactactgtcatgtgtttactgcctttgatgtgaatttagcctatgaaatcatcctaaccctgggacaggcattcgaagtcgcttaccagctagcactacaagcaagaaaagggggacactcctccacacttccagaaagctttgaaaacaaaccctccaaacccatccccaagccccgcgttagcattcgcaagtccgtggatcttcttcatgccagccataccgggcaggaaccatcagagagacacactgaggaggcactcagaaaattttgatagaattgaatttacatatagctgataaagcctaaatagaaaggttgatgtatttagcttgaatccttcactttagtggtctaatcaacagataaatgacaagcaaagaatgaaacaatccaaaaatgtttttcaaaacaattttgtgaattttatttttacaaaaattttttaaattcatattttaaaatgtataccaaggcaaaaaaatcatataagctatatcataaatacaagagtttcaaaacatacaagagacatataatgtaaaaaaaaattatatatatgaagtccaatgtaatttataatacaaaaaaatacagcaagggaaaatgctttagaaatgctcatctgcaaactacaaaacaaaatcctcctcttgaccgactgcatgaactgccatgaaatttgcagctccatcatactaggtatctcttctttcttcatgttaccttgtctttcttcccatttttcttttaagacagggtcttgctatgtcacccaggctggactcaaactccagggctcaaggaatcctcctgtcttagcctcccaaggagctgggattacaggcacgtgccaccgcacctggctcctaatttctttttaagacaagggccattcaaggctttttaaaacctgatgtgtgttgttatactttataacagtcagtggcttttaattccaaaaggtaatactttatactctgcctacatgagatgagcccctaacagtgtgtacaaataaaattatgatttgggtattctaaggagacataccatttacagaaatttcttttgataaaattaaggtttcacttttcacatttgcttaaatcacagtaagcctgtaaactagctccttg

SEQ ID NO: 9408 - protein, 414 aa, Homo sapiens; identical to SEQ ID NO: 1443

SEQ ID NO: 9409 - DNA, 5029 bp, Homo sapiens
ctgcgctcccgctccagctaggactctctctgccgcctcctcctcctcctccgacctcagtcctcaccaccctcctcccgctcctcaaaagcacccccgagtccccaccccctcacgccgcacccgcgggaacgaggccttgggaattcaggggagtggctgtgggggcgcgtcgcggctcccagctcggccagcccctctttcaagacatggtctgatccccattgtaaaagctgcgccccgaagaggaggagagagtcgtgctccctgcctggggctgcagggagctctccgtgctgaagctcttgcattattttagggtggggcgaagagggccctggattttggggagtgggggtgggtggggaggaggacccgaggggggcaaggactctgtgggggagtcggtgagagactatggggaaggaccaggagctgctggaagctgctcgcactggaaatgtggctctggtggagaaactcctgtctggcaggaaaggagggatcctgggcggtggatccggacccctgcccctgtctaatctgctaagcatctggcgaggccccaatgtgaactgcacagacagttcgggttacactgctttacaccacgcagccttaaatggacataaggacatagttctcaaactacttcagtatgaggcatcaacaaatgtagcagacaacaaagggtattttcctattcacctggctgcctggaaaggagatgtggaaattgtgaagattcttattcatcatggaccatcacattccagggtcaatgaacagaacaatgaaaatgaaactgccctacactgtgcagctcaatatggacactcagaagtagttgctgttctcctagaagagctcactgacccgacaattagaaatagcaagctggaaacacctttggacttggcggcactctacggacggcttagagtggtaaaaatgatcatcagtgcacatcctaacttaatgagctgcaacactcgcaagcacacgccacttcaccttgctgcgcgcaatggccacaaagcagtcgtgcaggtgctgctggaggcaggaatggatgtgagctgtcaaacagaaaaggggagtgcacttcatgaagcagctttgtttggaaaggtggatgttgtacgagttctgttagaaacaggaattgatgccaacataaaggatagcttaggtagaactgtcttggacattctgaaagaacatccatctcagaaatctctccagattgcaacactcttacaagagtatttagaaggcgtgggaagatctacagtcctcgaagagcctgtacaggaagatgcaacacaagaaacacacatttcatctcctgttgagtctccttcccaaaagaccaaaagtgaaaccgtcactggagaattatcaaaactcttggatgaaataaaactctgtcaagaaaaggattattcgtttgaagacttgtgccacacaatatcagaccactacttagataatttgagcaagatttcagaggaagaacttgggaaaaatggaagccagagtgtaagaacctcatctacaatcaatttgtcaccaggagaagtggaagaagaggatgatgatgaaaatacgtgtgggccatcaggactttgggaagcattaactccgtgtaatggatgtaggaaccttggcttccccatgcttgcccaggagtcctatccaaagaagagaaattacactatggaaattgtaccatctgcttctctggatacatttccttcagaaaatgagaactttctgtgtgatctcatggacacagctgttacaaagaaaccttgctccttagaaattgcaagggcaccttccccaagaactgataatgcctctgaggtagcagttactactccaggaactagtaaccatagaaacagctcaacaggcccaacacctgattgttcacctccatcccctgatactgccctcaaaaatattgtaaaagtcattcgaccccagcctaaacagcgaacatccattgtgtcttctctggattttcaccgaatgaatcacaaccaagaatattttgaaatcaacacatctacagggtgcacaagctttactgccagtcctcctgctagtccacccacctcttctgtgggaaccacagaagtcaagaatgagggaactaaccatacagatgacctctcccgacaggatgacaatgatcccccaaaagaatatgatcctgggcaatttgcaggcctgctccatggatcctctccagcctgtgagtcccctgaaaatccatttcatctctatgggaaaagagaacaatgtgaaaaaggacaagatgaagtcagtttggcaaacagtcctttgcctttcaagcagtctccaatagaaaataactcagaacctttggtaaagaaaattaaacccaaagtggtcagtagaacaatttttcacaaaaaaagcaaccaactcgaaaaccataccattgttggcacaagatcaaccaggagtggatctcggaatggggaccagtgggttatgaacgcagggggatttgtggagagagcctgtactctggggagaataaggtcattgcctaaagccttgatcgacatgcatttgtcaaaaagtgtctctaaatctgattctgatctcattgcctatccttccaatgagaaaacatcaagagttaactggagtgaatcttccactgctgaacacagttctaaagggaattctgaaagaacaccatccttcacatcggaatgggaagaaattgacaaaataatgagttccatagatgttggaatcaacaacgaacttaaagagatgaatggtgagaccacaagacccagatgccctgtccaaacagtgggacaatggttggaaagcattgggctacctcagtacgagaaccacctgatggctaatggatttgacaatgtgcagtttatgggaagcaatgttatggaagatcaggatttgttggaaattggaatccttaattctgggcacagacaaagaattctacaggcaatccagctccttccaaagatgagacccattgggcatgatggctaccatcccacctctgtagctgagtggctggattccattgaactgggcgactacaccaaagcctttctaattaatggctacacttcgatggacctgttgaaaaaaatctgggaggttgaacttattaatgttttaaaaatcaatttgattggccacaggaaacgtattttggcatctctgggagacaggctgcacgacgatcccccacagaagccccctcggtccatcaccctcagggaacccagtggtaatcacactcctcctcagttgtctccatcacttagccaaagcacttacaccactggtggctccctagacgttcctcacattatcatgcagggcgatgcaaggaggagaagaaatgaaaactactttgatgatattccccgatcaaaactggagaggcagatggctcagacaggagactggggagaaccttccattaccttgcgacctccgaatgaagccacagcctctaccccggtacagtactggcagcatcacccagaaaagcttatcttccagtcgtgtgattacaaagctttttatttaggttctatgctgataaaagagcttagggggacagaatcaacccaagatgcttgtgcaaaaatgcgggctaactgtcagaagtctacagagcaaatgaagaaggtccctactattattctttctgtctcatataaaggagtcaaatttattgatgcaacaaataagaacataattgctgagcatgaaattcgtaatatctcctgtgctgcccaggacccagaagacctctcaacatttgcctatatcacaaaagatttgaagtctaatcaccactactgtcatgtgtttactgcctttgatgtgaatttagcctatgaaatcatcctaaccctgggacaggcattcgaagtcgcttaccagctagcactacaagcaagaaaagggggacactcctccacacttccagaaagctttgaaaacaaaccctccaaacccatccccaagccccgcgttagcattcgcaagtccgtggatcttcttcatgccagccataccgggcaggaaccatcagagagacacactgaggaggcactcagaaaattttgatagaattgaatttacatatagctgataaagcctaaatagaaaggttgatgtatttagcttgaatccttcactttagtggtctaatcaacagataaatgacaagcaaagaatgaaacaatccaaaaatgtttttcaaaacaattttgtgaattttatttttacaaaaattttttaaattcatattttaaaatgtataccaaggcaaaaaaatcatataagctatatcataaatacaagagtttcaaaacatacaagagacatataatgtaaaaaaaaattatatatatgaagtccaatgtaatttataatacaaaaaaatacagcaagggaaaatgctttagaaatgctcatctgcaaactacaaaacaaaatcctcctcttgaccgactgcatgaactgccatgaaatttgcagctccatcatactaggtatctcttctttcttcatgttaccttgtctttcttcccatttttcttttaagacagggtcttgctatgtcacccaggctggactcaaactccagggctcaaggaatcctcctgtcttagcctcccaaggagctgggattacaggcacgtgccaccgcacctggctcctaatttctttttaagacaagggccattcaaggctttttaaaacctgatgtgtgttgttatactttataacagtcagtggcttttaattccaaaaggtaatactttatactctgcctacatgagatgagcccctaacagtgtgtacaaataaaattatgatttgggtattctaaggagacataccatttacagaaatttcttttgataaaattaaggtttcacttttcacatttgcttaaatcacagtaagcctgtaaactagctccttg

SEQ ID NO: 9410 - protein, 1248 aa, Homo sapiens; identical to SEQ ID NO: 1445

SEQ ID NO: 9411 - DNA, 4035 bp, Homo sapiens
ctgcgctcccgctccagctaggactctctctgccgcctcctcctcctcctccgacctcagtcctcaccaccctcctcccgctcctcaaaagcacccccgagtccccaccccctcacgccgcacccgcgggaacgaggccttgggaattcaggggagtggctgtgggggcgcgtcgcggctcccagctcggccagcccctctttcaagacatggtctgatccccattgtaaaagctgcgccccgaagaggaggagagagtcgtgctccctgcctggggctgcagggagctctccgtgctgaagctcttgcattattttagggtggggcgaagagggccctggattttggggagtgggggtgggtggggaggaggacccgaggggggcaaggactctgtgggggagtcggtgagagactatggggaaggaccaggagctgctggaagctgctcgcactggaaatgtggctctggtggagaaactcctgtctggcaggaaaggagggatcctgggcggtggatccggacccctgcccctgtctaatctgctaagagaacctcatctacaatcaatttgtcaccaggagaagtggaagaagaggatgatgatgaaaatacgtgtgggccatcaggactttgggaagcattaactccgtgtaatggatgtaggaaccttggcttccccatgcttgcccaggagtcctatccaaagaagagaaattacactatggaaattgtaccatctgcttctctggatacatttccttcagaaaatgagaactttctgtgtgatctcatggacacagctgttacaaagaaaccttgctccttagaaattgcaagggcaccttccccaagaactgataatgcctctgaggtagcagttactactccaggaactagtaaccatagaaacagctcaacaggcccaacacctgattgttcacctccatcccctgatactgccctcaaaaatattgtaaaagtcattcgaccccagcctaaacagcgaacatccattgtgtcttctctggattttcaccgaatgaatcacaaccaagaatattttgaaatcaacacatctacagggtgcacaagctttactgccagtcctcctgctagtccacccacctcttctgtgggaaccacagaagtcaagaatgagggaactaaccatacagatgacctctcccgacaggatgacaatgatcccccaaaagaatatgatcctgggcaatttgcaggcctgctccatggatcctctccagcctgtgagtcccctgaaaatccatttcatctctatgggaaaagagaacaatgtgaaaaaggacaagatgaagtcagtttggcaaacagtcctttgcctttcaagcagtctccaatagaaaataactcagaacctttggtaaagaaaattaaacccaaagtggtcagtagaacaatttttcacaaaaaaagcaaccaactcgaaaaccataccattgttggcacaagatcaaccaggagtggatctcggaatggggaccagtgggttatgaacgcagggggatttgtggagagagcctgtactctggggagaataaggtcattgcctaaagccttgatcgacatgcatttgtcaaaaagtgtctctaaatctgattctgatctcattgcctatccttccaatgagaaaacatcaagagttaactggagtgaatcttccactgctgaacacagttctaaagggaattctgaaagaacaccatccttcacatcggaatgggaagaaattgacaaaataatgagttccatagatgttggaatcaacaacgaacttaaagagatgaatggtgagaccacaagacccagatgccctgtccaaacagtgggacaatggttggaaagcattgggctacctcagtacgagaaccacctgatggctaatggatttgacaatgtgcagtttatgggaagcaatgttatggaagatcaggatttgttggaaattggaatccttaattctgggcacagacaaagaattctacaggcaatccagctccttccaaagatgagacccattgggcatgatggctaccatcccacctctgtagctgagtggctggattccattgaactgggcgactacaccaaagcctttctaattaatggctacacttcgatggacctgttgaaaaaaatctgggaggttgaacttattaatgttttaaaaatcaatttgattggccacaggaaacgtattttggcatctctgggagacaggctgcacgacgatcccccacagaagccccctcggtccatcaccctcagggaacccagtggtaatcacactcctcctcagttgtctccatcacttagccaaagcacttacaccactggtggctccctagacgttcctcacattatcatgcagggcgatgcaaggaggagaagaaatgaaaactactttgatgatattccccgatcaaaactggagaggcagatggctcagacaggagactggggagaaccttccattaccttgcgacctccgaatgaagccacagcctctaccccggtacagtactggcagcatcacccagaaaagcttatcttccagtcgtgtgattacaaagctttttatttaggttctatgctgataaaagagcttagggggacagaatcaacccaagatgcttgtgcaaaaatgcgggctaactgtcagaagtctacagagcaaatgaagaaggtccctactattattctttctgtctcatataaaggagtcaaatttattgatgcaacaaataagaacataattgctgagcatgaaattcgtaatatctcctgtgctgcccaggacccagaagacctctcaacatttgcctatatcacaaaagatttgaagtctaatcaccactactgtcatgtgtttactgcctttgatgtgaatttagcctatgaaatcatcctaaccctgggacaggcattcgaagtcgcttaccagctagcactacaagcaagaaaagggggacactcctccacacttccagaaagctttgaaaacaaaccctccaaacccatccccaagccccgcgttagcattcgcaagtccgtggatcttcttcatgccagccataccgggcaggaaccatcagagagacacactgaggaggcactcagaaaattttgatagaattgaatttacatatagctgataaagcctaaatagaaaggttgatgtatttagcttgaatccttcactttagtggtctaatcaacagataaatgacaagcaaagaatgaaacaatccaaaaatgtttttcaaaacaattttgtgaattttatttttacaaaaattttttaaattcatattttaaaatgtataccaaggcaaaaaaatcatataagctatatcataaatacaagagtttcaaaacatacaagagacatataatgtaaaaaaaaattatatatatgaagtccaatgtaatttataatacaaaaaaatacagcaagggaaaatgctttagaaatgctcatctgcaaactacaaaacaaaatcctcctcttgaccgactgcatgaactgccatgaaatttgcagctccatcatactaggtatctcttctttcttcatgttaccttgtctttcttcccatttttcttttaagacagggtcttgctatgtcacccaggctggactcaaactccagggctcaaggaatcctcctgtcttagcctcccaaggagctgggattacaggcacgtgccaccgcacctggctcctaatttctttttaagacaagggccattcaaggctttttaaaacctgatgtgtgttgttatactttataacagtcagtggcttttaattccaaaaggtaatactttatactctgcctacatgagatgagcccctaacagtgtgtacaaataaaattatgatttgggtattctaaggagacataccatttacagaaatttcttttgataaaattaaggtttcacttttcacatttgcttaaatcacagtaagcctgtaaactagctccttg

SEQ ID NO: 9412 - protein, 828 aa, Homo sapiens
MLAQESYPKKRNYTMEIVPSASLDTFPSENENFLCDLMDTAVTKKPCSLEIARAPSPRTDNASEVAVTTPGTSNHRNSSTGPTPDCSPPSPDTALKNIVKVIRPQPKQRTSIVSSLDFHRMNHNQEYFEINTSTGCTSFTASPPASPPTSSVGTTEVKNEGTNHTDDLSRQDDNDPPKEYDPGQFAGLLHGSSPACESPENPFHLYGKREQCEKGQDEVSLANSPLPFKQSPIENNSEPLVKKIKPKVVSRTIFHKKSNQLENHTIVGTRSTRSGSRNGDQWVMNAGGFVERACTLGRIRSLPKALIDMHLSKSVSKSDSDLIAYPSNEKTSRVNWSESSTAEHSSKGNSERTPSFTSEWEEIDKIMSSIDVGINNELKEMNGETTRPRCPVQTVGQWLESIGLPQYENHLMANGFDNVQFMGSNVMEDQDLLEIGILNSGHRQRILQAIQLLPKMRPIGHDGYHPTSVAEWLDSIELGDYTKAFLINGYTSMDLLKKIWEVELINVLKINLIGHRKRILASLGDRLHDDPPQKPPRSITLREPSGNHTPPQLSPSLSQSTYTTGGSLDVPHIIMQGDARRRRNENYFDDIPRSKLERQMAQTGDWGEPSITLRPPNEATASTPVQYWQHHPEKLIFQSCDYKAFYLGSMLIKELRGTESTQDACAKMRANCQKSTEQMKKVPTIILSVSYKGVKFIDATNKNIIAEHEIRNISCAAQDPEDLSTFAYITKDLKSNHHYCHVFTAFDVNLAYEIILTLGQAFEVAYQLALQARKGGHSSTLPESFENKPSKPIPKPRVSIRKSVDLLHASHTGQEPSERHTEEALRKF

SEQ ID NO: 9413 - DNA, 4298 bp, Homo sapiens
ctgcgctcccgctccagctaggactctctctgccgcctcctcctcctcctccgacctcagtcctcaccaccctcctcccgctcctcaaaagcacccccgagtccccaccccctcacgccgcacccgcgggaacgaggccttgggaattcaggggagtggctgtgggggcgcgtcgcggctcccagctcggccagcccctctttcaagacatggtctgatccccattgtaaaagctgcgccccgaagaggaggagagagtcgtgctccctgcctggggctgcagggagctctccgtgctgaagctcttgcattattttagggtggggcgaagagggccctggattttggggagtgggggtgggtggggaggaggacccgaggggggcaaggactctgtgggggagtcggtgagagactatggggaaggaccaggagctgctggaagctgctcgcactggaaatgtggctctggtggagaaactcctgtctggcaggaaaggagggatcctgggcggtggatccggacccctgcccctgtctaatctgctaagcatctggcgaggccccaatgtgaactgcacagacagttcgggttacactgctttacaccacgcagccttaaatggacataaggacatagttctcaaactacttcagtatgaggcatcaacaaatgtagcagacaacaaagggtattttcctattcacctggctgcctggaaaggagatgtggaaattgtgaagattcttattcatcatggaccatcacattccagggtcaatgaacagaacaatgaaaatgaaactgccctacactgtgcagctcaatatggacactcagaagtagttgctgttctcctagaagagctcactgacccgacaattagaaatagcaagctggaaacacctttggacttggcggcactctacggacggcttagagtggtaaaaatgatcatcagtgcacatcctaacttaatgagctgcaacactcgcaagcacacgccacttcaccttgctgcgcgcaatggccacaaagcagtcgtgcaggtgctgctggaggcaggaatggatgtgagctgtcaaacagaaaaggggagtgcacttcatgaagcagctttgtttggaaaggtggatgttgtacgagttctgttagaaacaggaattgatgccaacataaaggatagcttaggtagaactgtcttggacattctgaaagaacatccatctcagaaatctctccagattgcaacactcttacaagagtatttagaaggcgtgggaagatctacagtcctcgaagagcctgtacaggaagatgcaacacaagaaacacacatttcatctcctgttgagtctccttcccaaaagaccaaaagtgaaaccgtcactggagaattatcaaaactcttggatgaaataaaactctgtcaagaaaaggattattcgtttgaagacttgtgccacacaatatcagaccactacttagataatttgagcaagatttcagaggaagaacttgggaaaaatggaagccagagtgtaagaacctcatctacaatcaatttgtcaccaggagaagtggaagaagaggatgatgatgaaaatacgtgtgggccatcaggactttgggaagcattaactccgtgtaatggatgtaggaaccttggcttccccatgcttgcccaggagtcctatccaaagaagagaaattacactatggaaattgtaccatctgcttctctggatacatttccttcagaaaatgagaactttctgtgtgatctcatggacacagctgttacaaagaaaccttgctccttagaaattgcaagggcaccttccccaagaactgataatgcctctgaggtagcagttactactccaggaactagtaaccatagaaacagctcaacaggcccaacacctgattgttcacctccatcccctgatactgccctcaaaaatattgtaaaagtcattcgaccccagcctaaacagcgaacatccattgtgtcttctctggattttcaccgaatgaatcacaaccaagaatattttgaaatcaacacatctacagggtgcacaagctttactgccagtcctcctgctagtccacccacctcttctgtgggaaccacagaagtcaagaatgagggaactaaccatacagatgacctctcccgacaggatgacaatgatcccccaaaagaatatgatcctgggcaatttgcaggcctgctccatggatcctctccagcctgtgagtcccctgaaaatccatttcatctctatgggaaaagagaacaatgtgaaaaaggacaagatgaagtcagtttggcaaacagtcctttgcctttcaagcagtctccaatagaaaataactcagaacctttggtaaagaaaattaaacccaaagtggtcagtagaacaatttttcacaaaaaaagcaaccaactcgaaaaccataccattgttggcacaagatcaaccaggagtggatctcggaatggggaccagtgggttatgaacgcagggggatttgtggagagagcctgtactctggggagaataaggtcattgcctaaagccttgatcgacatgcatttgtcaaaaagtgtctctaaatctgattctgatctcattgcctatccttccaatgagaaaacatcaagagttaactggagtgaatcttccactgctgaacacagttctaaagggaattctgaaagaacaccatccttcacatcggaatgggaagaaattgacaaaataatgagttccatagatgttggaatcaacaacgaacttaaagagatgaatggtgagaccacaagacccagatgccctgtccaaacagtgggacaatggttggaaagcattgggctacctcagtacgagaaccacctgatggctaatggatttgacaatgtgcagtttatgggaagcaatgttatggaagatcaggatttgttggaaattggaatccttaattctgggcacagacaaagaattctacaggcaatccagctccttccaaagatgagacccattgggcatgatggctaccatcccacctctgtagctgagtggctggattccattgaactgggcgactacaccaaagcctttctaattaatggctacacttcgatggacctgttgaaaaaaatctgggaggttgaacttattaatgttttaaaaatcaatttgattggccacaggaaacgtattttggcatctctgggagacaggctgcacgacgatcccccacagaagccccctcggtccatcaccctcagggaacccagtggtaatcacactcctcctcagttgtctccatcacttagccaaagcacttacaccactggtggctccctagacgttcctcacattatcatgcagggcgatgcaaggaggagaagaaatgaaaactactttgatgatattccccgatcaaaactggagaggcagatggctcagacaggagactggggagaaccttccattaccttgcgacctccgaatgaagccacagcctctaccccggtacagtactggcagcatcacccagaaaagcttatcttccagtcgtgtgattacaaagctttttatttaggttctatgctgataaaagagcttagggggacagaatcaacccaagatgcttgtgcaaaaatgcgggctaactgtcagaagtctacagagcaaatgaagaaggtccctactattattctttctgtctcatataaaggagtcaaatttattgatgcaacaaataagaacataattgctgagcatgaaattcgtaatatctcctgtgctgcccaggacccagaagacctctcaacatttgcctatatcacaaaagatttgaagtctaatcaccactactgtcatgtgtttactgcctttgatgtgaatttagcctatgaaatcatcctaaccctgggacaggcattcgaagtcgcttaccagctagcactacaagcaagaaaagggggacactcctccacacttccagaaagctttgaaaacaaaccctccaaacccatccccaagccccgcgttagcattcgcaagtccgtggatcttcttcatgccagccataccgggcaggaaccatcagagagacacactgaggaggcactcagaaaattttgatagaattgaatttacatatagctgataaagcctaaatagaaaggttgatgtatttagcttgaatccttcactttagtggtctaatcaacagataaatgacaagcaaagaatgaaacaatccaaaaatgtttttc

SEQ ID NO: 9414 - protein, 1248 aa, Homo sapiens; identical to SEQ ID NO: 1445

SEQ ID NO: 9415 - DNA, 3034 bp, Homo sapiens
ggggggcgcgcgcgcgggcccggggagctcgcggggagagcccggcgctcggcgcagcgcggcgcggccaagctccgcgcctctcccgcccttcctcggcgcgctcgccctcgcctcgccgctcgcattcgctgggggcgcccagaaagatgcacagaggcaacggctaggggagcggaggttcaagccacatgtctgcgtcctcgggggccagagcccgccagccctcgcggatcccggctcgcggccagcccgagcggctcgggttttaaaaatcaatttgattggccacaggaaacgtattttggcatctctgggagacaggctgcacgacgatcccccacagaagccccctcggtccatcaccctcagggaacccagtggtaatcacactcctcctcagttgtctccatcacttagccaaagcacttacaccactggtggctccctagacgttcctcacattatcatgcagggcgatgcaaggaggagaagaaatgaaaactactttgatgatattccccgatcaaaactggagaggcagatggctcagacaggagactggggagaaccttccattaccttgcgacctccgaatgaagccacagcctctaccccggtacagtactggcagcatcacccagaaaagcttatcttccagtcgtgtgattacaaagctttttatttaggttctatgctgataaaagagcttagggggacagaatcaacccaagatgcttgtgcaaaaatgcggtttaatttcagaagtctacagagcaaatgaagaaggtccctactattattctttctgtctcatataaaggagtcaaatttattgatgcaacaaataagaacataattgctgagcatgaaattcgtaatatctcctgtgctgcccaggacccagaagacctctcaacatttgcctatatcacaaaagatttgaagtctaatcaccactactgtcatgtgtttactgcctttgatgtgaatttagcctatgaaatcatcctaaccctgggacaggcattcgaagtcgcttaccagctagcactacaagcaagaaaagggggacactcctccacacttccagaaagctttgaaaacaaaccctccaaacccatccccaagccccgcgttagcattcgcaagtccgtgcagatcgacccatctgagcaaaagactctggccaatctaccgtggattgtggagccgggccaagaagccaagaggggcattaataccaagtatgaaaccacgattttctgatactcgccgtcctcctgtcctcgcggtgccttgctcgccaagcggtcccggagcaggctttccttcgcgcctccgcgtccacccagcccaggaggaagactgctctgagcgtgcggccttgttacgggcgaaaggccactggccattcctggggaagttctttctgcaccagtgatggaaaacgcaagactttccagtcgcaacccctgagaggcgtgagttgagatgggttttccctgatgctcccgactcccctccccaccacctcccaaggtatttctgatgactccgccccagtacttgctttgcttcatttggggaaaataataccttttctttaaaaaaaaaaaaaaaaaaaaaaaagtaaaggggatctctaatactgcctaaaagtatgctttcactgtcagcagttttaaaggtgaaatcagagcagcactacccctcccacctccaaagcatctgtaaaatcattctatcattgagtatcgtttaatgcaaaaggacaaaaacaactcccgtgatatgattgccaggagattctgtttccccatttctatatttgtggattttatatgtaatcacctatgtcagagaaagaaaacctttcaaccaaatgattggttcaaaaggaaagaatgattcaaagcagaggaatttattatgcacagcaaaatgtgtcttgtattaaatatttttattaaaagaatgtttcattaatgcattgataagaaaactaggttagttgcgagggatgtttctggtttcatttcaaataattaaatttctactgctactaccaagaggactggctcagtggtggcaaaatactggtgatgctccctagagcaggaggcccggaagtgctgacgcagccatcagcctgccaagattgttttttaatcttcacagtgttttaaagaacatgttaaaaaaaaaaaaatctagtgctcctgctgtcaagatttctgtcatggaaaccttgtttgagaaaggtgttaataaaattctattgcaaaaatttctttttctagaaaaaataaatacaaaaaaaaaaaagaagaaattccaaagtaataaaacttttcttgagacaaacaaaaaaaaagtttgcttactatttgattaaataaaatttacttacatttctttaaggtattttaattttttaatgtctctgtggagtatttgtatgataccataatgtatatttatgtagaatcaaattatataaacagtaccaatatcattatagaaaaaaataacattttaatgtatattgttctaacaatcatattgtgaatcattttgaagttcattatagcgatattgataaattgtggaattgtcttaatgtttttttattaactgacattattttaaacctaactgagatgatcagttacattcatcagttggtgagttttgaagaataactacattttatttcaaactaacaaatgtatacggttttagttcagtgttgaagaattttaatacaatattaaattacttgaactgaacagttccttgtatatattttgcctattcactgttgatatgtatgtagcaaaatgagagttaaataacactaaaatatggtaccaggaggcaattgtataggagcaaagttaataggagctttgctgaaacagaagcatatgtgtaaataagcttgggcttccagttataaattttgtaatttttgtcattatttatatcctataaaaaaagcacacaaaaataaaacagaagttgtacagca

SEQ ID NO: 9416 - protein, 162 aa, Homo sapiens
MKKVPTIILSVSYKGVKFIDATNKNIIAEHEIRNISCAAQDPEDLSTFAYITKDLKSNHHYCHVFTAFDVNLAYEIILTLGQAFEVAYQLALQARKGGHSSTLPESFENKPSKPIPKPRVSIRKSVQIDPSEQKTLANLPWIVEPGQEAKRGINTKYETTIF

SEQ ID NO: 9417 - DNA, 3465 bp, Homo sapiens
agaacgcagaccagcccaagctgacagcttgatatgccttcttctgctgcctggttttgggggctgtatgacgtactggtcggtagtaaagattaatatgtaagaaatgtggagctaggatcaagtcatactccacagcctgcctggcaaactatgttttacttctgactttgctctctcgctgagaacattaatctgtcaagctggcgggctcctttgatagcaactttcccaggggcatgatgtggcaatgccacctctcagcccaggactaccgctattaccccgtggacggctactccctgcttaaacgcttccctcttcatcctcttacaggacccagatgccctgtccaaacagtgggacaatggttggaaagcattgggctacctcagtacgagaaccacctgatggctaatggatttgacaatgtgcagtttatgggaagcaatgttatggaagatcaggatttgttggaaattggaatccttaattctgggcacagacaaagaattctacaggcaatccagctccttccaaagatgagacccattgggcatgatggctaccatcccacctctgtagctgagtggctggattccattgaactgggcgactacaccaaagcctttctaattaatggctacacttcgatggacctgttgaaaaaaatctgggaggttgaacttattaatgttttaaaaatcaatttgattggccacaggaaacgtattttggcatctctgggagacaggctgcacgacgatcccccacagaagccccctcggtccatcaccctcagggaacccagtggtaatcacactcctcctcagttgtctccatcacttagccaaagcacttacaccactggtggctccctagacgttcctcacattatcatgcagggcgatgcaaggaggagaagaaatgaaaactactttgatgatattccccgatcaaaactggagaggcagatggctcagacaggagactggggagaaccttccattaccttgcgacctccgaatgaagccacagcctctaccccggtacagtactggcagcatcacccagaaaagcttatcttccagtcgtgtgattacaaagctttttatttaggttctatgctgataaaagagcttagggggacagaatcaacccaagatgcttgtgcaaaaatgcgggctaactgtcagaagtctacagagcaaatgaagaaggtccctactattattctttctgtctcatataaaggagtcaaatttattgatgcaacaaataagaacataattgctgagcatgaaattcgtaatatctcctgtgctgcccaggacccagaagacctctcaacatttgcctatatcacaaaagatttgaagtctaatcaccactactgtcatgtgtttactgcctttgatgtgaatttagcctatgaaatcatcctaaccctgggacaggcattcgaagtcgcttaccagctagcactacaagcaagaaaagggggacactcctccacacttccagaaagctttgaaaacaaaccctccaaacccatccccaagccccgcgttagcattcgcaagtccgtgcagatcgacccatctgagcaaaagactctggccaatctaccgtggattgtggagccgggccaagaagccaagaggggcattaataccaagtatgaaaccacgattttctgatactcgccgtcctcctgtcctcgcggtgccttgctcgccaagcggtcccggagcaggctttccttcgcgcctccgcgtccacccagcccaggaggaagactgctctgagcgtgcggccttgttacgggcgaaaggccactggccattcctggggaagttctttctgcaccagtgatggaaaacgcaagactttccagtcgcaacccctgagaggcgtgagttgagatgggttttccctgatgctcccgactcccctccccaccacctcccaaggtatttctgatgactccgccccagtacttgctttgcttcatttggggaaaataataccttttctttaaaaaaaaaaaaaaaaaaaaaaaagtaaaggggatctctaatactgcctaaaagtatgctttcactgtcagcagttttaaaggtgaaatcagagcagcactacccctcccacctccaaagcatctgtaaaatcattctatcattgagtatcgtttaatgcaaaaggacaaaaacaactcccgtgatatgattgccaggagattctgtttccccatttctatatttgtggattttatatgtaatcacctatgtcagagaaagaaaacctttcaaccaaatgattggttcaaaaggaaagaatgattcaaagcagaggaatttattatgcacagcaaaatgtgtcttgtattaaatatttttattaaaagaatgtttcattaatgcattgataagaaaactaggttagttgcgagggatgtttctggtttcatttcaaataattaaatttctactgctactaccaagaggactggctcagtggtggcaaaatactggtgatgctccctagagcaggaggcccggaagtgctgacgcagccatcagcctgccaagattgttttttaatcttcacagtgttttaaagaacatgttaaaaaaaaaaaaatctagtgctcctgctgtcaagatttctgtcatggaaaccttgtttgagaaaggtgttaataaaattctattgcaaaaatttctttttctagaaaaaataaatacaaaaaaaaaaaagaagaaattccaaagtaataaaacttttcttgagacaaacaaaaaaaaagtttgcttactatttgattaaataaaatttacttacatttctttaaggtattttaattttttaatgtctctgtggagtatttgtatgataccataatgtatatttatgtagaatcaaattatataaacagtaccaatatcattatagaaaaaaataacattttaatgtatattgttctaacaatcatattgtgaatcattttgaagttcattatagcgatattgataaattgtggaattgtcttaatgtttttttattaactgacattattttaaacctaactgagatgatcagttacattcatcagttggtgagttttgaagaataactacattttatttcaaactaacaaatgtatacggttttagttcagtgttgaagaattttaatacaatattaaattacttgaactgaacagttccttgtatatattttgcctattcactgttgatatgtatgtagcaaaatgagagttaaataacactaaaatatggtaccaggaggcaattgtataggagcaaagttaataggagctttgctgaaacagaagcatatgtgtaaataagcttgggcttccagttataaattttgtaatttttgtcattatttatatcctataaaaaaagcacacaaaaataaaacagaagttgtacagca

SEQ ID NO: 9418 - protein, 486 aa, Homo sapiens
MMWQCHLSAQDYRYYPVDGYSLLKRFPLHPLTGPRCPVQTVGQWLESIGLPQYENHLMANGFDNVQFMGSNVMEDQDLLEIGILNSGHRQRILQAIQLLPKMRPIGHDGYHPTSVAEWLDSIELGDYTKAFLINGYTSMDLLKKIWEVELINVLKINLIGHRKRILASLGDRLHDDPPQKPPRSITLREPSGNHTPPQLSPSLSQSTYTTGGSLDVPHIIMQGDARRRRNENYFDDIPRSKLERQMAQTGDWGEPSITLRPPNEATASTPVQYWQHHPEKLIFQSCDYKAFYLGSMLIKELRGTESTQDACAKMRANCQKSTEQMKKVPTIILSVSYKGVKFIDATNKNIIAEHEIRNISCAAQDPEDLSTFAYITKDLKSNHHYCHVFTAFDVNLAYEIILTLGQAFEVAYQLALQARKGGHSSTLPESFENKPSKPIPKPRVSIRKSVQIDPSEQKTLANLPWIVEPGQEAKRGINTKYETTIF

SEQ ID NO: 9419 - DNA, 2976 bp, Homo sapiens
gggtaatgaaggggagcgagcgagggggagcaaggagcatggagctgcatactgatgagtgacccagatgccctgtccaaacagtgggacaatggttggaaagcattgggctacctcagtacgagaaccacctgatggctaatggatttgacaatgtgcagtttatgggaagcaatgttatggaagatcaggatttgttggaaattggaatccttaattctgggcacagacaaagaattctacaggcaatccagctccttccaaagatgagacccattgggcatgatggctaccatcccacctctgtagctgagtggctggattccattgaactgggcgactacaccaaagcctttctaattaatggctacacttcgatggacctgttgaaaaaaatctgggaggttgaacttattaatcagtcgtctgtctgtgaaatatggacgaatcagaacgcaggatttcctttctcagcgatccatcaggttcataatacaggagactggggagaaccttccattaccttgcgacctccgaatgaagccacagcctctaccccggtacagtactggcagcatcacccagaaaagcttatcttccagtcgtgtgattacaaagctttttatttaggttctatgctgataaaagagcttagggggacagaatcaacccaagatgcttgtgcaaaaatgcgggctaactgtcagaagtctacagagcaaatgaagaaggtccctactattattctttctgtctcatataaaggagtcaaatttattgatgcaacaaataagaacataattgctgagcatgaaattcgtaatatctcctgtgctgcccaggacccagaagacctctcaacatttgcctatatcacaaaagatttgaagtctaatcaccactactgtcatgtgtttactgcctttgatgtgaatttagcctatgaaatcatcctaaccctgggacaggcattcgaagtcgcttaccagctagcactacaagcaagaaaagggggacactcctccacacttccagaaagctttgaaaacaaaccctccaaacccatccccaagccccgcgttagcattcgcaagtccgtgcagatcgacccatctgagcaaaagactctggccaatctaccgtggattgtggagccgggccaagaagccaagaggggcattaataccaagtatgaaaccacgattttctgatactcgccgtcctcctgtcctcgcggtgccttgctcgccaagcggtcccggagcaggctttccttcgcgcctccgcgtccacccagcccaggaggaagactgctctgagcgtgcggccttgttacgggcgaaaggccactggccattcctggggaagttctttctgcaccagtgatggaaaacgcaagactttccagtcgcaacccctgagaggcgtgagttgagatgggttttccctgatgctcccgactcccctccccaccacctcccaaggtatttctgatgactccgccccagtacttgctttgcttcatttggggaaaataataccttttctttaaaaaaaaaaaaaaaaaaaaaaaagtaaaggggatctctaatactgcctaaaagtatgctttcactgtcagcagttttaaaggtgaaatcagagcagcactacccctcccacctccaaagcatctgtaaaatcattctatcattgagtatcgtttaatgcaaaaggacaaaaacaactcccgtgatatgattgccaggagattctgtttccccatttctatatttgtggattttatatgtaatcacctatgtcagagaaagaaaacctttcaaccaaatgattggttcaaaaggaaagaatgattcaaagcagaggaatttattatgcacagcaaaatgtgtcttgtattaaatatttttattaaaagaatgtttcattaatgcattgataagaaaactaggttagttgcgagggatgtttctggtttcatttcaaataattaaatttctactgctactaccaagaggactggctcagtggtggcaaaatactggtgatgctccctagagcaggaggcccggaagtgctgacgcagccatcagcctgccaagattgttttttaatcttcacagtgttttaaagaacatgttaaaaaaaaaaaaatctagtgctcctgctgtcaagatttctgtcatggaaaccttgtttgagaaaggtgttaataaaattctattgcaaaaatttctttttctagaaaaaataaatacaaaaaaaaaaaagaagaaattccaaagtaataaaacttttcttgagacaaacaaaaaaaaagtttgcttactatttgattaaataaaatttacttacatttctttaaggtattttaattttttaatgtctctgtggagtatttgtatgataccataatgtatatttatgtagaatcaaattatataaacagtaccaatatcattatagaaaaaaataacattttaatgtatattgttctaacaatcatattgtgaatcattttgaagttcattatagcgatattgataaattgtggaattgtcttaatgtttttttattaactgacattattttaaacctaactgagatgatcagttacattcatcagttggtgagttttgaagaataactacattttatttcaaactaacaaatgtatacggttttagttcagtgttgaagaattttaatacaatattaaattacttgaactgaacagttccttgtatatattttgcctattcactgttgatatgtatgtagcaaaatgagagttaaataacactaaaatatggtaccaggaggcaattgtataggagcaaagttaataggagctttgctgaaacagaagcatatgtgtaaataagcttgggcttccagttataaattttgtaatttttgtcattatttatatcctataaaaaaagcacacaaaaataaaacagaagttgtacagca

SEQ ID NO: 9420 - protein, 358 aa, Homo sapiens
MANGFDNVQFMGSNVMEDQDLLEIGILNSGHRQRILQAIQLLPKMRPIGHDGYHPTSVAEWLDSIELGDYTKAFLINGYTSMDLLKKIWEVELINQSSVCEIWTNQNAGFPFSAIHQVHNTGDWGEPSITLRPPNEATASTPVQYWQHHPEKLIFQSCDYKAFYLGSMLIKELRGTESTQDACAKMRANCQKSTEQMKKVPTIILSVSYKGVKFIDATNKNIIAEHEIRNISCAAQDPEDLSTFAYITKDLKSNHHYCHVFTAFDVNLAYEIILTLGQAFEVAYQLALQARKGGHSSTLPESFENKPSKPIPKPRVSIRKSVQIDPSEQKTLANLPWIVEPGQEAKRGINTKYETTIF

SEQ ID NO: 9421 - DNA, 3296 bp, Homo sapiens
agaacgcagaccagcccaagctgacagcttgatatgccttcttctgctgcctggttttgggggctgtatgacgtactggtcggtagtaaagattaatatgtaagaaatgtggagctaggatcaagtcatactccacagcctgcctggcaaactatgttttacttctgactttgctctctcgctgagaacattaatctgtcaagctggcgggctcctttgatagcaactttcccaggggcatgatgtggcaatgccacctctcagcccaggactaccgctattaccccgtggacggctactccctgcttaaacgcttccctcttcatcctcttacaggacccagatgccctgtccaaacagtgggacaatggttggaaagcattgggctacctcagtacgagaaccacctgatggctaatggatttgacaatgtgcagtttatgggaagcaatgttatggaagatcaggatttgttggaaattggaatccttaattctgggcacagacaaagaattctacaggcaatccagctccttccaaagatgagacccattgggcatgatggctaccatcccacctctgtagctgagtggctggattccattgaactgggcgactacaccaaagcctttctaattaatggctacacttcgatggacctgttgaaaaaaatctgggaggttgaacttattaatgttttaaaaatcaatttgattggccacaggaaacgtattttggcatctctgggagacaggctgcacgacgatcccccacagaagccccctcggtccatcaccctcagggaacccagtggtaatcacactcctcctcagttgtctccatcacttagccaaagcacttacaccactggtggctccctagacgttcctcacattatcatgcagggcgatgcaaggaggagaagaaatgaaaactactttgatgatattccccgatcaaaactggagaggcagatggctcagcagtcgtctgtctgtgaaatatggacgaatcagaacgcaggatttcctttctcagcgatccatcaggttcataatacaggagactggggagaaccttccattaccttgcgacctccgaatgaagccacagcctctaccccggtacagtactggcagcatcacccagaaaagcttatcttccagtcgtgtgattacaaagctttttatttaggttctatgctgataaaagagcttagggggacagaatcaacccaagatgcttgtgcaaaaatgcgggctaactgtcagaagtctacagagcaaatgaagaaggtccctactattattctttctgtctcatataaaggagtcaaatttattgatgcaacaaataagaacataattgctgagcatgaaattcgtaatatctcctgtgctgcccaggacccagaagacctctcaacatttgcctatatcacaaaagatttgaagtctaatcaccactactgtcatgtgtttactgcctttgatgtgaatttagcctatgaaatcatcctaaccctgggacaggcattcgaagtcgcttaccagctagcactacaagcaagaaaagggggacactcctccacacttccagaaagctttgaaaacaaaccctccaaacccatccccaagccccgcgttagcattcgcaagtccgtgcagatcgacccatctgagcaaaagactctggccaatctaccgtggattgtggagccgggccaagaagccaagaggggcattaataccaagtatgaaaccacgattttctgatactcgccgtcctcctgtcctcgcggtgccttgctcgccaagcggtcccggagcaggctttccttcgcgcctccgcgtccacccagcccaggaggaagactgctctgagcgtgcggccttgttacgggcgaaaggccactggccattcctggggaagttctttctgcaccagtgatggaaaacgcaagactttccagtcgcaacccctgagaggcgtgagttgagatgggttttccctgatgctcccgactcccctccccaccacctcccaaggtatttctgatgactccgccccagtacttgctttgcttcatttggggaaaataataccttttctttaaaaaaaaaaaaaaaaaaaaaaaagtaaaggggatctctaatactgcctaaaagtatgctttcactgtcagcagttttaaaggtgaaatcagagcagcactacccctcccacctccaaagcatctgtaaaatcattctatcattgagtatcgtttaatgcaaaaggacaaaaacaactcccgtgatatgattgccaggagattctgtttccccatttctatatttgtggattttatatgtaatcacctatgtcagagaaagaaaacctttcaaccaaatgattggttcaaaaggaaagaatgattcaaagcagaggaatttattatgcacagcaaaatgtgtcttgtattaaatatttttattaaaagaatgtttcattaatgcattgataagaaaactaggttagttgcgagggatgtttctggtttcatttcaaataattaaatttctactgctactaccaagaggactggctcagtggtggcaaaatactggtgatgctccctagagcaggaggcccggaagtgctgacgcagccatcagcctgccaagattgttttttaatcttcacagtgttttaaagaacatgttaaaaaaaaaaaaatctagtgctcctgctgtcaagatttctgtcatggaaaccttgtttgagaaaggtgttaataaaattctattgcaaaaatttctttttctagaaaaaataaatacaaaaaaaaaaaagaagaaattccaaagtaataaaacttttcttgagacaaacaaaaaaaaagtttgcttactatttgattaaataaaatttacttacatttctttaaggtattttaattttttaatgtctctgtggagtatttgtatgataccataatgtatatttatgtagaatcaaattatataaacagtaccaatatcattatagaaaaaaataacattttaatgtatattgttctaacaatcatattgtgaatcattttgaagttcattatagcgatattgataaattgtggaattgtcttaatgtttttttattaactgacattattttaaacctaactgagatgatcagttacattcatcagttggtgagttttgaagaataactacattttatttcaaactaacaaatgtatacggttttagttcagtgttgaagaattttaatacaatattaaattacttgaactg

SEQ ID NO: 9422 - protein, 511 aa, Homo sapiens
MMWQCHLSAQDYRYYPVDGYSLLKRFPLHPLTGPRCPVQTVGQWLESIGLPQYENHLMANGFDNVQFMGSNVMEDQDLLEIGILNSGHRQRILQAIQLLPKMRPIGHDGYHPTSVAEWLDSIELGDYTKAFLINGYTSMDLLKKIWEVELINVLKINLIGHRKRILASLGDRLHDDPPQKPPRSITLREPSGNHTPPQLSPSLSQSTYTTGGSLDVPHIIMQGDARRRRNENYFDDIPRSKLERQMAQQSSVCEIWTNQNAGFPFSAIHQVHNTGDWGEPSITLRPPNEATASTPVQYWQHHPEKLIFQSCDYKAFYLGSMLIKELRGTESTQDACAKMRANCQKSTEQMKKVPTIILSVSYKGVKFIDATNKNIIAEHEIRNISCAAQDPEDLSTFAYITKDLKSNHHYCHVFTAFDVNLAYEIILTLGQAFEVAYQLALQARKGGHSSTLPESFENKPSKPIPKPRVSIRKSVQIDPSEQKTLANLPWIVEPGQEAKRGINTKYETTIF

SEQ ID NO: 9423 - DNA, 1024 bp, Homo sapiens
agaacgcagaccagcccaagctgacagcttgatatgccttcttctgctgcctggttttgggggctgtatgacgtactggtcggtagtaaagattaatatgtaagaaatgtggagctaggatcaagtcatactccacagcctgcctggcaaactatgttttacttctgactttgctctctcgctgagaacattaatctgtcaagctggcgggctcctttgatagcaactttcccaggggcatgatgtggcaatgccacctctcagcccaggactaccgctattaccccgtggacggctactccctgcttaaacgcttccctcttcatcctcttacaggacccagatgccctgtccaaacagtgggacaatggttggaaagcattgggctacctcagtacgagaaccacctgatggctaatggatttgacaatgtgcagtttatgggaagcaatgttatggaagatcaggatttgttggaaattggaatccttaattctgggcacagacaaagaattctacaggcaatccagctccttccaaagatgagacccattgggcatgatggctaccatcccacctctgtagctgagtggctggattccattgaactgggcgactacaccaaagcctttctaattaatggctacacttcgatggacctgttgaaaaaaatctgggaggttgaacttattaatgttttaaaaatcaatttgattggccacaggaaacgtattttggcatctctgggagacaggctgcacgacgatcccccacagaagccccctcggtccatcaccctcagggtaagtgccaagcacattcatctggttctctgcccttatcttaagaactatttgtttgagaccagcctggccaacatggtgagaccctgcctctactgaaaacagaaaaaatttagccaggtgtggttgtgcctgtctgtagtcccagctactccggaggctgagacatgaaaatcacttgaacccagaaggcggagcattgcagtgagcagagatcgcac

SEQ ID NO: 9424 - protein, 220 aa, Homo sapiens
MMWQCHLSAQDYRYYPVDGYSLLKRFPLHPLTGPRCPVQTVGQWLESIGLPQYENHLMANGFDNVQFMGSNVMEDQDLLEIGILNSGHRQRILQAIQLLPKMRPIGHDGYHPTSVAEWLDSIELGDYTKAFLINGYTSMDLLKKIWEVELINVLKINLIGHRKRILASLGDRLHDDPPQKPPRSITLRVSAKHIHLVLCPYLKNYLFETSLANMVRPCLY

SEQ ID NO: 9425 - DNA, 1303 bp, Homo sapiens
aattcttccctccgagacccagcccgctgcttgccacttccctctccaaacgctggcgggggtgggtggcagcaccgaggcgattttcttcgtctttttttcctccgggttttgtcatggaaacgctgacacaacctccagacggcggccgagcccggccggggactgagggcttttgggaccctgcgggagcgcggcgcgcacaccgcactccccgggcaacagctggacgcgaccatatcccgggtaggggcggggggagcgcgacgctccgccccggcgctagggtccctccctcctcccggctctccgcaggcgccctcccctcgccgggggccgcgagttgcatttggtaaaacccagccccggaatatatagatcgttggagcgcaatgaagtagcctttggagagaagggagagggcccgtcggacagccacagcggccagcgcagcggcagcggcggcggcaccaccatcaccgctcgcaccccagccgcccggcccgcgaccaggcagcggcggccgccggcgggatcggaggaggcggcggagcggcgaggaggaggagcaggagcgcgcagccagcgggtccacgcatctcagcacttccagaccaactccggcaccttccacacccctgcccgggctgggggctccgagagcggccgcgaagcgactccgatcctccctctgagccttgctcagctctgccccgcgcctcccgggctccggtccgcgcggcggggtccctgctcctgcgccccgggcgcgcttcccggacaccccggtccccgcagccaggacaaagccatgaagccagcgctgctggaagtgatgaggatgaacagaatctgccggatggtgctggccacttgcttgggatcctttatcctggtcatcttctatttccaaagtatgttgcacccagtcatgcggaggaatccctttggtgtggacatctgctgccggaaggggtcccgaagccccctgcaggaactctacaacccaatccaggtaagcttcaagcactctgtcagcatgtgaattttttttttttgtaggtatggatactaaaaactctaaaattgtggtctttgggggatttaaaacttcctttcacagcctggcattttaccttcagtggttgctttctccgtcaccctttttctatgtagcatctctgaaaaatctagcaggggatgtttagaattagagaaatgcctaggtttagtgctaagcattcagacctgcccagggtttgaactcctgagattaacagtctcaagttcgagcaatgggact

SEQ ID NO: 9426 - protein, 77 aa, Homo sapiens
MKPALLEVMRMNRICRMVLATCLGSFILVIFYFQSMLHPVMRRNPFGVDICCRKGSRSPLQELYNPIQVSFKHSVSM

SEQ ID NO: 9427 - DNA, 2181 bp, Homo sapiens
aattcttccctccgagacccagcccgctgcttgccacttccctctccaaacgctggcgggggtgggtggcagcaccgaggcgattttcttcgtctttttttcctccgggttttgtcatggaaacgctgacacaacctccagacggcggccgagcccggccggggactgagggcttttgggaccctgcgggagcgcggcgcgcacaccgcactccccgggcaacagctggacgcgaccatatcccgggtaggggcggggggagcgcgacgctccgccccggcgctagggtccctccctcctcccggctctccgcaggcgccctcccctcgccgggggccgcgagttgcatttggtaaaacccagccccggaatatatagatcgttggagcgcaatgaagtagcctttggagagaagggagagggcccgtcggacagccacagcggccagcgcagcggcagcggcggcggcaccaccatcaccgctcgcaccccagccgcccggcccgcgaccaggcagcggcggccgccggcgggatcggaggaggcggcggagcggcgaggaggaggagcaggagcgcgcagccagcgggtccacgcatctcagcacttccagaccaactccggcaccttccacacccctgcccgggctgggggctccgagagcggccgcgaagcgactccgatcctccctctgagccttgctcagctctgccccgcgcctcccgggctccggtccgcgcggcggggtccctgctcctgcgccccgggcgcgcttcccggacaccccggtccccgcagccaggacaaagccatgaagccagcgctgctggaagtgatgaggatgaacagaatctgccggatggtgctggccacttgcttgggatcctttatcctggtcatcttctatttccaaagtatgttgcacccagtcatgcggaggaatccctttggtgtggacatctgctgccggaaggggtcccgaagccccctgcaggaactctacaacccaatccagctggagctctcaaacactgctgtcctgcaccagatgcggcgggaccaggtgacagacacgtgccgagccaacagcgccacaagccgtaagcggagggtgctgacccccaacgacctgaagcacttggtggtggatgaggaccacgagctcatctactgctacgtgcccaaggtggcctgcaccaactggaagcggctcatgatggtcctgaccgggcgggggaagtacagcgaccccatggagatcccggccaacgaggcacacgtctccgccaacctgaagaccctgaaccagtacagcatcccagaaatcaaccaccgcttgaaaagctacatgaagttcctgtttgtccgggagcccttcgagaggctagtgtccgcctaccgcaacaagttcacccagaagtacaacatctccttccacaagcggtacggcaccaagatcatcaaacgccagcggaagaacgccacccaggaggccctgcgcaaaggggacgatgtcaaattcgaggagtttgtggcctatctcatcgacccacacacccagcgggaggagcctttcaacgaacactggcaaaccgtctactcactctgccatccctgccacatccactatgacctcgtgggcaagtacgagacactggaagaggattctaattacgtcctgcagctggcaggagtgggcagctacctgaagttccccacctatgcaaagtctacgagaactactgatgaaatgaccacagaattcttccagaacatcagctcagagcaccaaacgcagctgtacgaagtctacaaactcgattttttaatgttcaattactcagtgccaagctacctgaaattggaataaagggggtggggagagggagagaatcatgctttttaatttaagatttttatttgtcaaaagaattatatggatattgggttattttgtaaattaatatttctttggggatgatgctgcgagcagcatagtgagaattatttaaaatccttcgtagggaaggacagctgtctttgcaggggaaataggatgggtcgtccttgtctgtagaagtgaatactgcaacactgtctcaaaggtttcttgtgttctggtgaattccatgaattgtgcattccataaattctaattaatattatttatagttatttaaa

SEQ ID NO: 9428 - protein, 352 aa, Homo sapiens; identical to SEQ ID NO: 1449

SEQ ID NO: 9429 - DNA, 2059 bp, Homo sapiens
aattcttccctccgagacccagcccgctgcttgccacttccctctccaaacgctggcgggggtgggtggcagcaccgaggcgattttcttcgtctttttttcctccgggttttgtcatggaaacgctgacacaacctccagacggcggccgagcccggccggggactgagggcttttgggaccctgcgggagcgcggcgcgcacaccgcactccccgggcaacagctggacgcgaccatatcccgggtaggggcggggggagcgcgacgctccgccccggcgctagggtccctccctcctcccggctctccgcaggcgccctcccctcgccgggggccgcgagttgcatttggtaaaacccagccccggaatatatagatcgttggagcgcaatgaagtagcctttggagagaagggagagggcccgtcggacagccacagcggccagcgcagcggcagcggcggcggcaccaccatcaccgctcgcaccccagccgcccggcccgcgaccaggcagcggcggccgccggcgggatcggaggaggcggcggacgactccgatcctccctctgagccttgctcagctctgccccgcgcctcccgggctccggtccgcgcggcggggtccctgctcctgcgccccgggcgcgcttcccggacaccccggtccccgcagccaggacaaagccatgaagccagcgctgctggaagtgatgaggatgaacagaatctgccggatggtgctggccacttgcttgggatcctttatcctggtcatcttctatttccaaagtatgttgcacccagtcatgcggaggaatccctttggtgtggacatctgctgccggaaggggtcccgaagccccctgcaggaactctacaacccaatccagctggagctctcaaacactgctgtcctgcaccagatgcggcgggaccaggtgacagacacgtgccgagccaacagcgccacaagccgtaagcggagggtgctgacccccaacgacctgaagcacttggtggtggatgaggaccacgagctcatctactgctacgtgcccaaggtggcctgcaccaactggaagcggctcatgatggtcctgaccgggcgggggaagtacagcgaccccatggagatcccggccaacgaggcacacgtctccgccaacctgaagaccctgaaccagtacagcatcccagaaatcaaccaccgcttgaaaagctacatgaagttcctgtttgtccgggagcccttcgagaggctagtgtccgcctaccgcaacaagttcacccagaagtacaacatctccttccacaagcggtacggcaccaagatcatcaaacgccagcggaagaacgccacccaggaggccctgcgcaaaggggacgatgtcaaattcgaggagtttgtggcctatctcatcgacccacacacccagcgggaggagcctttcaacgaacactggcaaaccgtctactcactctgccatccctgccacatccactatgacctcgtgggcaagtacgagacactggaagaggattctaattacgtcctgcagctggcaggagtgggcagctacctgaagttccccacctatgcaaagtctacgagaactactgatgaaatgaccacagaattcttccagaacatcagctcagagcaccaaacgcagctgtacgaagtctacaaactcgattttttaatgttcaattactcagtgccaagctacctgaaattggaataaagggggtggggagagggagagaatcatgctttttaatttaagatttttatttgtcaaaagaattatatggatattgggttattttgtaaattaatatttctttggggatgatgctgcgagcagcatagtgagaattatttaaaatccttcgtagggaaggacagctgtctttgcaggggaaataggatgggtcgtccttgtctgtagaagtgaatactgcaacactgtctcaaaggtttcttgtgttctggtgaattccatgaattgtgcattccataaattctaattaatattatttatagttatttaaa

SEQ ID NO: 9430 - protein, 352 aa, Homo sapiens; identical to SEQ ID NO: 1449

SEQ ID NO: 9431 - DNA, 4307 bp, Homo sapiens
tttgtttgcagctgggtatttttagtttaatgtcagcaaactacagcggtgtttgtctcctcacccaaacctgcggttgtgaaacttataaaggaatttaaaaatggacctggcttgcattccggcaggcaggccttggttgcagtgggcagggccagacagccaggggtatctcagagtgccaagctccagggcccaccggagaccgggccagactcaccccagagcgccaggggactggtggtgtacagatacactcgggttcaaacagtttaaacaaggggccggtgatttggtctagactctagagctgtgttcaggtttcgctgggaccgtgaatgccagtaatgctctgtacgaatgcccagaacacggatgagtgtcagccttcagcaggaatgcgcttgagcttctgtgtacctgttaattgcccagggaaatacaattgtcatggaattctttgtgagaattgggaaataactttctagccaaagatactagaaagaaacttccaacttgtaattgtcactttgtgaaaatttccagcccttgttagtcttaagttgacttgaaagtgacatcatatcttttcagcctagccttttggaagaggcagagaaccttttctaagcttgtgctgaaaaagatcctctgtcgatgatcctgccccatcctttatgtccccctctagtcctattttctcccattgtttattatttagatctctataaatatacttttctgatatttccctccagtccatagcaaatactactttcaaaacattgtgttgaatgtagaattacagatagttcagttgaaaggccttccttatttcagattacttacagtccacaaaagctctgtgtcaacagtttatcattacacggggcataaaaatatactttcaaatctacattaaacattttctttttgaggggttcattttattaagctacactgttaatgaccactgatgtggaatctctttcactggtttgaatttctttaaaagttaaagatccttgcttctctgaagtatcttgggggtaaggagagctgatccttcagcctggctctgcagtttctgtctctccagatcaccctgggagaggcagaagggaccacagcatggcacggattgtgtagctaaaaatttggaggcctctggcaggggttccagatacctacatgtgaaatagaaaaatagtattgcaaaagcaatgggttccaggcttcgttggtggctggagggtatgagaggagggagagaaagaaaaaaaggaaggcagggcgcggtggctcatacctggaatcccagcaccttgggaggctgaggcgggtgcatcacttgagtcctgacctcaggtgatctgcccgccacggcctcccaaaatgctaggattacaggcataagccaccgtgtccagcaccagtctaggtattttaagcagaaagatatttactagagggaattttgtgcttatagaggcataagggggctggaggaatggggctccaggaatgtctcccagctaatggtagtagtttatataataattaataaacaaacgtatgttggcatggctgttcaaaaaaaacaaaaaacaaaaaacaaaactgactcactaggggtgctacaccctctgatactgtgtctggaactattgagttcaagaacaaattgatggcaaagccggagagtggaccctataatgctgttgcaaaaaaccctcgtgaccccatctccatgcttgccagcggccaaacagccccaaaggcaagaagatggcctctctgccccacatctgctttctaaatctcaagtgagtgcttctatttgggagagccaaattcacatctagaaccttagcttcaaagaagcctgggaaatacagcttttcaattaccagcctctgcaggctagaaagctttctagaaggagggtagaatgaacgatgagcaaataatcacaatactcaccacaccctattggtaaaacatatttgagcagccatccctcaatatattttgtttataaataatttctgcatattactaccattatctacatatctaggataggatcctttctgactagtgactgcaaacccctatgtcgttatctgttggataattccgttggctgactctttatcaattctgattctttcatccttttgaccttgtaatgttgtccacaaagatacaatggagagctagtactcaagagggaggaatgccattttcttgtgtgcctggattgtgacaattatcttcaagttgtggtttcttggctgggatctctttaggcctcagttctattttgtgaggaataggatagttaaaagtagataatataatctgtaaatttacttatgattcagttgtaaatggttattcattgaaatatgctgagaatggtggaattattgaggtggtcactccagttcattttgtggttgaggatacctgcctgagtttcataactgacatgtaatttgatatgacaggttagatggagttgtttgtggccatttgtattcttgatatagttaaaatttttttaggttaactgaaaatggaaggtctggtgtctagatgaacaaaaaatgggaagtctgatgtttccttcccggaccccttttgtggcacagtgtccactaggattttggaactccaggactagacctgccttgaatgtcattggttattgtcaaacctgccattgtcaactctgggtaaaagtacagtgttaacctggtgccagttctagcggtggtggaggcttagtttggctttagataagctgtatggggagggctgatatttccagcatcaccaggacttgggttctgtctcatgtagatatggatagagacaaagaaacctggtaatggaagtgtttcagtccttatcattctctggcttgaatcgttatcttaaatgccttgggagaagaaactcacaaaggcaactcaagtgaaagaagctggtggctgggtttctgttagaaactgttaacttcgaagaatctcagaagagggaaaccacagaggcccctctaaggtagtgttgtaacaggacacttaacatttcttaacggttgtcatattttacctttaatatcattgcataaggtcactcattatagtgaaaagagcacagaatttggagtctggacaccagcttttaggatttggctgttccctatatccatttgacatcattcaagatatttttgttaaatgcttactaagagttaagctctgttctaggtgtagaatcaaacaggtgaaaatccatgtcctcatggaacatacatcatagtgggggagacacaataacaaatggatattaaattatagagtatgttggaaggtgacaaatgctacgggaggcggggaagcaaggaagggggatgtgaagtggcagtggtggggggattgaaattttaaataggattgtcagggaagttctctctgcaaaggtcgctttaaagattgaaggagatgagggtagatgggagatgaaccaatgaaatagtaaagatatttattggatattatttaccgaaggccaacttgggtcaggcattgaatatagattactcccccatgggactcgtataatgtatacgctataattaccaccattttacaaggggggaaactgaagcatagagcattatcacttgtctaaggtccccaggagaggaatggatggaataaaaaccaaacccggctgtatgacttcatatccgctgctctgaacatctgggagggctctcatttgggcattactcttcccatccaccctaaagattggcgagaatgattgcagtttagtgatagacattctgcgaagggtgggacctttctgcccatcaaagaatcattctgcccaaatgccaccaatgcccctccttgagaaacagctcaaaactctatgtgtaaacagcatctggcgtagtacttggctgcatcccatgacttgggcaagtgcctggcaagtgtaggggcttaataattgattgaatgagtgactgagtgaaagtcgcagacaagagatttggtcccctcatttgccaagtgaaggtagtaatgttacctcttttatgggtggcggtggtaaagattaaatgagaagttagatgtgaaaatgcattgggaatggatgtaaacctatgtaacaaaactgcatgtcctgcacatgtatcctggaacttaaaattaaataaaattaaattttaagaaaagaaaaaatgaatgtaaaagcagtataaacatgttgttgttatgataaat

SEQ ID NO: 9432 - protein, 65 aa, Homo sapiens [sequence omitted]

SEQ ID NO: 9433 - DNA, 1269 bp, Homo sapiens
cccgaggccttccaggcgcccctgcagggcggccaggcgctgctcgtgctcctggctcttggacaggagggactccaggctctcggtctggcgcgcagaagccacctgcatggagagcaccccatcctccacgtgctggagcctggagtccagtccctgactcttttgctggagtgcctcaaaggcttccgagtgtctgaagcctccgtcctccttcggcccgtgggaatcggacttcagctggcggagctcttcctccagtctccggatctcctccgggaggcgggagacggactcctcagacctgagaagcttctccgtgagggcctgcagggcgagccgctccgtgtcggccgcctccttgaaagcctgctgctcctgcttgaggctcaccagctcgcggacctcggtgtagatgtcagactccatagtctgaagggtacttctcagggcctccatgtcccactctctggacttggctgaggtctgtatctccttcacagcttcctttaaggctttcaaatcctgcttgttcccctcagattcttccagggaggcaacctttgccttcatgtcattgatctccttctggctcctcttctggacttctgtgaagatggcgatgttgtcgttgatggatttggtgagctccgtcagccgctcctccaccgtgttctccagggacgtgaagtcccgctcccgggcgtccttcaccacatggatcccatccgagaggtctttgagaatctcattctggagtttctgcagcacttcgctgatccggctgacctcactctccccttgcttcacagctttctctgtgaggtcttgtttatgttgggagcttctcaagatggactcaaaagttccaaatgtggcttgcaaagactgcacctgtaatcccagctacttcggaggctgaggcagggggatcacttgaggccaggagtttgatgctgtagcgcgtgatgatctcaccagtgaatggctactgcacatcagcctgggcaatagagtgagaagccctctctgccaacggataatgagttaatctcagtggttcccacttgaggaggctccctgccgtggtccttttcctctcttctctagggatttcatgcatcaccctgacagccagtggaagttgcctgatttgaagaggcccagggccgaagatacccagtcatgtgtggaagcagcttcaatgccattttgtgagaggttgagggccccagagggggaagcacaggtattaaaacaaaacagacc

SEQ ID NO: 9434 - protein, 154 aa, Homo sapiens
MSHSLDLAEVCISFTASFKAFKSCLFPSDSSREATFAFMSLISFWLLFWTSVKMAMLSLMDLVSSVSRSSTVFSRDVKSRSRASFTTWIPSERSLRISFWSFCSTSLIRLTSLSPCFTAFSVRSCLCWELLKMDSKVPNVACKDCTCNPSYFGG

SEQ ID NO: 9435 - DNA, 3203 bp, Homo sapiens
ccgcgttgggggggacactggggctgggggggtttgttgggctggtgagttttcgaggtgactgtgctgtgctcggtgaggggacgcccagagagccctgacccggggtcactccgtcgccgttctcctcttgtctacgtgctggacccggtgctacctttttacccacacttaagtgacgcaaaatgcccttcaatggcgagaagcagtgtgtgggagaggaccagccaagcgattctgattcttcccggttttccgaaagcatggcttcgctcagtgactatgaatgctccaggcagagctttgcaagtgactcctccagcaaatccagctctcctgcttcaacaagccctccaagggttgtaacatttgatgaagtgatggctacagcaaggaacttatcaaacttgactcttgctcatgagattgctgtaaatgagaactttcaattgaaacaagaggctctcccagaaaagagtttggctggtcgagtgaagcacattgttcaccaggccttctgggacgtcttggattcagaactaaatgctgaccctcctgagtttgaacatgccatcaaactgtttgaagaaatcagagagattcttctctcttttctcactcccggtggcaaccggcttcgcaaccaaatctgtgaagttttggacacagacctcattaggcagcaggctgagcacagtgctgttgacatccaaggcctggccaactatgtcatcagtacgatgggaaagctgtgtgctcccgtgcgagataatgatatcagagagttaaaggctactggcaacatcgtggaggtgctgagacaaatattccatgtcctggacctcatgcaaatggacatggccaattttacaattatgagtctcagaccgcaccttcaacgccagttggtggaatatgagagaaccaagttccaggaaattttggaagaaactccaagtgagtataatataatgtgtatttatattgaaattaggttaaaatgatgattttaaatgttaaaatttaaattaaattaaattaaattaaattaaattaataaataaataaaatttaatttaatttaaattaattaaaatttaaaatgttaaaggttaaaatgaaaattaggtgatgttttcatttttgacttcatatatagtatcactaaagaattttggcctttctattaaacatttttttaccttccaaaattgacatcacaaacttacagttgtttattctgtccaggaactgtgctaagcactattcgtttcttcattcattcaagatatatttattgagtgcctcctgtgtttcagacactgcttaggtgcagtggatactgcagcgaacagaatggaatacagttgccgtccccaaggagctgacattctagtaggcatgacaaataaataaacatatattgtcaggtgtattattaagtgctatgaagaaaaataggataaagggacagtaatgggtcagaagtgaggacagcattgttttttagatgtgatggactgggaaggtctctgtaagtaacatttgagtaaagtttgcaaagaaatgaggaaggggcatgtaaagatggggaaaagaacgttctagcctgagggactgcaggtacaaaggcactgaagcagaaactgcttatgagtttgacaaacacagggcagacattgtgacgggagtagagttggtaaggggagagtggtaagagatgaggctgaaaaggagataaaggcaggtcacatagagcattgttagtaaatgagaggagtttggatttcattccatgtgcggtggaaactcatcagagagttttaatcaggggagcaacatctgattttcatttttgaagaatattcttgttcctggctacagaataggtcatgtgggaacaaagagggaaacagaggtaccaattaggtggtattacagttgctcaggcaagaaatgatggtggcttgttccagatggtaatggtggaaggagtgagaagagaccagattctggatacattttgaaagtggagtaatcagatttgctgaagattggataagggagaaaagagttgagggtgactctaaggtttttggcctcgtacaaccgggtgaatggtcatacagtttgagtgaaactggtgagaccaggagaaagaaggttgggagatgacatggaatcaagagttcagtttggtgatgtaaacttttgagatttcatttgacatcaatgtggagatgttaggtaggcatttagatatgaattatgagtttacaggaataatggaaactgtatatgtatttgggaatcatcagtatatgtatgatatataaagccatggaactgggtactagttaacacttagaaaatccttatcacactctaagtactttacctgtacaaactaatttaatccttgcaacaactatatgaagttaccccccattttatgggtgcggaaactgaggcactgtgaggttaagtcactggcctatgtaacacacttaaaagtataggagctcacctaggaaggcagcttggctccatagtccatgttcctgtccattatattacactgggtgagactacctagggggagtgagtgtggactctgaaagaaactgacgtggggcactccagcagctagaagctgaagttgagatgaggaggagggtctaacaatggagactatgagggagtagccagagaggtagtgtgacagtcaggagaggcgggtgtcctgtaagatacgtgaagaaggtatttggagaaggaaggcatgtttggatttgacaagcattgctaagtggtcaagaaagacacaggccaacttgaccattggatttgactgtttgatgatggtcagtaaccttgatgagagtggtttcagtggatttgtgtgcattaaagccagactgggcagggcacagtggctcacacctgtaatcctagcactttgggaggccgaggcaggcacatcacctgagatcaggagttcaagaccagcctggccaacatgctgaaaccccttctctactaaaatctaaaaattagccgggatgatggcaggtgcctgtaatcccagctgctcgggaggttgagatgggagaatcgcttgaacccaggagatggtggttgcagtgagccaaggtcgcatcattgcactccagcctggggggctgagcaagactccgtctcgg

SEQ ID NO: 9436 - protein, 272 aa, Homo sapiens
MPFNGEKQCVGEDQPSDSDSSRFSESMASLSDYECSRQSFASDSSSKSSSPASTSPPRVVTFDEVMATARNLSNLTLAHEIAVNENFQLKQEALPEKSLAGRVKHIVHQAFWDVLDSELNADPPEFEHAIKLFEEIREILLSFLTPGGNRLRNQICEVLDTDLIRQQAEHSAVDIQGLANYVISTMGKLCAPVRDNDIRELKATGNIVEVLRQIFHVLDLMQMDMANFTIMSLRPHLQRQLVEYERTKFQEILEETPSEYNIMCIYIEIRLK

SEQ ID NO: 9437 - DNA, 1494 bp, Homo sapiens
ccgcgttgggggggacactggggctgggggggtttgttgggctggtgagttttcgaggtgactgtgctgtgctcggtgaggggacgcccagagagccctgacccggggtcactccgtcgccgttctcctcttgtctacgtgctggacccggtgctacctttttacccacacttaagtgacgcaaaatgcccttcaatggcgagaagcagtgtgtgggagaggaccagccaagcgattctgattcttcccggttttccgaaagcatggcttcgctcagtgactatgaatgctccaggcagagctttgcaagtgactcctccagcaaatccagctctcctgcttcaacaagccctccaagggttgtaacatttgatgaagtgatggctacagcaaggaacttatcaaacttgactcttgctcatgagattgctgtaaatgagaactttcaattgaaacaagaggctctcccagaaaagagtttggctggtcgagtgaagcacattgttcaccaggccttctgggacgtcttggattcagaactaaatgctgaccctcctgagtttgaacatgccatcaaactgtttgaagaaatcagagagattcttctctcttttctcactcccggtggcaaccggcttcgcaaccaaatctgtgaagttttggacacagacctcattaggcagcaggctgagcacagtgctgttgacatccaaggcctggccaactatgtcatcagtacgatgggaaagctgtgtgctcccgtgcgagataatgatatcagagagttaaaggctactggcaacatcgtggaggtgctgagacaaatattccatgtcctggacctcatgcaaatggacatggccaattttacaattatgagtctcagaccgcaccttcaacgccagttggtggaatatgagagaaccaagttccaggaaattttggaagaaactccaagaaaagccgaggttgcaggtgcctcatgaggctgaccttgcttttggaaccagagagagcagtcaccgtgccagcctgtgagagtgaagtctctgccgatccctaagagaagagccaacgtttcactctaaacgcatgctccttctgctttaccggtcattctcaagtctgactacaaattagaatcatctggggcgtttaaacacagaggcctgagccctgcctcagacagaataaatcaaagtctccaggagctgtgcccatgaactctttttttcctttttaaagctccccaggtgattctaaagtcagccaggattgagaaccactatgccacactgttgcttttgttcaaggtaactaaatgggctcttaaatgtgtcagctgtaaatgattaaacttgcagtataaatgcttattactgccacattgtaattatattcacgatgatttccactcgcgctctctcagttggatgtcttttaaatgaaagactgcaagtcttttacatctttataaaacagaactagcaaacc

SEQ ID NO: 9438 - protein, 266 aa, Homo sapiens
MPFNGEKQCVGEDQPSDSDSSRFSESMASLSDYECSRQSFASDSSSKSSSPASTSPPRVVTFDEVMATARNLSNLTLAHEIAVNENFQLKQEALPEKSLAGRVKHIVHQAFWDVLDSELNADPPEFEHAIKLFEEIREILLSFLTPGGNRLRNQICEVLDTDLIRQQAEHSAVDIQGLANYVISTMGKLCAPVRDNDIRELKATGNIVEVLRQIFHVLDLMQMDMANFTIMSLRPHLQRQLVEYERTKFQEILEETPRKAEVAGAS

SEQ ID NO: 9439 - DNA, 2227 bp, Homo sapiens
ccgcgttgggggggacactggggctgggggggtttgttgggctggtgagttttcgaggtgactgtgctgtgctcggtgaggggacgcccagagagccctgacccggggtcactccgtcgccgttctcctcttgtctacgtgctggacccggtgctacctttttacccacacttaagtgacgcaaaatgcccttcaatggcgagaagcagtgtgtgggagaggaccagccaagcgattctgattcttcccggttttccgaaagcatggcttcgctcagtgactatgaatgctccaggcagagctttgcaagtgactcctccagcaaatccagctctcctgcttcaacaagccctccaagggttgtaacatttgatgaagtgatggctacagcaaggaacttatcaaacttgactcttgctcatgagattgctgtaaatgagaactttcaattgaaacaagaggctctcccagaaaagagtttggctggtcgagtgaagcacattgttcaccaggccttctgggacgtcttggattcagaactaaatgctgaccctcctgagtttgaacatgccatcaaactgtttgaagaaatcagagagattcttctctcttttctcactcccggtggcaaccggcttcgcaaccaaatctgtgaagttttggacacagacctcattaggcagcaggctgagcacagtgctgttgacatccaaggcctggccaactatgtcatcagtacgatgggaaagctgtgtgctcccgtgcgagataatgatatcagagagttaaaggctactggcaacatcgtggaggtgctgagacaaatattccatgtcctggacctcatgcaaatggacatggccaattttacaattatgagtctcagaccgcaccttcaacgccagttggtggaatatgagagaaccaagttccaggaaattttggaagaaactccaagtgctcttgatcagactacagaatggataaaagaatctgtaaatgaagaattattttctctttctgagagtgctttaactcctggggccgaaaatacctccaagccaagcctgagccctactttggtgctaaataatagttacttgaaactgttacagtgggattatcagaaaaaagaattaccagagacacttatgacagatggagcacgtcttcaggaactaacagaaaagctgaatcaattgaaaattattgcctgcctgtccctaattaccaacaacatggtgggtgctattacaggaggcctgcctgagcttgcaagcaggttaacaaggatttcagctgttctacttgaaggcatgaacaaagagacctttaacttgaaggaagtcctgaattctattggtattcagacttgtgttgaggttaacaagaccctgatggaaagaggtttacccactttaaatgctgagattcaagctaatcttataggtcaattttcaagcattgaagaggaggacaatcctatctggtccttgattgataaacgaattaagctttacatgagaaggctactttgtcttccaagccctcaaaaatgcatgcctcctatgccaggaggcctagctgtcattcagcaggagctagaagccctaggctctcaatatgcaaacattgtgaatctcaacaaacaagtgtatggaccattttatgcaaatatacttcgaaagctgctcttcaatgaggaagccatggggaaggtagatgcttcacctcctactaactaaagaagaactgacattggacgagagattggaaatccagtactttggtatccagtccacttccattgatggcattagagatccagcacattctcagtactgtggtgcagtattagcccaaatctgtgtaatgggtaatattagcattacagaagacacacacatcacatagaccctcagaagacgtaaacatcacatagaccctatttgtgcatcattttcaagtttaaaacaaatatttgtaatgaacagaaaacaatttgtaattaattatattacctatataatacttgtaaatgttttcttaaccatttatatttggcttatgacatttaacccctaaggagttgtttttctcacttgttattatcaaacctaatggtttttaattttggtacaactccttaaagggttgaaggttgtgacaataactgagggaactgatgttctgaataaatgatgtgaagtaaacacaattgtatttg

SEQ ID NO: 9440 - protein, 519 aa, Homo sapiens; identical to SEQ ID NO: 1453

SEQ ID NO: 9441 - DNA, 544 bp, Homo sapiens
tggcactcaaacgacttaagtttgggaaatcttagatggttgtcctgctaccttaactgtgaagaaactggacaagttgtccttgtccccagtgggtgtctcagcacccatggtcaccagcccagtcagggactttgctcttcttacctgccaacggataatgagttaatctcagtggttcccacttgaggaggctccctgccgtggtccttttcctctcttctctagggatttcatgcatcaccctgacagccagtggaagttgcctgatttgaagaggcccagggccgaagatacccagtcatgtgtggaagcagcttcaatgccattttgtgagaggttgagggccccagagggggaagcacagtgacctgctatcgtgttggaggctttgcttggagtcatcttcagtcttttctgttgactttacctttgaccagtgattaaatcctccaggtgctacctttttacccacacttaagtgacgcaaaatgcccttcaatggcgagaagcagtgtgtgggagaggaccagccaagcgattc

SEQ ID NO: 9442 - protein, 44 aa, Homo sapiens
MHHPDSQWKLPDLKRPRAEDTQSCVEAASMPFCERLRAPEGEAQ

SEQ ID NO: 9443 - DNA, 4219 bp, Homo sapiens
agattcgggcagggagcgggcggaacctttctaccgcgtctctagctaacacgcacggcggggacagtttaggcctccgcgcaccgttcgccgggagtcttgcagtttgcttggtgcagggaaggcgggcgcggaggttctatctgtttcttcctccttcgtgagcagcatggacgtgctagcggaggagtttgggaacctgactccggagcagctggcggcgccgatcccgactgtagaggaaaaatggaggctgcttccagcatttttaaaggtgaaaggccttgtgaaacagcatatagattcatttaactatttcattaatgtagagataaagaagataatgaaagccaatgaaaaggttacaagtgacgctgaccctatgtggtacttaaaatatcttaatatctatgttgggcttcctgatgttgaagaaagcttcaatgtaactagaccagtgtcccctcatgagtgccgtttgagagacatgacatactctgcccctattacagtggatattgaatatacccgaggcagccagaggatcatccgcaatgccttacctatcggcagaatgcccataatgctacgtagttcaaactgtgttcttacaggaaaaacgccagcagaatttgccaaactgaacgaatgtcccttagatccaggtggctacttcattgttaaaggagtagaaaaagttattcttatccaagagcagctgtctaagaacaggatcatcgtggaggctgatagaaaaggggctgttggagcttcagttaccagctctacccatgagaaaaaaagcagaaccaatatggctgtgaaacaaggacgattttatttgaggcataatactttgtcagaagatatacccattgtcatcatatttaaggccatgggtgttgagagtgaccaggaaattgtgcagatgattggaacagaggagcacgtgatggctgcatttgggcccagtctggaagagtgccagaaagctcagattttcacacagatgcaggcattaaaatatatagggaacaaagtaagaaggcaaaggatgtggggaggtggaccaaagaaaaccaaaatagaagaagcaagagagctcctggcttccaccattctgacccatgtcccagttaaggaattcaatttccgagccaaatgtatctatactgcagtgatggtgcgaagagttattctggcccaaggagataataaagttgacgacagagattattatggtaacaagcgactggaattggcaggacagcttttatctcttctttttgaagacttgttcaaaaaatttaattctgaaatgaaaaagattgccgaccaggtgattcctaagcaaagagcagcccagtttgatgttgtcaaacacatgcgccaagaccagatcaccaatggcatggtgaatgctatttctaccggaaattggtctttaaagagatttaaaatggaccgccagggtgtaacccaagtgctgtctcgcttgtcatatatatccgcactgggcatgatgacaagaatctcttcccagtttgaaaaaacgagaaaagtgagtggtcctcgctccctccagccatctcagtggggaatgctgtgtccttcggacactcctgaaggagaggcatgtggtttggttaaaaacttggcccttatgacacacatcacaactgatatggaagatggacccattgttaaattagccagtaacttgggagtagaagatgtgaatttattatgtggggaagagctctcttacccaaatgtgtttcttgtctttcttaatggtaacatcttaggtgtcattcgagaccacaaaaagctagtgaatacatttcgactcatgagaagagcaggatatatcaatgaatttgtttccatctcaacaaatcttacagatcgatgtgtctatatttcttctgatgggggaaggctatgcagaccctacataattgtcaagaaacagaagccagcagtcacaaataaacatatggaagagctggcccaagggtacaggaattttgaagatttcttacatgagagtctggttgaatatttagatgtgaatgaagaaaatgattgtaacattgcactgtacgaacacacaattaataaagacaccacccacttggagattgaacccttcactcttctcggcgtgtgtgctggacttatcccataccctcaccataaccagtcaccgagaaacacttatcagtgtgccatggggaaacaagccatgggtactataggatacaaccagcgaaacagaattgatactctcatgtatctactagcatatccacaaaaacccatggttaagacaaaaaccattgaattgatagaatttgagaaactgccagctggacagaatgcaacagttgctgtgatgagctatagtggctatgatattgaagatgctcttgttttaaacaaggcctctttagacagaggctttgggcgttgccttgtatataaaaatgctaaatgtacgttgaaacgatacaccaatcagacttttgataaagtgatggggcccatgttggatgctgctacaaggaaacctatctggcgacatgaaatcttagatgcagatggtatttgttctccaggtgagaaagtagaaaacaaacaagtgcttgtaaataagtccatgcccacagtgactcagattcctttggaaggaagtaatgtaccacagcaaccacagtacaaagatgtacccataacctacaaaggagcaacagactcatatattgaaaaagtgatgatatcttcaaatgctgaagatgcttttctgatcaaaatgctgctgagacagacaaggcgtccagaaattggagacaaattcagcagtcgtcatgggcaaaaaggtgtttgtggcttgatcgtcccccaggaagacatgccattttgtgattctggcatctgtccggacatcatcatgaacccacacggcttcccatcacgaatgacggtggggaagctcattgagctgctggctggcaaggccggtgtgctggacggcagattccactacggcactgcgtttggaggcagtaaagtgaaggatgtgtgtgaggacctcgttcgccatggttataactacttggggaaagactatgttacatccggcatcacaggtgagcccttagaagcatacatctattttggccccgtgtactatcagaagctgaaacacatggtgctagataaaatgcatgcccgggcccggggcccacgagccgtccttaccaggcaacccactgaaggacggtctcgtgatggtggcttgcgtctcggggaaatggaacgtgactgtttaatcggttatggagccagtatgcttttgctagagagactaatgatttcaagtgatgcctttgaggttgatgtctgtgggcagtgtggacttctggggtattctggctggtgccattactgcaagtcatcctgccacgtgtcttccctccgtattccgtatgcctgcaagctgctcttccaggaactacagtctatgaacatcatccccaggttaaaactgtccaagtacaatgaatgaggatggaaaaaatgattattaaagagaacaagtgatacatccaatgcaacggaaagcagaagggatttaggactacgtctcctcctgtgaagaattcccttgcgtattctctctctaaaacaaccaaaaaaaaatggagaggctttttatatactctaagactggctaaacaaccttgatcattgagcctcgagccatgggagagatgctgaccatgtggactgcaaggctgcttgattcacagatggatgtgacctaaaggataaataagctattacttatgtgctgatctcttgacattcactcattagaagaccttactccttcaagcaaatgtttggggtcaaatttaccatatcttctggctaaccatattcaagattcttctgaaacttggaggatgtaaagaatccatttgatttggtcagcctggcttttgtcgtggtggctggctcggataaattttcccaacaattaaatcttgcctttacacacccaaactttgtaattttagtcttggtgaaatataatgaatttgttcctaccttgtcaagcaagaatgtcgtcttctcctatggactcaattgctattattttaaacctgcatgattgtaccatgcaatactattcgttaaatatctgaatcta

SEQ ID NO: 9444 - protein, 1133 aa, Homo sapiens
MDVLAEEFGNLTPEQLAAPIPTVEEKWRLLPAFLKVKGLVKQHIDSFNYFINVEIKKIMKANEKVTSDADPMWYLKYLNIYVGLPDVEESFNVTRPVSPHECRLRDMTYSAPITVDIEYTRGSQRIIRNALPIGRMPIMLRSSNCVLTGKTPAEFAKLNECPLDPGGYFIVKGVEKVILIQEQLSKNRIIVEADRKGAVGASVTSSTHEKKSRTNMAVKQGRFYLRHNTLSEDIPIVIIFKAMGVESDQEIVQMIGTEEHVMAAFGPSLEECQKAQIFTQMQALKYIGNKVRRQRMWGGGPKKTKIEEARELLASTILTHVPVKEFNFRAKCIYTAVMVRRVILAQGDNKVDDRDYYGNKRLELAGQLLSLLFEDLFKKFNSEMKKIADQVIPKQRAAQFDVVKHMRQDQITNGMVNAISTGNWSLKRFKMDRQGVTQVLSRLSYISALGMMTRISSQFEKTRKVSGPRSLQPSQWGMLCPSDTPEGEACGLVKNLALMTHITTDMEDGPIVKLASNLGVEDVNLLCGEELSYPNVFLVFLNGNILGVIRDHKKLVNTFRLMRRAGYINEFVSISTNLTDRCVYISSDGGRLCRPYIIVKKQKPAVTNKHMEELAQGYRNFEDFLHESLVEYLDVNEENDCNIALYEHTINKDTTHLEIEPFTLLGVCAGLIPYPHHNQSPRNTYQCAMGKQAMGTIGYNQRNRIDTLMYLLAYPQKPMVKTKTIELIEFEKLPAGQNATVAVMSYSGYDIEDALVLNKASLDRGFGRCLVYKNAKCTLKRYTNQTFDKVMGPMLDAATRKPIWRHEILDADGICSPGEKVENKQVLVNKSMPTVTQIPLEGSNVPQQPQYKDVPITYKGATDSYIEKVMISSNAEDAFLIKMLLRQTRRPEIGDKFSSRHGQKGVCGLIVPQEDMPFCDSGICPDIIMNPHGFPSRMTVGKLIELLAGKAGVLDGRFHYGTAFGGSKVKDVCEDLVRHGYNYLGKDYVTSGITGEPLEAYIYFGPVYYQKLKHMVLDKMHARARGPRAVLTRQPTEGRSRDGGLRLGEMERDCLIGYGASMLLLERLMISSDAFEVDVCGQCGLLGYSGWCHYCKSSCHVSSLRIPYACKLLFQELQSMNIIPRLKLSKYNE

SEQ ID NO: 9445 - DNA, 4036 bp, Homo sapiens
gcaccgttcgccgggagtcttgcagtttgcttggtgcagggaaggcgggcgcggaggttctatctgtttcttcctccttcgtgagcagcatggacgtgctagcggaggagtttgggaacctgactccggagcagctggcggcgccgatcccgactgtagaggaaaaatggaggctgcttccagcatttttaaaggtgaaaggccttgtgaaacagcatatagattcatttaactatttcattaatgtagagataaagaagataatgaaagccaatgaaaaggttacaagtgacgctgaccctatgtggtacttaaaatatcttaatatctatgttgggcttcctgatgttgaagaaagcttcaatgtaactagaccagtgtcccctcatgagtgccgtttgagagacatgacatactctgcccctattacagtggatattgaatatacccgaggcagccagaggatcatccgcaatgccttacctatcggcagaatgcccataatgctacgtagttcaaactgtgttcttacaggaaaaacgccagcagaatttgccaaactgaacgaatgtcccttagatccaggtggctacttcattgttaaaggagtagaaaaagttattcttatccaagagcagctgtctaagaacaggatcatcgtggaggctgatagaaaaggggctgttggagcttcagttaccagctctacccatgagaaaaaaagcagaaccaatatggctgtgaaacaaggacgattttatttgaggcataatactttgtcagaagatatacccattgtcatcatatttaaggccatgggtgttgagagtgaccaggaaattgtgcagatgattggaacagaggagcacgtgatggctgcatttgggcccagtctggaagagtgccagaaagctcagattttcacacagatgcaggcattaaaatatatagggaacaaagtaagaaggcaaaggatgtggggaggtggaccaaagaaaaccaaaatagaagaagcaagagagctcctggcttccaccattctgacccatgtcccagttaaggaattcaatttccgagccaaatgtatctatactgcagtgatggtgcgaagagttattctggcccaaggagataataaagttgacgacagagattattatggtaacaagcgactggaattggcaggacagcttttatctcttctttttgaagacttgttcaaaaaatttaattctgaaatgaaaaagattgccgaccaggtgattcctaagcaaagagcagcccagtttgatgttgtcaaacacatgcgccaagaccagatcaccaatggcatggtgaatgctatttctaccggaaattggtctttaaagagatttaaaatggaccgccagggtgtaacccaagtgctgtctcgcttgtcatatatatccgcactgggcatgatgacaagaatctcttcccagtttgaaaaaacgagaaaagtgagtggtcctcgctccctccagccatctcagtggggaatgctgtgtccttcggacactcctgaaggagaggcatgtggtttggttaaaaacttggcccttatgacacacatcacaactgatatggaagatggacccattgttaaattagccagtaacttgggagtagaagatgtgaatttattatgtggggaagagctctcttacccaaatgtgtttcttgtctttcttaatggtaacatcttaggtgtcattcgagaccacaaaaagctagtgaatacatttcgactcatgagaagagcaggatatatcaatgaatttgtttccatctcaacaaatcttacagatcgatgtgtctatatttcttctgatgggggaaggctatgcagaccctacataattgtcaagaaacagaagccagcagtcacaaataaacatatggaagagctggcccaagggtacaggaattttgaagatttcttacatgagagtctggttgaatatttagatgtgaatgaagaaaatgattgtaacattgcactgtacgaacacacaattaataaagacaccacccacttggagattgaacccttcactcttctcggcgtgtgtgctggacttatcccataccctcaccataaccagtcaccgagaaacacttatcagtgtgccatggggaaacaagccatgggtactataggatacaaccagcgaaacagaattgatactctcatgtatctactagcatatccacaaaaacccatggttaagacaaaaaccattgaattgatagaatttgagaaactgccagctggacagaatgcaacagttgctgtgatgagctatagtggctatgatattgaagatgctcttgttttaaacaaggcctctttagacagaggctttgggcgttgccttgtatataaaaatgctaaatgtacgttgaaacgatacaccaatcagacttttgataaagtgatggggcccatgttggatgctgctacaaggaaacctatctggcgacatgaaatcttagatgcagatggtatttgttctccaggtgagaaagtagaaaacaaacaagtgcttgtaaataagtccatgcccacagtgactcagattcctttggaaggaagtaatgtaccacagcaaccacagtacaaagatgtacccataacctacaaaggagcaacagactcatatattgaaaaagtgatgatatcttcaaatgctgaagatgcttttctgatcaaaatgctgctgagacagacaaggcgtccagaaattggagacaaattcagcagtcgtcatgggcaaaaaggtgtttgtggcttgatcgtcccccaggaagacatgccattttgtgattctggcatctgtccggacatcatcatgaacccacacggcttcccatcacgaatgacggtggggaagctcattgagctgctggctggcaaggccggtgtgctggacggcagattccactacggcactgcgtttggaggcagtaaagtgaaggatgtgtgtgaggacctcgttcgccatggttataactacttggggaaagactatgttacatccggcatcacaggtgagcccttagaagcatacatctattttggccccgtgtactatcagaagctgaaacacatggtgctagataaaatgcatgcccgggcccggggcccacgagccgtccttaccaggcaacccactgaaggacggtctcgtgatggtggcttgcgtctcggggaaatggaacgtgactgtttaatcggttatggagccagtatgcttttgctagagagactaatgatttcaagtgatgcctttgaggttgatgtctgtgggcagtgtggacttctggggtattctggctggtgccattactgcaagtcatcctgccacgtgtcttccctccgtattccgtatgcctgcaagctgctcttccaggaactacagtctatgaacatcatccccaggttaaaactgtccaagtacaatgaatgaggatggaaaaaatgattattaaagagaacaagtgatacatccaatgcaacggaaagcagaagggatttaggactacgtctcctcctgtgaagaattcccttgcgtattctctctctaaaacaaccaaaaaaaaatggagaggctttttatatactctaagactggctaaacaaccttgatcattgagcctcgagccatgggagagatgctgaccatgtggactgcaaggctgcttgattcacagatggatgtgacctaaaggataaataagctattacttatgtgctgatctcttgacattcactcattagaagaccttactccttcaagcaaatgtttggggtcaaatttaccatatcttctggctaaccatattcaagattcttctgaaacttggaggatgtaaagaatccatttgatttggtcagcctggcttttgtcgtggtggctggctcggataaattttcccaacaattaaatcttgcctttacacacccaaactttgtaattttagtcttggtgaaatataatgaatttgttcctac

SEQ ID NO: 9446 - protein, 1133 aa, Homo sapiens; identical to SEQ ID NO: 9444

SEQ ID NO: 9447 - DNA, 4091 bp, Homo sapiens
ccagagccggcctccgcgtgcgcgagtgaaggctgatcccagaggagctgtcagccgctgcgggggccgagaagccccgctgctggctctagggttggagctcttccagcataggaaaaatggaggctgcttccagcatttttaaaggtgaaaggccttgtgaaacagcatatagattcatttaactatttcattaatgtagagataaagaagataatgaaagccaatgaaaaggttacaagtgacgctgaccctatgtggtacttaaaatatcttaatatctatgttgggcttcctgatgttgaagaaagcttcaatgtaactagaccagtgtcccctcatgagtgccgtttgagagacatgacatactctgcccctattacagtggatattgaatatacccgaggcagccagaggatcatccgcaatgccttacctatcggcagaatgcccataatgctacgtagttcaaactgtgttcttacaggaaaaacgccagcagaatttgccaaactgaacgaatgtcccttagatccaggtggctacttcattgttaaaggagtagaaaaagttattcttatccaagagcagctgtctaagaacaggatcatcgtggaggctgatagaaaaggggctgttggagcttcagttaccagctctacccatgagaaaaaaagcagaaccaatatggctgtgaaacaaggacgattttatttgaggcataatactttgtcagaagatatacccattgtcatcatatttaaggccatgggtgttgagagtgaccaggaaattgtgcagatgattggaacagaggagcacgtgatggctgcatttgggcccagtctggaagagtgccagaaagctcagattttcacacagatgcaggcattaaaatatatagggaacaaagtaagaaggcaaaggatgtggggaggtggaccaaagaaaaccaaaatagaagaagcaagagagctcctggcttccaccattctgacccatgtcccagttaaggaattcaatttccgagccaaatgtatctatactgcagtgatggtgcgaagagttattctggcccaaggagataataaagttgacgacagagattattatggtaacaagcgactggaattggcaggacagcttttatctcttctttttgaagacttgttcaaaaaatttaattctgaaatgaaaaagattgccgaccaggtgattcctaagcaaagagcagcccagtttgatgttgtcaaacacatgcgccaagaccagatcaccaatggcatggtgaatgctatttctaccggaaattggtctttaaagagatttaaaatggaccgccagggtgtaacccaagtgctgtctcgcttgtcatatatatccgcactgggcatgatgacaagaatctcttcccagtttgaaaaaacgagaaaagtgagtggtcctcgctccctccagccatctcagtggggaatgctgtgtccttcggacactcctgaaggagaggcatgtggtttggttaaaaacttggcccttatgacacacatcacaactgatatggaagatggacccattgttaaattagccagtaacttgggagtagaagatgtgaatttattatgtggggaagagctctcttacccaaatgtgtttcttgtctttcttaatggtaacatcttaggtgtcattcgagaccacaaaaagctagtgaatacatttcgactcatgagaagagcaggatatatcaatgaatttgtttccatctcaacaaatcttacagatcgatgtgtctatatttcttctgatgggggaaggctatgcagaccctacataattgtcaagaaacagaagccagcagtcacaaataaacatatggaagagctggcccaagggtacaggaattttgaagatttcttacatgagagtctggttgaatatttagatgtgaatgaagaaaatgattgtaacattgcactgtacgaacacacaattaataaagacaccacccacttggagattgaacccttcactcttctcggcgtgtgtgctggacttatcccataccctcaccataaccagtcaccgagaaacacttatcagtgtgccatggggaaacaagccatgggtactataggatacaaccagcgaaacagaattgatactctcatgtatctactagcatatccacaaaaacccatggttaagacaaaaaccattgaattgatagaatttgagaaactgccagctggacagaatgcaacagttgctgtgatgagctatagtggctatgatattgaagatgctcttgttttaaacaaggcctctttagacagaggctttgggcgttgccttgtatataaaaatgctaaatgtacgttgaaacgatacaccaatcagacttttgataaagtgatggggcccatgttggatgctgctacaaggaaacctatctggcgacatgaaatcttagatgcagatggtatttgttctccaggtgagaaagtagaaaacaaacaagtgcttgtaaataagtccatgcccacagtgactcagattcctttggaaggaagtaatgtaccacagcaaccacagtacaaagatgtacccataacctacaaaggagcaacagactcatatattgaaaaagtgatgatatcttcaaatgctgaagatgcttttctgatcaaaatgctgctgagacagacaaggcgtccagaaattggagacaaattcagcagtcgtcatgggcaaaaaggtgtttgtggcttgatcgtcccccaggaagacatgccattttgtgattctggcatctgtccggacatcatcatgaacccacacggcttcccatcacgaatgacggtggggaagctcattgagctgctggctggcaaggccggtgtgctggacggcagattccactacggcactgcgtttggaggcagtaaagtgaaggatgtgtgtgaggacctcgttcgccatggttataactacttggggaaagactatgttacatccggcatcacaggtgagcccttagaagcatacatctattttggccccgtgtactatcagaagctgaaacacatggtgctagataaaatgcatgcccgggcccggggcccacgagccgtccttaccaggcaacccactgaaggacggtctcgtgatggtggcttgcgtctcggggaaatggaacgtgactgtttaatcggttatggagccagtatgcttttgctagagagactaatgatttcaagtgatgcctttgaggttgatgtctgtgggcagtgtggacttctggggtattctggctggtgccattactgcaagtcatcctgccacgtgtcttccctccgtattccgtatgcctgcaagctgctcttccaggaactacagtctatgaacatcatccccaggttaaaactgtccaagtacaatgaatgaggatggaaaaaatgattattaaagagaacaagtgatacatccaatgcaacggaaagcagaagggatttaggactacgtctcctcctgtgaagaattcccttgcgtattctctctctaaaacaaccaaaaaaaaatggagaggctttttatatactctaagactggctaaacaaccttgatcattgagcctcgagccatgggagagatgctgaccatgtggactgcaaggctgcttgattcacagatggatgtgacctaaaggataaataagctattacttatgtgctgatctcttgacattcactcattagaagaccttactccttcaagcaaatgtttggggtcaaatttaccatatcttctggctaaccatattcaagattcttctgaaacttggaggatgtaaagaatccatttgatttggtcagcctggcttttgtcgtggtggctggctcggataaattttcccaacaattaaatcttgcctttacacacccaaactttgtaattttagtcttggtgaaatataatgaatttgttcctaccttgtcaagcaagaatgtcgtcttctcctatggactcaattgctattattttaaacctgcatgattgtaccatgcaatactattcgttaaatatctgaatct

SEQ ID NO: 9448 - protein, 1075 aa, Homo sapiens
MKANEKVTSDADPMWYLKYLNIYVGLPDVEESFNVTRPVSPHECRLRDMTYSAPITVDIEYTRGSQRIIRNALPIGRMPIMLRSSNCVLTGKTPAEFAKLNECPLDPGGYFIVKGVEKVILIQEQLSKNRIIVEADRKGAVGASVTSSTHEKKSRTNMAVKQGRFYLRHNTLSEDIPIVIIFKAMGVESDQEIVQMIGTEEHVMAAFGPSLEECQKAQIFTQMQALKYIGNKVRRQRMWGGGPKKTKIEEARELLASTILTHVPVKEFNFRAKCIYTAVMVRRVILAQGDNKVDDRDYYGNKRLELAGQLLSLLFEDLFKKFNSEMKKIADQVIPKQRAAQFDVVKHMRQDQITNGMVNAISTGNWSLKRFKMDRQGVTQVLSRLSYISALGMMTRISSQFEKTRKVSGPRSLQPSQWGMLCPSDTPEGEACGLVKNLALMTHITTDMEDGPIVKLASNLGVEDVNLLCGEELSYPNVFLVFLNGNILGVIRDHKKLVNTFRLMRRAGYINEFVSISTNLTDRCVYISSDGGRLCRPYIIVKKQKPAVTNKHMEELAQGYRNFEDFLHESLVEYLDVNEENDCNIALYEHTINKDTTHLEIEPFTLLGVCAGLIPYPHHNQSPRNTYQCAMGKQAMGTIGYNQRNRIDTLMYLLAYPQKPMVKTKTIELIEFEKLPAGQNATVAVMSYSGYDIEDALVLNKASLDRGFGRCLVYKNAKCTLKRYTNQTFDKVMGPMLDAATRKPIWRHEILDADGICSPGEKVENKQVLVNKSMPTVTQIPLEGSNVPQQPQYKDVPITYKGATDSYIEKVMISSNAEDAFLIKMLLRQTRRPEIGDKFSSRHGQKGVCGLIVPQEDMPFCDSGICPDIIMNPHGFPSRMTVGKLIELLAGKAGVLDGRFHYGTAFGGSKVKDVCEDLVRHGYNYLGKDYVTSGITGEPLEAYIYFGPVYYQKLKHMVLDKMHARARGPRAVLTRQPTEGRSRDGGLRLGEMERDCLIGYGASMLLLERLMISSDAFEVDVCGQCGLLGYSGWCHYCKSSCHVSSLRIPYACKLLFQELQSMNIIPRLKLSKYNE

SEQ ID NO: 9449 - DNA, 7682 bp, Homo sapiens
cagctagcaggcttagattcaggccctcagcaaacaaggaacctggaaaatgtaaccctgaatgcacggtggggaggacatggcaagagaaaagcggcaggaataaagtgattttctgaatggtcttgcttctttgtctatcttgtctgattttctcctgtctgaccttttcctggttaaaaatctgggggaaaatgacggactccaagccgatcaccaagagtaaatcagaagcaaacctcatcccgagccaggagccctttccagcctctgataactcaggggagacaccgcagagaaatggggagggccacactctgcccaagacacccagccaggccgagccagcctcccacaaaggccccaaagatgccggtcggcggagaaactccctaccaccctcccaccagaagcccccaagaaaccccctttcttccagtgacgcagcaccctccccagagcttcaagccaacgggactgggacacaaggtctggaggccacagataccaatggcctgtcctcctcagccaggccccagggccagcaagctggctccccctccaaagaagacaagaagcaggcaaacatcaagaggcagctgatgaccaacttcatcctgggctcttttgatgactactcctccgacgaggactctgttgctggctcatctcgtgagtctacccggaagggcagccgggccagcttgggggccctgtccctggaggcttatctgaccacaggtgaagctgagacccgcgtccccactatgaggccgagcatgtcgggactccacctggtgaagaggggacgggaacacaagaagctggacctgcacagagactttaccgtggcttctcccgctgagtttgtcacacgctttgggggggatcgggtcatcgagaaggtgcttattgccaacaacgggattgccgccgtgaagtgcatgcgctccatccgcaggtgggcctatgagatgttccgcaacgagcgggccatccggtttgttgtgatggtgacccccgaggaccttaaggccaacgcagagtacatcaagatggcggatcattacgtccccgtcccaggagggcccaataacaacaactatgccaacgtggagctgattgtggacattgccaagagaatccccgtgcaggcggtgtgggctggctggggccatgcttcagaaaaccctaaacttccggagctgctgtgcaagaatggagttgctttcttaggccctcccagtgaggccatgtgggccttaggagataagatcgcctccaccgttgtcgcccagacgctacaggtcccaaccctgccctggagtggaagcggcctgacagtggagtggacagaagatgatctgcagcagggaaaaagaatcagtgtcccagaagatgtttatgacaagggttgcgtgaaagacgtagatgagggcttggaggcagcagaaagaattggttttccattgatgatcaaagcttctgaaggtggcggagggaagggaatccggaaggctgagagtgcggaggacttcccgatccttttcagacaagtacagagtgagatcccaggctcgcccatctttctcatgaagctggcccagcacgcccgtcacctggaagttcagatcctcgctgaccagtatgggaatgctgtgtctctgtttggtcgcgactgctccatccagcggcggcatcagaagatcgttgaggaagcaccggccaccatcgccccgctggccatattcgagttcatggagcagtgtgccatccgcctggccaagaccgtgggctatgtgagtgcagggacagtggaatacctctatagtcaggatggcagcttccacttcttggagctgaatcctcgcttgcaggtggaacatccctgcacagaaatgattgctgatgttaatctgccggccgcccagctacagatcgccatgggcgtgccactgcaccggctgaaggatatccggcttctgtatggagagtcaccatggggagtgactcccatttcttttgaaaccccctcaaaccctcccctcgcccgaggccacgtcattgccgccagaatcaccagcgaaaacccagacgagggttttaagccgagctccgggactgtccaggaactgaatttccggagcagcaagaacgtgtggggttacttcagcgtggccgctactggaggcctgcacgagtttgcggattcccaatttgggcactgcttctcctggggagagaaccgggaagaggccatttcgaacatggtggtggctttgaaggaactgtccatccgaggcgactttaggactaccgtggaatacctcattaacctcctggagaccgagagcttccagaacaacgacatcgacaccgggtggttggactacctcattgctgagaaagtgcaggcggagaaaccggatatcatgcttggggtggtatgcggggccttgaacgtggccgatgcgatgttcagaacgtgcatgacagatttcttacactccctggaaaggggccaggtcctcccagcggattcactactgaacctcgtagatgtggaattaatttacggaggtgttaagtacattctcaaggtggcccggcagtctctgaccatgttcgttctcatcatgaatggctgccacatcgagattgatgcccaccggctgaatgatggggggctcctgctctcctacaatgggaacagctacaccacctacatgaaggaagaggttgacagttaccgaattaccatcggcaataagacgtgtgtgtttgagaaggagaacgatcctacagtcctgagatccccctcggctgggaagctgacacagtacacagtggaggatgggggccacgttgaggctgggagcagctacgctgagatggaggtgatgaagatgatcatgaccctgaacgttcaggaaagaggccgggtgaagtacatcaagcgtccaggtgccgtgctggaagcaggctgcgtggtggccaggctggagctcgatgacccttctaaagtccacccggctgaaccgttcacaggagaactccctgcccagcagacactgcccatcctcggagagaaactgcaccaggtcttccacagcgtcctggaaaacctcaccaacgtcatgagtggcttttgtctgccagagcccgtttttagcataaagctgaaggagtgggtgcagaagctcatgatgaccctccggcacccgtcactgccgctgctggagctgcaggagatcatgaccagcgtggcaggccgcatccccgcccctgtggagaagtctgtccgcagggtgatggcccagtatgccagcaacatcacctcggtgctgtgccagttccccagccagcagatagccaccatcctggactgccatgcagccaccctgcagcggaaggctgatcgagaggtcttcttcatcaacacccagagcatcgtgcagttggtccagagataccgcagcgggatccgcggctatatgaaaacagtggtgttggatctcctgagaagatacttgcgtgttgagcaccattttcagcaagcccactacgacaagtgtgtgataaacctcagggagcagttcaagccagacatgtcccaggtgctggactgcatcttctcccacgcacaggtggccaagaagaaccagctggtgatcatgttgatcgatgagctgtgtggcccagacccttccctgtcggacgagctgatctccatcctcaacgagctcactcagctgagcaaaagcgagcactgcaaagtggccctcagagcccggcagatcctgattgcctcccacctcccctcctacgagctgcggcataaccaggtggagtccattttcctgtctgccattgacatgtacggccaccagttctgccccgagaacctcaagaaattaatactttcggaaacaaccatcttcgacgtcctgcctactttcttctatcacgcaaacaaagtcgtgtgcatggcgtccttggaggtttacgtgcggaggggctacatcgcctatgagttaaacagcctgcagcaccggcagctcccggacggcacctgcgtggtagaattccagttcatgctgccgtcctcccacccaaaccggatgaccgtgcccatcagcatcaccaaccctgacctgctgaggcacagcacagagctcttcatggacagcggcttctccccactgtgccagcgcatgggagccatggtagccttcaggagattcgaggacttcaccagaaattttgatgaagtcatctcttgcttcgccaacgtgcccaaagacacccccctcttcagcgaggcccgcacctccctatactccgaggatgactgcaagagcctcagagaagagcccatccacattctgaatgtgtccatccagtgtgcagaccacctggaggatgaggcactggtgccgattttacggacattcgtacagtccaagaaaaatatccttgtggattatggactccgacgaatcacattcttgattgcccaagagaaagaatttcccaagtttttcacattcagagcaagagatgagtttgcagaagatcgcatttaccgtcacttggaacctgccctggccttccagctggaacttaaccggatgcgtaacttcgatctgaccgccgtgccctgtgccaaccacaagatgcacctttacctgggtgctgccaaggtgaaggaaggtgtggaagtgacggaccataggttcttcatccgcgccatcatcaggcactctgacctgatcacaaaggaagcctccttcgaatacctgcagaacgagggtgagcggctgctcctggaggccatggacgagctggaggtggcgttcaataacaccagcgtgcgcaccgactgcaaccacatcttcctcaacttcgtgcccactgtcatcatggaccccttcaagatcgaggagtccgtgcgctacatggttatgcgctacggcagccggctgtggaaactccgtgtgctacaggctgaggtcaagatcaacatccgccagaccaccaccggcagtgccgttcccatccgcctgttcatcaccaatgagtcgggctactacctggacatcagcctctacaaagaagtgactgactccagatctggaaatatcatgtttcactccttcggcaacaagcaagggccccagcacgggatgctgatcaatactccctacgtcaccaaggatctgctccaggccaagcgattccaggcccagaccctgggaaccacctacatctatgacttcccggaaatgttcaggcaggctctctttaaactgtggggctccccagacaagtatcccaaagacatcctgacatacactgaattagtgttggactctcagggccagctggtggagatgaaccgacttcctggtggaaatgaggtgggcatggtggccttcaaaatgaggtttaagacccaggagtacccggaaggacgggatgtgatcgtcatcggcaatgacatcacctttcgcattggatcctttggccctggagaggaccttctgtacctgcgggcatccgagatggcccgggcagagggcattcccaaaatttacgtggcagccaacagtggcgcccgtattggcatggcagaggagatcaaacacatgttccacgtggcttgggtggacccagaagacccccacaaaggatttaaatacctgtacctgactccccaagactacaccagaatcagctccctgaactccgtccactgtaaacacatcgaggaaggaggagagtccagatacatgatcacggatatcatcgggaaggatgatggcttgggcgtggagaatctgaggggctcaggcatgattgctggggagtcctctctggcttacgaagagatcgtcaccattagcttggtgacctgccgagccattgggattggggcctacttggtgaggctgggccagcgagtgatccaggtggagaattcccacatcatcctcacaggagcaagtgctctcaacaaggtcctgggaagagaggtctacacatccaacaaccagctgggtggcgttcagatcatgcattacaatggtgtctcccacatcaccgtgccagatgactttgagggggtttataccatcctggagtggctgtcctatatgccaaaggataatcacagccctgtccctatcatcacacccactgaccccattgacagagaaattgaattcctcccatccagagctccctacgacccccggtggatgcttgcaggaaggcctcacccaactctgaagggaacgtggcagagcggattctttgaccacggcagtttcaaggaaatcatggcaccctgggcgcagaccgtggtgacaggacgagcaaggcttggggggattcccgtgggagtgattgctgtggagacacggactgtggaggtggcagtccctgcagaccctgccaacctggattctgaggccaagataattcagcaggcaggacaggtgtggttcccagactcagcctacaaaaccgcccaggccgtcaaggacttcaaccgggagaagttgcccctgatgatctttgccaactggagggggttctccggtggcatgaaagacatgtatgaccaggtgctgaagtttggagcctacatcgtggacggccttagacaatacaaacagcccatcctgatctatatcccgccctatgcggagctccggggaggctcctgggtggtcatagatgccaccatcaacccgctgtgcatagaaatgtatgcagacaaagagagcaggggtggtgttctggaaccagaggggacagtggagattaagttccgaaagaaagatctgataaagtccatgagaaggatcgatccagcttacaagaagctcatggaacagctaggggaacctgatctctccgacaaggaccgaaaggacctggagggccggctaaaggctcgcgaggacctgctgctccccatctaccaccaggtggcggtgcagttcgccgacttccatgacacacccggccggatgctggagaagggcgtcatatctgacatcctggagtggaagaccgcacgcaccttcctgtattggcgtctgcgccgcctcctcctggaggaccaggtcaagcaggagatcctgcaggccagcggggagctgagtcacgtgcatatccagtccatgctgcgtcgctggttcgtggagacggagggggctgtcaaggcctacttgtgggacaacaaccaggtggttgtgcagtggctggaacagcactggcaggcaggggatggcccgcgctccaccatccgtgagaacatcacgtacctgaagcacgactctgtcctcaagaccatccgaggcctggttgaagaaaaccccgaggtggccgtggactgtgtgatatacctgagccagcacatcagcccagctgagcgggcgcaggtcgttcacctgctgtctaccatggacagcccggcctccacctgaccgtggcccgcccagccactcccgggaccacggcaaaaggaaccacccagacccaccacccgtacaccctcagcagaccctgaagacttgcttttaaacaaagaaaatcctgggcacttctgcagggctgctggttccgagctgacacccgtcttaacaaaaggcccaggagtgcctcttccaaac

SEQ ID NO: 9450 - protein, 2458 aa, Homo sapiens
MVLLLCLSCLIFSCLTFSWLKIWGKMTDSKPITKSKSEANLIPSQEPFPASDNSGETPQRNGEGHTLPKTPSQAEPASHKGPKDAGRRRNSLPPSHQKPPRNPLSSSDAAPSPELQANGTGTQGLEATDTNGLSSSARPQGQQAGSPSKEDKKQANIKRQLMTNFILGSFDDYSSDEDSVAGSSRESTRKGSRASLGALSLEAYLTTGEAETRVPTMRPSMSGLHLVKRGREHKKLDLHRDFTVASPAEFVTRFGGDRVIEKVLIANNGIAAVKCMRSIRRWAYEMFRNERAIRFVVMVTPEDLKANAEYIKMADHYVPVPGGPNNNNYANVELIVDIAKRIPVQAVWAGWGHASENPKLPELLCKNGVAFLGPPSEAMWALGDKIASTVVAQTLQVPTLPWSGSGLTVEWTEDDLQQGKRISVPEDVYDKGCVKDVDEGLEAAERIGFPLMIKASEGGGGKGIRKAESAEDFPILFRQVQSEIPGSPIFLMKLAQHARHLEVQILADQYGNAVSLFGRDCSIQRRHQKIVEEAPATIAPLAIFEFMEQCAIRLAKTVGYVSAGTVEYLYSQDGSFHFLELNPRLQVEHPCTEMIADVNLPAAQLQIAMGVPLHRLKDIRLLYGESPWGVTPISFETPSNPPLARGHVIAARITSENPDEGFKPSSGTVQELNFRSSKNVWGYFSVAATGGLHEFADSQFGHCFSWGENREEAISNMVVALKELSIRGDFRTTVEYLINLLETESFQNNDIDTGWLDYLIAEKVQAEKPDIMLGVVCGALNVADAMFRTCMTDFLHSLERGQVLPADSLLNLVDVELIYGGVKYILKVARQSLTMFVLIMNGCHIEIDAHRLNDGGLLLSYNGNSYTTYMKEEVDSYRITIGNKTCVFEKENDPTVLRSPSAGKLTQYTVEDGGHVEAGSSYAEMEVMKMIMTLNVQERGRVKYIKRPGAVLEAGCVVARLELDDPSKVHPAEPFTGELPAQQTLPILGEKLHQVFHSVLENLTNVMSGFCLPEPVFSIKLKEWVQKLMMTLRHPSLPLLELQEIMTSVAGRIPAPVEKSVRRVMAQYASNITSVLCQFPSQQIATILDCHAATLQRKADREVFFINTQSIVQLVQRYRSGIRGYMKTVVLDLLRRYLRVEHHFQQAHYDKCVINLREQFKPDMSQVLDCIFSHAQVAKKNQLVIMLIDELCGPDPSLSDELISILNELTQLSKSEHCKVALRARQILIASHLPSYELRHNQVESIFLSAIDMYGHQFCPENLKKLILSETTIFDVLPTFFYHANKVVCMASLEVYVRRGYIAYELNSLQHRQLPDGTCVVEFQFMLPSSHPNRMTVPISITNPDLLRHSTELFMDSGFSPLCQRMGAMVAFRRFEDFTRNFDEVISCFANVPKDTPLFSEARTSLYSEDDCKSLREEPIHILNVSIQCADHLEDEALVPILRTFVQSKKNILVDYGLRRITFLIAQEKEFPKFFTFRARDEFAEDRIYRHLEPALAFQLELNRMRNFDLTAVPCANHKMHLYLGAAKVKEGVEVTDHRFFIRAIIRHSDLITKEASFEYLQNEGERLLLEAMDELEVAFNNTSVRTDCNHIFLNFVPTVIMDPFKIEESVRYMVMRYGSRLWKLRVLQAEVKINIRQTTTGSAVPIRLFITNESGYYLDISLYKEVTDSRSGNIMFHSFGNKQGPQHGMLINTPYVTKDLLQAKRFQAQTLGTTYIYDFPEMFRQALFKLWGSPDKYPKDILTYTELVLDSQGQLVEMNRLPGGNEVGMVAFKMRFKTQEYPEGRDVIVIGNDITFRIGSFGPGEDLLYLRASEMARAEGIPKIYVAANSGARIGMAEEIKHMFHVAWVDPEDPHKGFKYLYLTPQDYTRISSLNSVHCKHIEEGGESRYMITDIIGKDDGLGVENLRGSGMIAGESSLAYEEIVTISLVTCRAIGIGAYLVRLGQRVIQVENSHIILTGASALNKVLGREVYTSNNQLGGVQIMHYNGVSHITVPDDFEGVYTILEWLSYMPKDNHSPVPIITPTDPIDREIEFLPSRAPYDPRWMLAGRPHPTLKGTWQSGFFDHGSFKEIMAPWAQTVVTGRARLGGIPVGVIAVETRTVEVAVPADPANLDSEAKIIQQAGQVWFPDSAYKTAQAVKDFNREKLPLMIFANWRGFSGGMKDMYDQVLKFGAYIVDGLRQYKQPILIYIPPYAELRGGSWVVIDATINPLCIEMYADKESRGGVLEPEGTVEIKFRKKDLIKSMRRIDPAYKKLMEQLGEPDLSDKDRKDLEGRLKAREDLLLPIYHQVAVQFADFHDTPGRMLEKGVISDILEWKTARTFLYWRLRRLLLEDQVKQEILQASGELSHVHIQSMLRRWFVETEGAVKAYLWDNNQVVVQWLEQHWQAGDGPRSTIRENITYLKHDSVLKTIRGLVEENPEVAVDCVIYLSQHISPAERAQVVHLLSTMDSPAST

SEQ ID NO: 9451 - DNA, 9360 bp, Homo sapiens
cagctagcaggcttagattcaggccctcagcaaacaaggaacctggaaaatgtaaccctgaatgcacggtggggaggacatggcaagagaaaagcggcaggaataaagtgattttctgaatggtcttgcttctttgtctatcttgtctgattttctcctgtctgaccttttcctggttaaaaatctgggggaaaatgacggactccaagccgatcaccaagagtaaatcagaagcaaacctcatcccgagccaggagccctttccagcctctgataactcaggggagacaccgcagagaaatggggagggccacactctgcccaagacacccagccaggccgagccagcctcccacaaaggccccaaagatgccggtcggcggagaaactccctaccaccctcccaccagaagcccccaagaaaccccctttcttccagtgacgcagcaccctccccagagcttcaagccaacgggactgggacacaaggtctggaggccacagataccaatggcctgtcctcctcagccaggccccagggccagcaagctggctccccctccaaagaagacaagaagcaggcaaacatcaagaggcagctgatgaccaacttcatcctgggctcttttgatgactactcctccgacgaggactctgttgctggctcatctcgtgagtctacccggaagggcagccgggccagcttgggggccctgtccctggaggcttatctgaccacaggtgaagctgagacccgcgtccccactatgaggccgagcatgtcgggactccacctggtgaagaggggacgggaacacaagaagctggacctgcacagagactttaccgtggcttctcccgctgagtttgtcacacgctttgggggggatcgggtcatcgagaaggtgcttattgccaacaacgggattgccgccgtgaagtgcatgcgctccatccgcaggtgggcctatgagatgttccgcaacgagcgggccatccggtttgttgtgatggtgacccccgaggaccttaaggccaacgcagagtacatcaagatggcggatcattacgtccccgtcccaggagggcccaataacaacaactatgccaacgtggagctgattgtggacattgccaagagaatccccgtgcaggcggtgtgggctggctggggccatgcttcagaaaaccctaaacttccggagctgctgtgcaagaatggagttgctttcttaggccctcccagtgaggccatgtgggccttaggagataagatcgcctccaccgttgtcgcccagacgctacaggtcccaaccctgccctggagtggaagcggcctgacagtggagtggacagaagatgatctgcagcagggaaaaagaatcagtgtcccagaagatgtttatgacaagggttgcgtgaaagacgtagatgagggcttggaggcagcagaaagaattggttttccattgatgatcaaagcttctgaaggtggcggagggaagggaatccggaaggctgagagtgcggaggacttcccgatccttttcagacaagtacagagtgagatcccaggctcgcccatctttctcatgaagctggcccagcacgcccgtcacctggaagttcagatcctcgctgaccagtatgggaatgctgtgtctctgtttggtcgcgactgctccatccagcggcggcatcagaagatcgttgaggaagcaccggccaccatcgccccgctggccatattcgagttcatggagcagtgtgccatccgcctggccaagaccgtgggctatgtgagtgcagggacagtggaatacctctatagtcaggatggcagcttccacttcttggagctgaatcctcgcttgcaggtggaacatccctgcacagaaatgattgctgatgttaatctgccggccgcccagctacagatcgccatgggcgtgccactgcaccggctgaaggatatccggcttctgtatggagagtcaccatggggagtgactcccatttcttttgaaaccccctcaaaccctcccctcgcccgaggccacgtcattgccgccagaatcaccagcgaaaacccagacgagggttttaagccgagctccgggactgtccaggaactgaatttccggagcagcaagaacgtgtggggttacttcagcgtggccgctactggaggcctgcacgagtttgcggattcccaatttgggcactgcttctcctggggagagaaccgggaagaggccatttcgaacatggtggtggctttgaaggaactgtccatccgaggcgactttaggactaccgtggaatacctcattaacctcctggagaccgagagcttccagaacaacgacatcgacaccgggtggttggactacctcattgctgagaaagtgcaggcggagaaaccggatatcatgcttggggtggtatgcggggccttgaacgtggccgatgcgatgttcagaacgtgcatgacagatttcttacactccctggaaaggggccaggtcctcccagcggattcactactgaacctcgtagatgtggaattaatttacggaggtgttaagtacattctcaaggtggcccggcagtctctgaccatgttcgttctcatcatgaatggctgccacatcgagattgatgcccaccggctgaatgatggggggctcctgctctcctacaatgggaacagctacaccacctacatgaaggaagaggttgacagttaccgaattaccatcggcaataagacgtgtgtgtttgagaaggagaacgatcctacagtcctgagatccccctcggctgggaagctgacacagtacacagtggaggatgggggccacgttgaggctgggagcagctacgctgagatggaggtgatgaagatgatcatgaccctgaacgttcaggaaagaggccgggtgaagtacatcaagcgtccaggtgccgtgctggaagcaggctgcgtggtggccaggctggagctcgatgacccttctaaagtccacccggctgaaccgttcacaggagaactccctgcccagcagacactgcccatcctcggagagaaactgcaccaggtcttccacagcgtcctggaaaacctcaccaacgtcatgagtggcttttgtctgccagagcccgtttttagcataaagctgaaggagtgggtgcagaagctcatgatgaccctccggcacccgtcactgccgctgctggagctgcaggagatcatgaccagcgtggcaggccgcatccccgcccctgtggagaagtctgtccgcagggtgatggcccagtatgccagcaacatcacctcggtgctgtgccagttccccagccagcagatagccaccatcctggactgccatgcagccaccctgcagcggaaggctgatcgagaggtcttcttcatcaacacccagagcatcgtgcagttggtccagagataccgcagcgggatccgcggctatatgaaaacagtggtgttggatctcctgagaagatacttgcgtgttgagcaccattttcagcaagcccactacgacaagtgtgtgataaacctcagggagcagttcaagccagacatgtcccaggtgctggactgcatcttctcccacgcacaggtggccaagaagaaccagctggtgatcatgttgatcgatgagctgtgtggcccagacccttccctgtcggacgagctgatctccatcctcaacgagctcactcagctgagcaaaagcgagcactgcaaagtggccctcagagcccggcagatcctgattgcctcccacctcccctcctacgagctgcggcataaccaggtggagtccattttcctgtctgccattgacatgtacggccaccagttctgccccgagaacctcaagaaattaatactttcggaaacaaccatcttcgacgtcctgcctactttcttctatcacgcaaacaaagtcgtgtgcatggcgtccttggaggtttacgtgcggaggggctacatcgcctatgagttaaacagcctgcagcaccggcagctcccggacggcacctgcgtggtagaattccagttcatgctgccgtcctcccacccaaaccggatgaccgtgcccatcagcatcaccaaccctgacctgctgaggcacagcacagagctcttcatggacagcggcttctccccactgtgccagcgcatgggagccatggtagccttcaggagattcgaggacttcaccagaaattttgatgaagtcatctcttgcttcgccaacgtgcccaaagacacccccctcttcagcgaggcccgcacctccctatactccgaggatgactgcaagagcctcagagaagagcccatccacattctgaatgtgtccatccagtgtgcagaccacctggaggatgaggcactggtgccgattttacggacattcgtacagtccaagaaaaatatccttgtggattatggactccgacgaatcacattcttgattgcccaagagaaagaatttcccaagtttttcacattcagagcaagagatgagtttgcagaagatcgcatttaccgtcacttggaacctgccctggccttccagctggaacttaaccggatgcgtaacttcgatctgaccgccgtgccctgtgccaaccacaagatgcacctttacctgggtgctgccaaggtgaaggaaggtgtggaagtgacggaccataggttcttcatccgcgccatcatcaggcactctgacctgatcacaaaggaagcctccttcgaatacctgcagaacgagggtgagcggctgctcctggaggccatggacgagctggaggtggcgttcaataacaccagcgtgcgcaccgactgcaaccacatcttcctcaacttcgtgcccactgtcatcatggaccccttcaagatcgaggagtccgtgcgctacatggttatgcgctacggcagccggctgtggaaactccgtgtgctacaggctgaggtcaagatcaacatccgccagaccaccaccggcagtgccgttcccatccgcctgttcatcaccaatgagtcgggctactacctggacatcagcctctacaaagaagtgactgactccagatctggaaatatcatgtttcactccttcggcaacaagcaagggccccagcacgggatgctgatcaatactccctacgtcaccaaggatctgctccaggccaagcgattccaggcccagaccctgggaaccacctacatctatgacttcccggaaatgttcaggcaggctctctttaaactgtggggctccccagacaagtatcccaaagacatcctgacatacactgaattagtgttggactctcagggccagctggtggagatgaaccgacttcctggtggaaatgaggtgggcatggtggccttcaaaatgaggtttaagacccaggagtacccggaaggacgggatgtgatcgtcatcggcaatgacatcacctttcgcattggatcctttggccctggagaggaccttctgtacctgcgggcatccgagatggcccgggcagagggcattcccaaaatttacgtggcagccaacagtggcgcccgtattggcatggcagaggagatcaaacacatgttccacgtggcttgggtggacccagaagacccccacaaaggatttaaatacctgtacctgactccccaagactacaccagaatcagctccctgaactccgtccactgtaaacacatcgaggaaggaggagagtccagatacatgatcacggatatcatcgggaaggatgatggcttgggcgtggagaatctgaggggctcaggcatgattgctggggagtcctctctggcttacgaagagatcgtcaccattagcttggtgacctgccgagccattgggattggggcctacttggtgaggctgggccagcgagtgatccaggtggagaattcccacatcatcctcacaggagcaagtgctctcaacaaggtcctgggaagagaggtctacacatccaacaaccagctgggtggcgttcagatcatgcattacaatggtgtctcccacatcaccgtgccagatgactttgagggggtttataccatcctggagtggctgtcctatatgccaaaggataatcacagccctgtccctatcatcacacccactgaccccattgacagagaaattgaattcctcccatccagagctccctacgacccccggtggatgcttgcaggaaggcctcacccaactctgaagggaacgtggcagagcggattctttgaccacggcagtttcaaggaaatcatggcaccctgggcgcagaccgtggtgacaggacgagcaaggcttggggggattcccgtgggagtgattgctgtggagacacggactgtggaggtggcagtccctgcagaccctgccaacctggattctgaggccaagataattcagcaggcaggacaggtgtggttcccagactcagcctacaaaaccgcccaggccgtcaaggacttcaaccgggagaagttgcccctgatgatctttgccaactggagggggttctccggtggcatgaaagacatgtatgaccaggtgctgaagtttggagcctacatcgtggacggccttagacaatacaaacagcccatcctgatctatatcccgccctatgcggagctccggggaggctcctgggtggtcatagatgccaccatcaacccgctgtgcatagaaatgtatgcagacaaagagagcaggggtggtgttctggaaccagaggggacagtggagattaagttccgaaagaaagatctgataaagtccatgagaaggatcgatccagcttacaagaagctcatggaacagctaggggaacctgatctctccgacaaggaccgaaaggacctggagggccggctaaaggctcgcgaggacctgctgctccccatctaccaccaggtggcggtgcagttcgccgacttccatgacacacccggccggatgctggagaagggcgtcatatctgacatcctggagtggaagaccgcacgcaccttcctgtattggcgtctgcgccgcctcctcctggaggaccaggtcaagcaggagatcctgcaggccagcggggagctgagtcacgtgcatatccagtccatgctgcgtcgctggttcgtggagacggagggggctgtcaaggcctacttgtgggacaacaaccaggtggttgtgcagtggctggaacagcactggcaggcaggggatggcccgcgctccaccatccgtgagaacatcacgtacctgaagcacgactctgtcctcaagaccatccgaggcctggttgaagaaaaccccgaggtggccgtggactgtgtgatatacctgagccagcacatcagcccagctgagcgggcgcaggtcgttcacctgctgtctaccatggacagcccggcctccacctgaccgtggcccgcccagccactcccgggaccacggcaaaaggaaccacccagacccaccacccgtacaccctcagcagaccctgaagacttgcttttaaacaaagaaaatcctgggcacttctgcagggctgctggttccgagctgacacccgtcttaacaaaaggcccaggagtgcctcttccaaacaaaaacagcctcctctccatagctgggaagtttattttgttttgtctctgaagacagcagttttattgcatcactaaatctaatcaagctaaaacatccctgtttccttttgcaaaacagtgcctggcatgtgggatccaggcgttctttaggatccttggataccacatcgtgaaatcttttatttttttactctgagaccagcaccagatgtaagtaagcatctcatatatttcagccaaataaatgggccaagggaaaaaaatatatatatatagacaggactagagaaaacctatttttgtaatgatgtttctttggatactgtctagtcacccagaaaaatgtatggatgaatttttttttttttttttgagacaaagtctcactgtgtcatgcaggctggagtgcagtggcatgatctcactgcaacctccatctcctgtctcagcctcctagataactgggattacaggtgcccaccaccatgcccggctaatttttgtatttttggtagagacagagtttcaccaggttggtcaggctggtctcaaactcttgacttcaggtaatccacccaccttggcctcccaaagtgctgggattacaggcatgagccaccatcttcagccagatgatttttttattgagagagtgaaatgctattttgttccccaaatggcgctagtgaatcactaggagggtcccactgataggccatgtttagcactggttgccagggattctctttttgagagagggaaagcaaaatgaatggaagtacccagctggaggtttcagggcttctggaggatgctctcgcatagctcgaggtcctctgcccacctcttctctccaaggaaaatgaggactgccccttccccctgcaggattggcccccagcctgcgcatgcaccctcctcttgcccaagtggggagcacagaggcggagaggaatcccttaccacacccacggcccagcttgctcacgagtgtcacctctgtgacggtcaccactgctcccttggagggccacttgagttactgttgcttcctcgcctgctggcttgatgagcaccgatggtgggatctgaccccgaggggcagagctgtcggtgactgaggactggactgtggtgaccatgccgatttgctcagggagaacgttgcaatgcacccagcagctcctggctctgcaggcggcacagcctggggccctgtgatcctctggtttcttccattggggcggagtcggggatggagggagctggccacaacccactgctctgatgggtggtttgtccaaggatgctgaatgtaatgcctggtcaatgtggaagcccatgaggttgcccagggaagcctccaaaagctgggatgcttgagggtatccaagttgaaaaagacaaaatctgaccatcagccagtgacagtcctggcaaatgaaggtggggcggggcagtgaggggtgggagaaggtgaatgattcattattccaccccgaggtttgctggggtgaggggaagaatcgatgctgctttgggaactgaaggtttttctgttgggaaggccctcttggttttggagagaaagacaagttatgagtagctgctaccctggaacggtgggcagagagcctactaggaaatgtgcagaataaactattttttgaaggaaa

SEQ ID NO: 9452 - protein, 2458 aa, Homo sapiens; identical to SEQ ID NO: 9450

SEQ ID NO: 9453 - DNA, 7652 bp, Homo sapiens
atggtcttgcttctttgtctatcttgtctgattttctcctgtctgaccttttcctggttaaaaatctgggggaaaatgacggactccaagccgatcaccaagagtaaatcagaagcaaacctcatcccgagccaggagccctttccagcctctgataactcaggggagacaccgcagagaaatggggagggccacactctgcccaagacacccagccaggccgagccagcctcccacaaaggccccaaagatgccggtcggcggagaaactccctaccaccctcccaccagaagcccccaagaaaccccctttcttccagtgacgcagcaccctccccagagcttcaagccaacgggactgggacacaaggtctggaggccacagataccaatggcctgtcctcctcagccaggccccagggccagcaagctggctccccctccaaagaagacaagaagcaggcaaacatcaagaggcagctgatgaccaacttcatcctgggctcttttgatgactactcctccgacgaggactctgttgctggctcatctcgtgagtctacccggaagggcagccgggccagcttgggggccctgtccctggaggcttatctgaccacaggtgaagctgagacccgcgtccccactatgaggccgagcatgtcgggactccacctggtgaagaggggacgggaacacaagaagctggacctgcacagagactttaccgtggcttctcccgctgagtttgtcacacgctttgggggggatcgggtcatcgagaaggtgcttattgccaacaacgggattgccgccgtgaagtgcatgcgctccatccgcaggtgggcctatgagatgttccgcaacgagcgggccatccggtttgttgtgatggtgacccccgaggaccttaaggccaacgcagagtacatcaagatggcggatcattacgtccccgtcccaggagggcccaataacaacaactatgccaacgtggagctgattgtggacattgccaagagaatccccgtgcaggcggtgtgggctggctggggccatgcttcagaaaaccctaaacttccggagctgctgtgcaagaatggagttgctttcttaggccctcccagtgaggccatgtgggccttaggagataagatcgcctccaccgttgtcgcccagacgctacaggtcccaaccctgccctggagtggaagcggcctgacagtggagtggacagaagatgatctgcagcagggaaaaagaatcagtgtcccagaagatgtttatgacaagggttgcgtgaaagacgtagatgagggcttggaggcagcagaaagaattggttttccattgatgatcaaagcttctgaaggtggcggagggaagggaatccggaaggctgagagtgcggaggacttcccgatccttttcagacaagtacagagtgagatcccaggctcgcccatctttctcatgaagctggcccagcacgcccgtcacctggaagttcagatcctcgctgaccagtatgggaatgctgtgtctctgtttggtcgcgactgctccatccagcggcggcatcagaagatcgttgaggaagcaccggccaccatcgccccgctggccatattcgagttcatggagcagtgtgccatccgcctggccaagaccgtgggctatgtgagtgcagggacagtggaatacctctatagtcaggatggcagcttccacttcttggagctgaatcctcgcttgcaggtggaacatccctgcacagaaatgattgctgatgttaatctgccggccgcccagctacagatcgccatgggcgtgccactgcaccggctgaaggatatccggcttctgtatggagagtcaccatggggagtgactcccatttcttttgaaaccccctcaaaccctcccctcgcccgaggccacgtcattgccgccagaatcaccagcgaaaacccagacgagggttttaagccgagctccgggactgtccaggaactgaatttccggagcagcaagaacgtgtggggttacttcagcgtggccgctactggaggcctgcacgagtttgcggattcccaatttgggcactgcttctcctggggagagaaccgggaagaggccatttcgaacatggtggtggctttgaaggaactgtccatccgaggcgactttaggactaccgtggaatacctcattaacctcctggagaccgagagcttccagaacaacgacatcgacaccgggtggttggactacctcattgctgagaaagtgcaggcggagaaaccggatatcatgcttggggtggtatgcggggccttgaacgtggccgatgcgatgttcagaacgtgcatgacagatttcttacactccctggaaaggggccaggtcctcccagcggattcactactgaacctcgtagatgtggaattaatttacggaggtgttaagtacattctcaaggtggcccggcagtctctgaccatgttcgttctcatcatgaatggctgccacatcgagattgatgcccaccggctgaatgatggggggctcctgctctcctacaatgggaacagctacaccacctacatgaaggaagaggttgacagttaccgaattaccatcggcaataagacgtgtgtgtttgagaaggagaacgatcctacagtcctgagatccccctcggctgggaagctgacacagtacacagtggaggatgggggccacgttgaggctgggagcagctacgctgagatggaggtgatgaagatgatcatgaccctgaacgttcaggaaagaggccgggtgaagtacatcaagcgtccaggtgccgtgctggaagcaggctgcgtggtggccaggctggagctcgatgacccttctaaagtccacccggctgaaccgttcacaggagaactccctgcccagcagacactgcccatcctcggagagaaactgcaccaggtcttccacagcgtcctggaaaacctcaccaacgtcatgagtggcttttgtctgccagagcccgtttttagcataaagctgaaggagtgggtgcagaagctcatgatgaccctccggcacccgtcactgccgctgctggagctgcaggagatcatgaccagcgtggcaggccgcatccccgcccctgtggagaagtctgtccgcagggtgatggcccagtatgccagcaacatcacctcggtgctgtgccagttccccagccagcagatagccaccatcctggactgccatgcagccaccctgcagcggaaggctgatcgagaggtcttcttcatcaacacccagagcatcgtgcagttggtccagagataccgcagcgggatccgcggctatatgaaaacagtggtgttggatctcctgagaagatacttgcgtgttgagcaccattttcagcaaggcaagagatgctgatgccaacaccagtgggatggtggggggcgtgaggagcctgagctttacctctgtgtggtgttttgtctcccccagcccactacgacaagtgtgtgataaacctcagggagcagttcaagccagacatgtcccaggtgctggactgcatcttctcccacgcacaggtggccaagaagaaccagctggtgatcatgttgatcgatgagctgtgtggcccagacccttccctgtcggacgagctgatctccatcctcaacgagctcactcagctgagcaaaagcgagcactgcaaagtggccctcagagcccggcagatcctgattgcctcccacctcccctcctacgagctgcggcataaccaggtggagtccattttcctgtctgccattgacatgtacggccaccagttctgccccgagaacctcaagaaattaatactttcggaaacaaccatcttcgacgtcctgcctactttcttctatcacgcaaacaaagtcgtgtgcatggcgtccttggaggtttacgtgcggaggggctacatcgcctatgagttaaacagcctgcagcaccggcagctcccggacggcacctgcgtggtagaattccagttcatgctgccgtcctcccacccaaaccggatgaccgtgcccatcagcatcaccaaccctgacctgctgaggcacagcacagagctcttcatggacagcggcttctccccactgtgccagcgcatgggagccatggtagccttcaggagattcgaggacttcaccagaaattttgatgaagtcatctcttgcttcgccaacgtgcccaaagacacccccctcttcagcgaggcccgcacctccctatactccgaggatgactgcaagagcctcagagaagagcccatccacattctgaatgtgtccatccagtgtgcagaccacctggaggatgaggcactggtgccgattttacggacattcgtacagtccaagaaaaatatccttgtggattatggactccgacgaatcacattcttgattgcccaagagaaagaatttcccaagtttttcacattcagagcaagagatgagtttgcagaagatcgcatttaccgtcacttggaacctgccctggccttccagctggaacttaaccggatgcgtaacttcgatctgaccgccgtgccctgtgccaaccacaagatgcacctttacctgggtgctgccaaggtgaaggaaggtgtggaagtgacggaccataggttcttcatccgcgccatcatcaggcactctgacctgatcacaaaggaagcctccttcgaatacctgcagaacgagggtgagcggctgctcctggaggccatggacgagctggaggtggcgttcaataacaccagcgtgcgcaccgactgcaaccacatcttcctcaacttcgtgcccactgtcatcatggaccccttcaagatcgaggagtccgtgcgctacatggttatgcgctacggcagccggctgtggaaactccgtgtgctacaggctgaggtcaagatcaacatccgccagaccaccaccggcagtgccgttcccatccgcctgttcatcaccaatgagtcgggctactacctggacatcagcctctacaaagaagtgactgactccagatctggaaatatcatgtttcactccttcggcaacaagcaagggccccagcacgggatgctgatcaatactccctacgtcaccaaggatctgctccaggccaagcgattccaggcccagaccctgggaaccacctacatctatgacttcccggaaatgttcaggcaggctctctttaaactgtggggctccccagacaagtatcccaaagacatcctgacatacactgaattagtgttggactctcagggccagctggtggagatgaaccgacttcctggtggaaatgaggtgggcatggtggccttcaaaatgaggtttaagacccaggagtacccggaaggacgggatgtgatcgtcatcggcaatgacatcacctttcgcattggatcctttggccctggagaggaccttctgtacctgcgggcatccgagatggcccgggcagagggcattcccaaaatttacgtggcagccaacagtggcgcccgtattggcatggcagaggagatcaaacacatgttccacgtggcttgggtggacccagaagacccccacaaaggatttaaatacctgtacctgactccccaagactacaccagaatcagctccctgaactccgtccactgtaaacacatcgaggaaggaggagagtccagatacatgatcacggatatcatcgggaaggatgatggcttgggcgtggagaatctgaggggctcaggcatgattgctggggagtcctctctggcttacgaagagatcgtcaccattagcttggtgacctgccgagccattgggattggggcctacttggtgaggctgggccagcgagtgatccaggtggagaattcccacatcatcctcacaggagcaagtgctctcaacaaggtcctgggaagagaggtctacacatccaacaaccagctgggtggcgttcagatcatgcattacaatggtgtctcccacatcaccgtgccagatgactttgagggggtttataccatcctggagtggctgtcctatatgccaaaggataatcacagccctgtccctatcatcacacccactgaccccattgacagagaaattgaattcctcccatccagagctccctacgacccccggtggatgcttgcaggaaggcctcacccaactctgaagggaacgtggcagagcggattctttgaccacggcagtttcaaggaaatcatggcaccctgggcgcagaccgtggtgacaggacgagcaaggcttggggggattcccgtgggagtgattgctgtggagacacggactgtggaggtggcagtccctgcagaccctgccaacctggattctgaggccaagataattcagcaggcaggacaggtgtggttcccagactcagcctacaaaaccgcccaggccgtcaaggacttcaaccgggagaagttgcccctgatgatctttgccaactggagggggttctccggtggcatgaaagacatgtatgaccaggtgctgaagtttggagcctacatcgtggacggccttagacaatacaaacagcccatcctgatctatatcccgccctatgcggagctccggggaggctcctgggtggtcatagatgccaccatcaacccgctgtgcatagaaatgtatgcagacaaagagagcaggggtggtgttctggaaccagaggggacagtggagattaagttccgaaagaaagatctgataaagtccatgagaaggatcgatccagcttacaagaagctcatggaacagctaggggaacctgatctctccgacaaggaccgaaaggacctggagggccggctaaaggctcgcgaggacctgctgctccccatctaccaccaggtggcggtgcagttcgccgacttccatgacacacccggccggatgctggagaagggcgtcatatctgacatcctggagtggaagaccgcacgcaccttcctgtattggcgtctgcgccgcctcctcctggaggaccaggtcaagcaggagatcctgcaggccagcggggagctgagtcacgtgcatatccagtccatgctgcgtcgctggttcgtggagacggagggggctgtcaaggcctacttgtgggacaacaaccaggtggttgtgcagtggctggaacagcactggcaggcaggggatggcccgcgctccaccatccgtgagaacatcacgtacctgaagcacgactctgtcctcaagaccatccgaggcctggttgaagaaaaccccgaggtggccgtggactgtgtgatatacctgagccagcacatcagcccagctgagcgggcgcaggtcgttcacctgctgtctaccatggacagcccggcctccacctgaccgtggcccgcccagccactcccgggaccacggcaaaaggaaccacccagacccaccacccgtacaccctcagcagaccctgaagacttgcttttaaacaaagaaaatcctgggcacttctgcagggctgctggttccgagctgacacccgtcttaacaaaaggcccaggagtgcctcttccaaac

SEQ ID NO: 9454 - protein, 1295 aa, Homo sapiens
MSQVLDCIFSHAQVAKKNQLVIMLIDELCGPDPSLSDELISILNELTQLSKSEHCKVALRARQILIASHLPSYELRHNQVESIFLSAIDMYGHQFCPENLKKLILSETTIFDVLPTFFYHANKVVCMASLEVYVRRGYIAYELNSLQHRQLPDGTCVVEFQFMLPSSHPNRMTVPISITNPDLLRHSTELFMDSGFSPLCQRMGAMVAFRRFEDFTRNFDEVISCFANVPKDTPLFSEARTSLYSEDDCKSLREEPIHILNVSIQCADHLEDEALVPILRTFVQSKKNILVDYGLRRITFLIAQEKEFPKFFTFRARDEFAEDRIYRHLEPALAFQLELNRMRNFDLTAVPCANHKMHLYLGAAKVKEGVEVTDHRFFIRAIIRHSDLITKEASFEYLQNEGERLLLEAMDELEVAFNNTSVRTDCNHIFLNFVPTVIMDPFKIEESVRYMVMRYGSRLWKLRVLQAEVKINIRQTTTGSAVPIRLFITNESGYYLDISLYKEVTDSRSGNIMFHSFGNKQGPQHGMLINTPYVTKDLLQAKRFQAQTLGTTYIYDFPEMFRQALFKLWGSPDKYPKDILTYTELVLDSQGQLVEMNRLPGGNEVGMVAFKMRFKTQEYPEGRDVIVIGNDITFRIGSFGPGEDLLYLRASEMARAEGIPKIYVAANSGARIGMAEEIKHMFHVAWVDPEDPHKGFKYLYLTPQDYTRISSLNSVHCKHIEEGGESRYMITDIIGKDDGLGVENLRGSGMIAGESSLAYEEIVTISLVTCRAIGIGAYLVRLGQRVIQVENSHIILTGASALNKVLGREVYTSNNQLGGVQIMHYNGVSHITVPDDFEGVYTILEWLSYMPKDNHSPVPIITPTDPIDREIEFLPSRAPYDPRWMLAGRPHPTLKGTWQSGFFDHGSFKEIMAPWAQTVVTGRARLGGIPVGVIAVETRTVEVAVPADPANLDSEAKIIQQAGQVWFPDSAYKTAQAVKDFNREKLPLMIFANWRGFSGGMKDMYDQVLKFGAYIVDGLRQYKQPILIYIPPYAELRGGSWVVIDATINPLCIEMYADKESRGGVLEPEGTVEIKFRKKDLIKSMRRIDPAYKKLMEQLGEPDLSDKDRKDLEGRLKAREDLLLPIYHQVAVQFADFHDTPGRMLEKGVISDILEWKTARTFLYWRLRRLLLEDQVKQEILQASGELSHVHIQSMLRRWFVETEGAVKAYLWDNNQVVVQWLEQHWQAGDGPRSTIRENITYLKHDSVLKTIRGLVEENPEVAVDCVIYLSQHISPAERAQVVHLLSTMDSPAST

SEQ ID NO: 9455 - DNA, 9330 bp, Homo sapiens
atggtcttgcttctttgtctatcttgtctgattttctcctgtctgaccttttcctggttaaaaatctgggggaaaatgacggactccaagccgatcaccaagagtaaatcagaagcaaacctcatcccgagccaggagccctttccagcctctgataactcaggggagacaccgcagagaaatggggagggccacactctgcccaagacacccagccaggccgagccagcctcccacaaaggccccaaagatgccggtcggcggagaaactccctaccaccctcccaccagaagcccccaagaaaccccctttcttccagtgacgcagcaccctccccagagcttcaagccaacgggactgggacacaaggtctggaggccacagataccaatggcctgtcctcctcagccaggccccagggccagcaagctggctccccctccaaagaagacaagaagcaggcaaacatcaagaggcagctgatgaccaacttcatcctgggctcttttgatgactactcctccgacgaggactctgttgctggctcatctcgtgagtctacccggaagggcagccgggccagcttgggggccctgtccctggaggcttatctgaccacaggtgaagctgagacccgcgtccccactatgaggccgagcatgtcgggactccacctggtgaagaggggacgggaacacaagaagctggacctgcacagagactttaccgtggcttctcccgctgagtttgtcacacgctttgggggggatcgggtcatcgagaaggtgcttattgccaacaacgggattgccgccgtgaagtgcatgcgctccatccgcaggtgggcctatgagatgttccgcaacgagcgggccatccggtttgttgtgatggtgacccccgaggaccttaaggccaacgcagagtacatcaagatggcggatcattacgtccccgtcccaggagggcccaataacaacaactatgccaacgtggagctgattgtggacattgccaagagaatccccgtgcaggcggtgtgggctggctggggccatgcttcagaaaaccctaaacttccggagctgctgtgcaagaatggagttgctttcttaggccctcccagtgaggccatgtgggccttaggagataagatcgcctccaccgttgtcgcccagacgctacaggtcccaaccctgccctggagtggaagcggcctgacagtggagtggacagaagatgatctgcagcagggaaaaagaatcagtgtcccagaagatgtttatgacaagggttgcgtgaaagacgtagatgagggcttggaggcagcagaaagaattggttttccattgatgatcaaagcttctgaaggtggcggagggaagggaatccggaaggctgagagtgcggaggacttcccgatccttttcagacaagtacagagtgagatcccaggctcgcccatctttctcatgaagctggcccagcacgcccgtcacctggaagttcagatcctcgctgaccagtatgggaatgctgtgtctctgtttggtcgcgactgctccatccagcggcggcatcagaagatcgttgaggaagcaccggccaccatcgccccgctggccatattcgagttcatggagcagtgtgccatccgcctggccaagaccgtgggctatgtgagtgcagggacagtggaatacctctatagtcaggatggcagcttccacttcttggagctgaatcctcgcttgcaggtggaacatccctgcacagaaatgattgctgatgttaatctgccggccgcccagctacagatcgccatgggcgtgccactgcaccggctgaaggatatccggcttctgtatggagagtcaccatggggagtgactcccatttcttttgaaaccccctcaaaccctcccctcgcccgaggccacgtcattgccgccagaatcaccagcgaaaacccagacgagggttttaagccgagctccgggactgtccaggaactgaatttccggagcagcaagaacgtgtggggttacttcagcgtggccgctactggaggcctgcacgagtttgcggattcccaatttgggcactgcttctcctggggagagaaccgggaagaggccatttcgaacatggtggtggctttgaaggaactgtccatccgaggcgactttaggactaccgtggaatacctcattaacctcctggagaccgagagcttccagaacaacgacatcgacaccgggtggttggactacctcattgctgagaaagtgcaggcggagaaaccggatatcatgcttggggtggtatgcggggccttgaacgtggccgatgcgatgttcagaacgtgcatgacagatttcttacactccctggaaaggggccaggtcctcccagcggattcactactgaacctcgtagatgtggaattaatttacggaggtgttaagtacattctcaaggtggcccggcagtctctgaccatgttcgttctcatcatgaatggctgccacatcgagattgatgcccaccggctgaatgatggggggctcctgctctcctacaatgggaacagctacaccacctacatgaaggaagaggttgacagttaccgaattaccatcggcaataagacgtgtgtgtttgagaaggagaacgatcctacagtcctgagatccccctcggctgggaagctgacacagtacacagtggaggatgggggccacgttgaggctgggagcagctacgctgagatggaggtgatgaagatgatcatgaccctgaacgttcaggaaagaggccgggtgaagtacatcaagcgtccaggtgccgtgctggaagcaggctgcgtggtggccaggctggagctcgatgacccttctaaagtccacccggctgaaccgttcacaggagaactccctgcccagcagacactgcccatcctcggagagaaactgcaccaggtcttccacagcgtcctggaaaacctcaccaacgtcatgagtggcttttgtctgccagagcccgtttttagcataaagctgaaggagtgggtgcagaagctcatgatgaccctccggcacccgtcactgccgctgctggagctgcaggagatcatgaccagcgtggcaggccgcatccccgcccctgtggagaagtctgtccgcagggtgatggcccagtatgccagcaacatcacctcggtgctgtgccagttccccagccagcagatagccaccatcctggactgccatgcagccaccctgcagcggaaggctgatcgagaggtcttcttcatcaacacccagagcatcgtgcagttggtccagagataccgcagcgggatccgcggctatatgaaaacagtggtgttggatctcctgagaagatacttgcgtgttgagcaccattttcagcaaggcaagagatgctgatgccaacaccagtgggatggtggggggcgtgaggagcctgagctttacctctgtgtggtgttttgtctcccccagcccactacgacaagtgtgtgataaacctcagggagcagttcaagccagacatgtcccaggtgctggactgcatcttctcccacgcacaggtggccaagaagaaccagctggtgatcatgttgatcgatgagctgtgtggcccagacccttccctgtcggacgagctgatctccatcctcaacgagctcactcagctgagcaaaagcgagcactgcaaagtggccctcagagcccggcagatcctgattgcctcccacctcccctcctacgagctgcggcataaccaggtggagtccattttcctgtctgccattgacatgtacggccaccagttctgccccgagaacctcaagaaattaatactttcggaaacaaccatcttcgacgtcctgcctactttcttctatcacgcaaacaaagtcgtgtgcatggcgtccttggaggtttacgtgcggaggggctacatcgcctatgagttaaacagcctgcagcaccggcagctcccggacggcacctgcgtggtagaattccagttcatgctgccgtcctcccacccaaaccggatgaccgtgcccatcagcatcaccaaccctgacctgctgaggcacagcacagagctcttcatggacagcggcttctccccactgtgccagcgcatgggagccatggtagccttcaggagattcgaggacttcaccagaaattttgatgaagtcatctcttgcttcgccaacgtgcccaaagacacccccctcttcagcgaggcccgcacctccctatactccgaggatgactgcaagagcctcagagaagagcccatccacattctgaatgtgtccatccagtgtgcagaccacctggaggatgaggcactggtgccgattttacggacattcgtacagtccaagaaaaatatccttgtggattatggactccgacgaatcacattcttgattgcccaagagaaagaatttcccaagtttttcacattcagagcaagagatgagtttgcagaagatcgcatttaccgtcacttggaacctgccctggccttccagctggaacttaaccggatgcgtaacttcgatctgaccgccgtgccctgtgccaaccacaagatgcacctttacctgggtgctgccaaggtgaaggaaggtgtggaagtgacggaccataggttcttcatccgcgccatcatcaggcactctgacctgatcacaaaggaagcctccttcgaatacctgcagaacgagggtgagcggctgctcctggaggccatggacgagctggaggtggcgttcaataacaccagcgtgcgcaccgactgcaaccacatcttcctcaacttcgtgcccactgtcatcatggaccccttcaagatcgaggagtccgtgcgctacatggttatgcgctacggcagccggctgtggaaactccgtgtgctacaggctgaggtcaagatcaacatccgccagaccaccaccggcagtgccgttcccatccgcctgttcatcaccaatgagtcgggctactacctggacatcagcctctacaaagaagtgactgactccagatctggaaatatcatgtttcactccttcggcaacaagcaagggccccagcacgggatgctgatcaatactccctacgtcaccaaggatctgctccaggccaagcgattccaggcccagaccctgggaaccacctacatctatgacttcccggaaatgttcaggcaggctctctttaaactgtggggctccccagacaagtatcccaaagacatcctgacatacactgaattagtgttggactctcagggccagctggtggagatgaaccgacttcctggtggaaatgaggtgggcatggtggccttcaaaatgaggtttaagacccaggagtacccggaaggacgggatgtgatcgtcatcggcaatgacatcacctttcgcattggatcctttggccctggagaggaccttctgtacctgcgggcatccgagatggcccgggcagagggcattcccaaaatttacgtggcagccaacagtggcgcccgtattggcatggcagaggagatcaaacacatgttccacgtggcttgggtggacccagaagacccccacaaaggatttaaatacctgtacctgactccccaagactacaccagaatcagctccctgaactccgtccactgtaaacacatcgaggaaggaggagagtccagatacatgatcacggatatcatcgggaaggatgatggcttgggcgtggagaatctgaggggctcaggcatgattgctggggagtcctctctggcttacgaagagatcgtcaccattagcttggtgacctgccgagccattgggattggggcctacttggtgaggctgggccagcgagtgatccaggtggagaattcccacatcatcctcacaggagcaagtgctctcaacaaggtcctgggaagagaggtctacacatccaacaaccagctgggtggcgttcagatcatgcattacaatggtgtctcccacatcaccgtgccagatgactttgagggggtttataccatcctggagtggctgtcctatatgccaaaggataatcacagccctgtccctatcatcacacccactgaccccattgacagagaaattgaattcctcccatccagagctccctacgacccccggtggatgcttgcaggaaggcctcacccaactctgaagggaacgtggcagagcggattctttgaccacggcagtttcaaggaaatcatggcaccctgggcgcagaccgtggtgacaggacgagcaaggcttggggggattcccgtgggagtgattgctgtggagacacggactgtggaggtggcagtccctgcagaccctgccaacctggattctgaggccaagataattcagcaggcaggacaggtgtggttcccagactcagcctacaaaaccgcccaggccgtcaaggacttcaaccgggagaagttgcccctgatgatctttgccaactggagggggttctccggtggcatgaaagacatgtatgaccaggtgctgaagtttggagcctacatcgtggacggccttagacaatacaaacagcccatcctgatctatatcccgccctatgcggagctccggggaggctcctgggtggtcatagatgccaccatcaacccgctgtgcatagaaatgtatgcagacaaagagagcaggggtggtgttctggaaccagaggggacagtggagattaagttccgaaagaaagatctgataaagtccatgagaaggatcgatccagcttacaagaagctcatggaacagctaggggaacctgatctctccgacaaggaccgaaaggacctggagggccggctaaaggctcgcgaggacctgctgctccccatctaccaccaggtggcggtgcagttcgccgacttccatgacacacccggccggatgctggagaagggcgtcatatctgacatcctggagtggaagaccgcacgcaccttcctgtattggcgtctgcgccgcctcctcctggaggaccaggtcaagcaggagatcctgcaggccagcggggagctgagtcacgtgcatatccagtccatgctgcgtcgctggttcgtggagacggagggggctgtcaaggcctacttgtgggacaacaaccaggtggttgtgcagtggctggaacagcactggcaggcaggggatggcccgcgctccaccatccgtgagaacatcacgtacctgaagcacgactctgtcctcaagaccatccgaggcctggttgaagaaaaccccgaggtggccgtggactgtgtgatatacctgagccagcacatcagcccagctgagcgggcgcaggtcgttcacctgctgtctaccatggacagcccggcctccacctgaccgtggcccgcccagccactcccgggaccacggcaaaaggaaccacccagacccaccacccgtacaccctcagcagaccctgaagacttgcttttaaacaaagaaaatcctgggcacttctgcagggctgctggttccgagctgacacccgtcttaacaaaaggcccaggagtgcctcttccaaacaaaaacagcctcctctccatagctgggaagtttattttgttttgtctctgaagacagcagttttattgcatcactaaatctaatcaagctaaaacatccctgtttccttttgcaaaacagtgcctggcatgtgggatccaggcgttctttaggatccttggataccacatcgtgaaatcttttatttttttactctgagaccagcaccagatgtaagtaagcatctcatatatttcagccaaataaatgggccaagggaaaaaaatatatatatatagacaggactagagaaaacctatttttgtaatgatgtttctttggatactgtctagtcacccagaaaaatgtatggatgaatttttttttttttttttgagacaaagtctcactgtgtcatgcaggctggagtgcagtggcatgatctcactgcaacctccatctcctgtctcagcctcctagataactgggattacaggtgcccaccaccatgcccggctaatttttgtatttttggtagagacagagtttcaccaggttggtcaggctggtctcaaactcttgacttcaggtaatccacccaccttggcctcccaaagtgctgggattacaggcatgagccaccatcttcagccagatgatttttttattgagagagtgaaatgctattttgttccccaaatggcgctagtgaatcactaggagggtcccactgataggccatgtttagcactggttgccagggattctctttttgagagagggaaagcaaaatgaatggaagtacccagctggaggtttcagggcttctggaggatgctctcgcatagctcgaggtcctctgcccacctcttctctccaaggaaaatgaggactgccccttccccctgcaggattggcccccagcctgcgcatgcaccctcctcttgcccaagtggggagcacagaggcggagaggaatcccttaccacacccacggcccagcttgctcacgagtgtcacctctgtgacggtcaccactgctcccttggagggccacttgagttactgttgcttcctcgcctgctggcttgatgagcaccgatggtgggatctgaccccgaggggcagagctgtcggtgactgaggactggactgtggtgaccatgccgatttgctcagggagaacgttgcaatgcacccagcagctcctggctctgcaggcggcacagcctggggccctgtgatcctctggtttcttccattggggcggagtcggggatggagggagctggccacaacccactgctctgatgggtggtttgtccaaggatgctgaatgtaatgcctggtcaatgtggaagcccatgaggttgcccagggaagcctccaaaagctgggatgcttgagggtatccaagttgaaaaagacaaaatctgaccatcagccagtgacagtcctggcaaatgaaggtggggcggggcagtgaggggtgggagaaggtgaatgattcattattccaccccgaggtttgctggggtgaggggaagaatcgatgctgctttgggaactgaaggtttttctgttgggaaggccctcttggttttggagagaaagacaagttatgagtagctgctaccctggaacggtgggcagagagcctactaggaaatgtgcagaataaactattttttgaaggaaa

SEQ ID NO: 9456 - protein, 1295 aa, Homo sapiens; identical to SEQ ID NO: 9454

SEQ ID NO: 9457 - DNA, 3738 bp, Homo sapiens
agacaatgccacccaagccattgggaagagtcatgagataaggcacatgtagcattttagacagtgcctggcacaaaggaagttgttgactgatgaccgtgcccatcagcatcaccaaccctgacctgctgaggcacagcacagagctcttcatggacagcggcttctccccactgtgccagcgcatgggagccatggtagccttcaggagattcgaggacttcaccagaaattttgatgaagtcatctcttgcttcgccaacgtgcccaaagacacccccctcttcagcgaggcccgcacctccctatactccgaggatgactgcaagagcctcagagaagagcccatccacattctgaatgtgtccatccagtgtgcagaccacctggaggatgaggcactggtgccgattttacggacattcgtacagtccaagaaaaatatccttgtggattatggactccgacgaatcacattcttgattgcccaagagaaagaatttcccaagtttttcacattcagagcaagagatgagtttgcagaagatcgcatttaccgtcacttggaacctgccctggccttccagctggaacttaaccggatgcgtaacttcgatctgaccgccgtgccctgtgccaaccacaagatgcacctttacctgggtgctgccaaggtgaaggaaggtgtggaagtgacggaccataggttcttcatccgcgccatcatcaggcactctgacctgatcacaaaggaagcctccttcgaatacctgcagaacgagggtgagcggctgctcctggaggccatggacgagctggaggtggcgttcaataacaccagcgtgcgcaccgactgcaaccacatcttcctcaacttcgtgcccactgtcatcatggaccccttcaagatcgaggagtccgtgcgctacatggttatgcgctacggcagccggctgtggaaactccgtgtgctacaggctgaggtcaagatcaacatccgccagaccaccaccggcagtgccgttcccatccgcctgttcatcaccaatgagtcgggctactacctggacatcagcctctacaaagaagtgactgactccagatctggaaatatcatgtttcactccttcggcaacaagcaagggccccagcacgggatgctgatcaatactccctacgtcaccaaggatctgctccaggccaagcgattccaggcccagaccctgggaaccacctacatctatgacttcccggaaatgttcaggcaggctctctttaaactgtggggctccccagacaagtatcccaaagacatcctgacatacactgaattagtgttggactctcagggccagctggtggagatgaaccgacttcctggtggaaatgaggtgggcatggtggccttcaaaatgaggtttaagacccaggagtacccggaaggacgggatgtgatcgtcatcggcaatgacatcacctttcgcattggatcctttggccctggagaggaccttctgtacctgcgggcatccgagatggcccgggcagagggcattcccaaaatttacgtggcagccaacagtggcgcccgtattggcatggcagaggagatcaaacacatgttccacgtggcttgggtggacccagaagacccccacaaaggatttaaatacctgtacctgactccccaagactacaccagaatcagctccctgaactccgtccactgtaaacacatcgaggaaggaggagagtccagatacatgatcacggatatcatcgggaaggatgatggcttgggcgtggagaatctgaggggctcaggcatgattgctggggagtcctctctggcttacgaagagatcgtcaccattagcttggtgacctgccgagccattgggattggggcctacttggtgaggctgggccagcgagtgatccaggtggagaattcccacatcatcctcacaggagcaagtgctctcaacaaggtcctgggaagagaggtctacacatccaacaaccagctgggtggcgttcagatcatgcattacaatggtgtctcccacatcaccgtgccagatgactttgagggggtttataccatcctggagtggctgtcctatatgccaaaggataatcacagccctgtccctatcatcacacccactgaccccattgacagagaaattgaattcctcccatccagagctccctacgacccccggtggatgcttgcaggaaggcctcacccaactctgaagggaacgtggcagagcggattctttgaccacggcagtttcaaggaaatcatggcaccctgggcgcagaccgtggtgacaggacgagcaaggcttggggggattcccgtgggagtgattgctgtggagacacggactgtggaggtggcagtccctgcagaccctgccaacctggattctgaggccaagataattcagcaggcaggacaggtgtggttcccagactcagcctacaaaaccgcccaggccgtcaaggacttcaaccgggagaagttgcccctgatgatctttgccaactggagggggttctccggtggcatgaaagggtgcctggggacctggagagatgtgtcttggtggaagataagggccatgttgcccatgcacattggggaaggatcagtgtgactacatgtatgaccaggtgctgaagtttggagcctacatcgtggacggccttagacaatacaaacagcccatcctgatctatatcccgccctatgcggagctccggggaggctcctgggtggtcatagatgccaccatcaacccgctgtgcatagaaatgtatgcagacaaagagagcaggggtggtgttctggaaccagaggggacagtggagattaagttccgaaagaaagatctgataaagtccatgagaaggatcgatccagcttacaagaagctcatggaacagctaggggaacctgatctctccgacaaggaccgaaaggacctggagggccggctaaaggctcgcgaggacctgctgctccccatctaccaccaggtggcggtgcagttcgccgacttccatgacacacccggccggatgctggagaagggcgtcatatctgacatcctggagtggaagaccgcacgcaccttcctgtattggcgtctgcgccgcctcctcctggaggaccaggtcaagcaggagatcctgcaggccagcggggagctgagtcacgtgcatatccagtccatgctgcgtcgctggttcgtggagacggagggggctgtcaaggcctacttgtgggacaacaaccaggtggttgtgcagtggctggaacagcactggcaggcaggggatggcccgcgctccaccatccgtgagaacatcacgtacctgaagcacgactctgtcctcaagaccatccgaggcctggttgaagaaaaccccgaggtggccgtggactgtgtgatatacctgagccagcacatcagcccagctgagcgggcgcaggtcgttcacctgctgtctaccatggacagcccggcctccacctgaccgtggcccgcccagccactcccgggaccacggcaaaaggaaccacccagacccaccacccgtacaccctcagcagaccctgaagacttgcttttaaacaaagaaaatcctgggcacttctgcagggctgctggttccgagctgacacccgtcttaacaaaaggcccaggagtgcctcttccaaac

SEQ ID NO: 9458 - protein, 858 aa, Homo sapiens
MTVPISITNPDLLRHSTELFMDSGFSPLCQRMGAMVAFRRFEDFTRNFDEVISCFANVPKDTPLFSEARTSLYSEDDCKSLREEPIHILNVSIQCADHLEDEALVPILRTFVQSKKNILVDYGLRRITFLIAQEKEFPKFFTFRARDEFAEDRIYRHLEPALAFQLELNRMRNFDLTAVPCANHKMHLYLGAAKVKEGVEVTDHRFFIRAIIRHSDLITKEASFEYLQNEGERLLLEAMDELEVAFNNTSVRTDCNHIFLNFVPTVIMDPFKIEESVRYMVMRYGSRLWKLRVLQAEVKINIRQTTTGSAVPIRLFITNESGYYLDISLYKEVTDSRSGNIMFHSFGNKQGPQHGMLINTPYVTKDLLQAKRFQAQTLGTTYIYDFPEMFRQALFKLWGSPDKYPKDILTYTELVLDSQGQLVEMNRLPGGNEVGMVAFKMRFKTQEYPEGRDVIVIGNDITFRIGSFGPGEDLLYLRASEMARAEGIPKIYVAANSGARIGMAEEIKHMFHVAWVDPEDPHKGFKYLYLTPQDYTRISSLNSVHCKHIEEGGESRYMITDIIGKDDGLGVENLRGSGMIAGESSLAYEEIVTISLVTCRAIGIGAYLVRLGQRVIQVENSHIILTGASALNKVLGREVYTSNNQLGGVQIMHYNGVSHITVPDDFEGVYTILEWLSYMPKDNHSPVPIITPTDPIDREIEFLPSRAPYDPRWMLAGRPHPTLKGTWQSGFFDHGSFKEIMAPWAQTVVTGRARLGGIPVGVIAVETRTVEVAVPADPANLDSEAKIIQQAGQVWFPDSAYKTAQAVKDFNREKLPLMIFANWRGFSGGMKGCLGTWRDVSWWKIRAMLPMHIGEGSV

SEQ ID NO: 9459 - DNA, 738 bp, Homo sapiens
agctaaaacatccctgtttccttttgcaaaacagtgcctggcatgtgggatccaggcgttctttaggatccttggataccacatcgtgaaatcttttatttttttactctgagaccagcaccagatgtaagtaagcatctcatatatttcagccaaataaatgggccaagggaaaaaaatatatatatatagacaggactagagaaaacctatttttgtaatgatgtttctttggatactgtctagtcacccagaaaaatgtatggatgaatttttttttttttttttgagacaaagtctcactgtgtcatgcaggctggagtgcagtggcatgatctcactgcaacctccatctcctgtctcagcctcctagataactgggattacaggtgcccaccaccatgcccggctaatttttgtatttttggtagagacagagtttcaccaggttggtcaggctggtctcaaactcttgacttcaggtaatccacccaccttggcctcccaaagtgctgggattacaggcatgagccaccatcttcagccagatgatttttttattgagagagtgaaatgctattttgttccccaaatggcgtgctttgggaactgaaggtttttctgttgggaaggccctcttggttttggagagaaagacaagttatgagtagctgctaccctggaacggtgggcagagagcctactaggaaatgtgcagaataaactattttttgaagg

SEQ ID NO: 9460 - protein, 49 aa, Homo sapiens
MLFCSPNGVLWELKVFLLGRPSWFWRERQVMSSCYPGTVGREPTRKCAE

SEQ ID NO: 9461 - DNA, 956 bp, Homo sapiens
tgatctcactgcaacctccatctcctgtctcagcctcctagataactgggattacaggtgcccaccaccatgcccggctaatttttgtatttttggtagagacagagtttcaccaggttggtcaggctggtctcaaactcttgacttcaggtaatccacccaccttggcctcccaaagtgctgggattacaggcatgagccaccatcttcagccagatgatttttttattgagagagtgaaatgctattttgttccccaaatggcgctagtgaatcactaggagggtcccactgataggccatgtttagcactggttgccagggattctctttttgagagagggaaagcaaaatgaatggaagtacccagctggaggtttcagggcttctggaggatgctctcgcatagctcgaggtcctctgcccacctcttctctccaaggaaaatgaggactgccccttccccctgcaggattggcccccagcctgcgcatgcaccctcctcttgcccaagtggggagcacagaggcggagaggaatcccttaccacacccacggcccagcttgctcacgagtgtcacctctgtgacggtcaccactgctcccttggagggccacttgagttactgttgcttcctcgcctgctggcttgatgagcaccgatggtgggatctgaccccgaggggcagagctgtcggtgactgaggactggactgtggtgaccatgccgatttgctcagtgaggggtgggagaaggtgaatgattcattattccaccccgaggtttgctggggtgaggggaagaatcgatgctgctttgggaactgaaggtttttctgttgggaaggccctcttggttttggagagaaagacaagttatgagtagctgctaccctggaacggtgggcagagagcctactaggaaatgtgcagaataaactattttttgaaggaaa

SEQ ID NO: 9462 - protein, 98 aa, Homo sapiens
MEVPSWRFQGFWRMLSHSSRSSAHLFSPRKMRTAPSPCRIGPQPAHAPSSCPSGEHRGGEESLTTPTAQLAHECHLCDGHHCSLGGPLELLLLPRLLA

SEQ ID NO: 9463 - DNA, 4464 bp, Homo sapiens
agccacgtgactgtgttccggctcggtaaagatggcggcgcccagggcggtagcgtgaaacttggtggaagacgctgaccagtcgtgttggaatcaaaacagcggggaccctgcgccatgtcgcgactgatcgtgaagaatctcccgaatgggatgaaggaggagcgtttcaggcagctgtttgccgccttcggcacgctgacagactgcagcctgaagttcaccaaagatggcaagttccgcaagtttggttttattggcttcaagtccgaggaagaggcccagaaggcacagaagcatttcaacaagagcttcatcgacacatcccggatcacagtggagttctgcaagtcattcggggacccggccaaacccagagcctggagcaaacatgcccagaaaccaagccagcccaagcagcctccaaaagactctactactccagaaattaagaaagatgagaagaagaaaaaggtggcaggtcaactggagaagctgaaggaggatacagagttccaggagtttctgtcagttcatcagaggcgggcgcaggcagccacttgggcgaatgatggcctggatgctgagccctcgaaagggaagagcaagccggccagtgactacctgaacttcgactccgattctgggcaggagagtgaggaggagggagccggggaggacctggaagaagaggcaagcctcgaaccaaaggcagctgtgcagaaggagctgtcggacatggattacctgaaatccaagatggtgaaggctgggtcgtcctcttcctcggaggaagaggaaagtgaagatgaagccgtgcactgtgatgaagggagtgaggccgaggaagaggattcctccgccaccccagtcctgcaggaaagagacagcaagggtgcaggccaagagcaagggatgccagctgggaaaaagagaccaccggaggccagagccgagacagagaaaccagcaaaccagaaggaacccaccacctgccacaccgtgaagctgcggggagccccgttcaatgtcacagagaaaaatgttatggaattcctggcacccctgaaaccagtggccattcgaattgtgagaaacgctcatgggaataaaacaggatacatctttgtggatttcagcaatgaagaggaagtgaagcaagctctgaaatgcaaccgggagtacatgggtgggcgctacatcgaggtgttcagggaaaagaacgtccccaccaccaagggtgcaccaaagaataccaccaaatcctggcaaggccggatactcggggagaacgaagaggaggaggacctggccgaatccggaaggctctttgtacggaacctgccctacaccagcaccgaggaggatctggagaagctcttctccaaatatggtcccctgtctgagctccactaccccatcgacagcctgaccaagaaacccaagggttttgcattcatcaccttcatgttccctgagcacgctgtgaaggcctactcggaggtggacgggcaggtattccagggcaggatgctccacgtgttaccatctaccatcaagaaggaagccagcgaggatgccagtgccctgggatcgtcgtcctacaagaagaagaaggaggcccaggacaaagccaacagtgccagctctcacaactggaacacactattcatggggccgaatgccgtggccgatgccatcgcacagaagtacaacgccaccaagagtcaagtgtttgaccacgagaccaagggcagcgtggccgtgcgcgtggctctgggggaaacccagctcgtccaggaagtgcggcgttttctcatagacaacggggtcagcctggattccttcagccaggctgcagcagagcgaagcaagactgtgattctggtcaagaacctcccggcaggcaccctggcggcccagctgcaggagaccttcggccattttggcagcctgggccgcgtgctgctgccagagggcggaatcactgccatcgtggagttcctggagcccctggaggcccgcaaggccttcaggcatctggcctattccaagttccatcatgtccccctctatctggagtgggctccagttggcgtcttctccagcacagccccacagaagaaaaagctccaagacacaccttcagaacccatggaaaaggacccagcagagccagaaacagtgcctgatggcgaaaccccagaagatgaaaatccaacagaggaaggagcagacaactcttcagcaaagatggaagaggaggaggaggaagaggaagaagaagaagagagcctcccaggatgtactctgtttattaagaatctcaattttgacacaacagaagagaagctgaaggaagtgttttcaaaagtggggacagtgaagagctgctccatctccaagaagaagaacaaagcaggagtgctcctttccatggggtttggatttgtggaatacaggaagccggagcaagcccagaaagctctcaagcagctccagggtcacgtcgtggacggccacaagctggaagtgaggatctcggaacgagccactaagccagccgtgacattggctcggaagaaacaagttcccagaaagcagaccacctccaagatcctggtgcggaacatccccttccaggcccacagccgggagatccgagagctcttcagcacctttggggagttgaagacggtccgcctgccaaagaagatgactgggacaggcacacacagaggcttcggctttgtggacttcctcaccaagcaggatgcgaagagagccttcaacgccctgtgtcacagcacccacttgtacgggcggaggctggtgctggagtgggccgactccgaggtgaccctgcaggccctgcggcggaagacggccgctcactttcacgagcccccgaagaaaaagcggtctgtggtgttggacgagatcctggagcagctggaaggcagtgacagcgacagcgaggagcagacccttcagctgtgagctggcaccgagagggctggagtgcagtggcgtgatctgggctcacctccctggttcaagcgattgtcccgcctcagcctcccaaggctgggattacaggtatgcaccaccacgcccggctaattttgtatttttcatagagactgggtttcaccatgtagaccaggctggtctcgaattcctgacctcaagtgatccacctacctcggcctcccaaagtgtggggattacgggtgtgagccaccacgcccggctaattttttgtatttttagtagacagggtttcaccatgtgggccaggctggtcttgaactcccaacctcaagtgatccacccaccttgttctcccaaagtgctgagattacaggtgtgagccaccatgcccagcctgttcctaaccctttcaactggggggtctcaagtgggtgaggactccatggccacggcagcagaactgtctcttctgaaaaccagactccggggcccctgggtcagcacctctaggtcattccacagacttacacagtttaaagaaagagccagcgaacatggggtgatcctggggtgccactgggatcccaagccaggcccggaggtctgcctgtttcgtccccagaaacttgagctggcatcctccgctggtttgcactgggcacggggactggagagccaccaggccactgagcgcagcatgctatcacttctcaggaagttgtgagggtgaggagaatagccgggcccactctgcagaggggaggaacaggcacaggctagaggcacgggctgatagagtgagtcctctccctcattcattcattcattcattcattcatccatcagacacctgctgggcatctgctgtgtgcgagacactgtgctgggtgccccagacacaagacagaaactcgggtcgctctgtgtgcctccacactggccttccctgctgcgtggacgcaggctctgtctcctaggctttaagccccatgcatcaggtggaagacaatttccagcagcctctgcccgcttgtttttcctcctctccttttcctgccgccttggtcttttttgtcttttgtgcagggccgtctctcgcagcgcccgtctgtgctccgcagcgtctaggaaaggattagtgtgagcagagcacgcaggctttggtgaacagagccgagcttggtttcaacatctaattcaatttgttctgccgagattgaaatatgaaatggttgccagtcaaacgttcaaaggacggggaagggagagtgagcgcatgctgaaatttaaattttaatgaaaatgactttaaccctttggtacaccttgcaaaatgtaacccatcctcccatcctgtgaaagcggcctctcgggttagagcttttccacccacttctcttccactgagcttcactaataatatgtaatcatttttttcagccgtcttaataataaaagattaatagaatg

SEQ ID NO: 9464 - protein, 960 aa, Homo sapiens
MSRLIVKNLPNGMKEERFRQLFAAFGTLTDCSLKFTKDGKFRKFGFIGFKSEEEAQKAQKHFNKSFIDTSRITVEFCKSFGDPAKPRAWSKHAQKPSQPKQPPKDSTTPEIKKDEKKKKVAGQLEKLKEDTEFQEFLSVHQRRAQAATWANDGLDAEPSKGKSKPASDYLNFDSDSGQESEEEGAGEDLEEEASLEPKAAVQKELSDMDYLKSKMVKAGSSSSSEEEESEDEAVHCDEGSEAEEEDSSATPVLQERDSKGAGQEQGMPAGKKRPPEARAETEKPANQKEPTTCHTVKLRGAPFNVTEKNVMEFLAPLKPVAIRIVRNAHGNKTGYIFVDFSNEEEVKQALKCNREYMGGRYIEVFREKNVPTTKGAPKNTTKSWQGRILGENEEEEDLAESGRLFVRNLPYTSTEEDLEKLFSKYGPLSELHYPIDSLTKKPKGFAFITFMFPEHAVKAYSEVDGQVFQGRMLHVLPSTIKKEASEDASALGSSSYKKKKEAQDKANSASSHNWNTLFMGPNAVADAIAQKYNATKSQVFDHETKGSVAVRVALGETQLVQEVRRFLIDNGVSLDSFSQAAAERSKTVILVKNLPAGTLAAQLQETFGHFGSLGRVLLPEGGITAIVEFLEPLEARKAFRHLAYSKFHHVPLYLEWAPVGVFSSTAPQKKKLQDTPSEPMEKDPAEPETVPDGETPEDENPTEEGADNSSAKMEEEEEEEEEEEESLPGCTLFIKNLNFDTTEEKLKEVFSKVGTVKSCSISKKKNKAGVLLSMGFGFVEYRKPEQAQKALKQLQGHVVDGHKLEVRISERATKPAVTLARKKQVPRKQTTSKILVRNIPFQAHSREIRELFSTFGELKTVRLPKKMTGTGTHRGFGFVDFLTKQDAKRAFNALCHSTHLYGRRLVLEWADSEVTLQALRRKTAAHFHEPPKKKRSVVLDEILEQLEGSDSDSEEQTLQL

SEQ ID NO: 9465 - DNA, 3608 bp, Homo sapiens
agccacgtgactgtgttccggctcggtaaagatggcggcgcccagggcggtagcgtgaaacttggtggaagacgctgaccagtcgtgttggaatcaaaacagcggggaccctgcgccatgtcgcgactgatcgtgaagaatctcccgaatgggatgaaggaggagcgtttcaggcagctgtttgccgccttcggcacgctgacagactgcagcctgaagttcaccaaagatggcaagttccgcaagtttggttttattggcttcaagtccgaggaagaggcccagaaggcacagaagcatttcaacaagagcttcatcgacacatcccggatcacagtggagttctgcaagtcattcggggacccggccaaacccagagcctggagcaaacatgcccagaaaccaagccagcccaagcagcctccaaaagactctactactccagaaattaagaaagatgagaagaagaaaaaggtggcaggtcaactggagaagctgaaggaggatacagagttccaggagtttctgtcagttcatcagaggcgggcgcaggcagccacttgggcgaatgatggcctggatgctgagccctcgaaagggaagagcaagccggccagtgactacctgaacttcgactccgattctgggcaggagagtgaggaggagggagccggggaggacctggaagaagaggcaagcctcgaaccaaaggcagctgtgcagaaggagctgtcggacatggattacctgaaatccaagatggtgaaggctgggtcgtcctcttcctcggaggaagaggaaagtgaagatgaagccgtgcactgtgatgaagggagtgaggccgaggaagaggattcctccgccaccccagtcctgcaggaaagagacagcaagggtgcaggccaagagcaagggatgccagctgggaaaaagagaccaccggaggccagagccgagacagagaaaccagcaaaccagaaggaacccaccacctgccacaccgtgaagctgcggggagccccgttcaatgtcacagagaaaaatgttatggaattcctggcacccctgaaaccagtggccattcgaattgtgagaaacgctcatgggaataaaacaggatacatctttgtggatttcagcaatgaagaggaagtgaagcaagctctgaaatgcaaccgggagtacatgggtgggcgctacatcgaggtgttcagggaaaagaacgtccccaccaccaagggtgcaccaaagaataccaccaaatcctggcaaggccggatactcggggagaacgaagaggaggaggacctggccgaatccggaaggctctttgtacggaacctgccctacaccagcaccgaggaggatctggagaagctcttctccaaatatggtcccctgtctgagctccactaccccatcgacagcctgaccaagaaacccaagggttttgcattcatcaccttcatgttccctgagcacgctgtgaaggcctactcggaggtggacgggcaggtattccagggcaggatgctccacgtgttaccatctaccatcaagaaggaagccagcgaggatgccagtgccctgggatcgtcgtcctacaagaagaagaaggaggcccaggacaaagccaacagtgccagctctcacaactggaacacactattcatggggccgaatgccgtggccgatgccatcgcacagaagtacaacgccaccaagagtcaagtgtttgaccacgagaccaagggcagcgtggccgtgcgcgtggctctgggggaaacccagctcgtccaggaagtgcggcgttttctcatagacaacggggtcagcctggattccttcagccaggctgcagcagagcgaagcaagactgtgattctggtcaagaacctcccggcaggcaccctggcggcccagctgcaggagaccttcggccattttggcagcctgggccgcgtgctgctgccagagggcggaatcactgccatcgtggagttcctggagcccctggaggcccgcaaggccttcaggcatctggcctattccaagttccatcatgtccccctctatctggagtgggctccagttggcgtcttctccagcacagccccacagaagaaaaagctccaagacacaccttcagaacccatggaaaaggacccagcagagccagaaacagtgcctgatggcgaaaccccagaagatgaaaatccaacagaggaaggagcagacaactcttcagcaaagatggaagaggaggaggaggaagaggaagaagaagaagagagcctcccaggatgtactctgtttattaagaatctcaattttgacacaacagaagagaagctgaaggaagtgttttcaaaagtggggacagtgaagagctgctccatctccaagaagaagaacaaagcaggagtgctcctttccatggggtttggatttgtggaatacaggaagccggagcaagcccagaaagctctcaagcagctccagggtcacgtcgtggacggccacaagctggaagtgaggatctcggaacgagccactaagccagccgtgacattggctcggaagaaacaagttcccagaaagcagaccacctccaagatcctggtgcggaacatccccttccaggcccacagccgggagatccgagagctcttcagcacctttggggagttgaagacggtccgcctgccaaagaagatgactgggacaggcacacacagaggcttcggctttgtggacttcctcaccaagcaggatgcgaagagagccttcaacgccctgtgtcacagcacccacttgtacgggcggaggctggtgctggagtgggccgactccgaggtgaccctgcaggccctgcggcggaagacggccgctcactttcacgagcccccgaagaaaaagcggtctgtggtgttggacgagatcctggagcagctggaaggcagtgacagcgacagcgaggagcagacccttcagctgtgagctggcaccgagaggggctgctgagctagaattcccacctatgtctttccaagggactgttcacggcttgggacttggtctctgtcctgccccatcctcgtcacttgggaccacgagccctggttcagtcacccagggaagcctcccagcggctcatgaagcatcgagctccaagcccagatgccaagctccctggctgagctgaatgatgtcactcatggtggacgcgttctgctcacgggcccagagccctgtgaaatgcatcaaggtcctctccgctggccagcagcatccccaggcttctctcaggcgcccgtgttcacattttctccagcctgagacgcagcctcccgcctggaagggcctgtgccagcaccaggcagagggcaagacggagagggcagagcaagaactgcactgcatctcactgcagtctgaatctagacatcgccattccccgaggtgcgacctcagactaatgacatcctggctgagcctctgtttttctctctaggaaatgggggtgataattgtgcctacctcagatagacagtgccagaattaagtgagtcaagccaagtaaagcccagagaagattctcatcagca

SEQ ID NO: 9466 - protein, 960 aa, Homo sapiens; identical to SEQ ID NO: 9464

SEQ ID NO: 9467 - DNA, 1068 bp, Homo sapiens
aggcagctgtgcagaaggagctgtcggacatggattacctgaaatccaagatggtgaaggcctcaggccactgcccagcggcccaggcatcctgggtttcaccagtgacgcgttctagcagacactgactgcgcacctgctctgtagcagacacggaagagtccaagggagcagccacgttaggaagagagacttgggaacagctacacagggagctagaacccctgctccccctgtccccaccccaggagagtaaggggacgagggccagctctctggcatcaggctgcttggacatgaaaccccgtctccaagctcaagctgggagaccctggcccagtttccttatctccttgggcccagccttccccttgctagctagttcttacttcataaggttttagagagaaataaacgcagtaatgcatgaagagtgccgggcatggtgctgagccctgttcctgctctccctccagggctgctgagctagaattcccacctatgtctttccaagggactgttcacggcttgggacttggtctctgtcctgccccatcctcgtcacttgggaccacgagccctggttcagtcacccagggaagcctcccagcggctcatgaagcatcgagctccaagcccagatgccaagctccctggctgagctgaatgatgtcactcatggtggacgcgttctgctcacgggcccagagccctgtgaaatgcatcaaggtcctctccgctggccagcagcatccccaggcttctctcaggcgcccgtgttcacattttctccagcctgagacgcagcctcccgcctggaagggcctgtgccagcaccaggcagagggcaagacggagagggcagagcaagaactgcactgcatctcactgcagtctgaatctagacatcgccattccccgaggtgcgacctcagactaatgacatcctggctgagcctctgtttttctctctaggaaatgggggtgataattgtgcctacctcagatagacagtgccagaattaagtgagtcaagccaagtaaagcccagagaagattctcatcagc

SEQ ID NO: 9468 - protein, 32 aa, Homo sapiens
MDYLKSKMVKASGHCPAAQASWVSPVTRSSRH

SEQ ID NO: 9469 - DNA, 4169 bp, Homo sapiens
agccacgtgactgtgttccggctcggtaaagatggcggcgcccagggcggtagcgtgaaacttggtggaagacgctgaccagtcgtgttggaatcaaaacagcggggaccctgcgccatgtcgcgactgatcgtgaagaatctcccgaatgggatgaaggaggagcgtttcaggcagctgtttgccgccttcggcacgctgacagactgcagcctgaagttcaccaaagatggcaagttccgcaagtttggttttattggcttcaagtccgaggaagaggcccagaaggcacagaagcatttcaacaagagcttcatcgacacatcccggatcacagtggagttctgcaagtcattcggggacccggccaaacccagagcctggagcaaacatgcccagaaaccaagccagcccaagcagcctccaaaagactctactactccagaaattaagaaagatgagaagaagaaaaaggtggcaggtcaactggagaagctgaaggaggatacagagttccaggagtttctgtcagttcatcagaggcgggcgcaggcagccacttgggcgaatgatggcctggatgctgagccctcgaaagggaagagcaagccggccagtgactacctgaacttcgactccgattctgggcaggagagtgaggaggagggagccggggaggacctggaagaagaggcaagcctcgaaccaaaggcagctgtgcagaaggagctgtcggacatggattacctgaaatccaagatggtgaaggctgggtcgtcctcttcctcggaggaagaggaaagtgaagatgaagccgtgcactgtgatgaagggagtgaggccgaggaagaggattcctccgccaccccagtcctgcaggaaagagacagcaagggtgcaggccaagagcaagggatgccagctgggaaaaagagaccaccggaggccagagccgagacagagaaaccagcaaaccagaaggaacccaccacctgccacaccgtgaagctgcggggagccccgttcaatgtcacagagaaaaatgttatggaattcctggcacccctgaaaccagtggccattcgaattgtgagaaacgctcatgggaataaaacaggatacatctttgtggatttcagcaatgaagaggaagtgaagcaagctctgaaatgcaaccgggagtacatgggtgggcgctacatcgaggtgttcagggaaaagaacgtccccaccaccaagggtgcaccaaagaataccaccaaatcctggcaaggccggatactcggggagaacgaagaggaggaggacctggccgaatccggaaggctctttgtacggaacctgccctacaccagcaccgaggaggatctggagaagctcttctccaaatatggtcccctgtctgagctccactaccccatcgacagcctgaccaagaaacccaagggttttgcattcatcaccttcatgttccctgagcacgctgtgaaggcctactcggaggtggacgggcaggtattccagggcaggatgctccacgtgttaccatctaccatcaagaaggaagccagcgaggatgccagtgccctgggatcgtcgtcctacaagaagaagaaggaggcccaggacaaagccaacagtgccagctctcacaactggaacacactattcatggggccgaatgccgtggccgatgccatcgcacagaagtacaacgccaccaagagtcaagtgtttgaccacgagaccaagggcagcgtggccgtgcgcgtggctctgggggaaacccagctcgtccaggaagtgcggcgttttctcatagacaacggggtcagcctggattccttcagccaggctgcagcagagcgaagcaagactgtgattctggtcaagaacctcccggcaggcaccctggcggcccagctgcaggagaccttcggccattttggcagcctgggccgcgtgctgctgccagagggcggaatcactgccatcgtggagttcctggagcccctggaggcccgcaaggccttcaggcatctggcctattccaagttccatcatgtccccctctatctggagtgggctccagttggcgtcttctccagcacagccccacagaagaaaaagctccaagacacaccttcagaacccatggaaaaggacccagcagagccagaaacagtgcctgatggcgaaaccccagaagatgaaaatccaacagaggaaggagcagacaactcttcagcaaagatggaagaggaggaggaggaagaggaagaagaagaagagagcctcccaggatgtactctgtttattaagaatctcaattttgacacaacagaagagaagctgaaggaagtgttttcaaaagtggggacagtgaagagctgctccatctccaagaagaagaacaaagcaggagtgctcctttccatggggtttggatttgtggaatacaggaagccggagcaagcccagaaagctctcaagcagctccagggtcacgtcgtggacggccacaagctggaagtgaggatctcggaacgagccactaagccagccgtgacattggctcggaagaaacaagttcccagaaagcagaccacctccaagatcctggtgcggaacatccccttccaggcccacagccgggagatccgagagctcttcagcacctttggggagttgaagacggtccgcctgccaaagaagatgactgggacaggcacacacagaggcttcggctttgtggacttcctcaccaagcaggatgcgaagagagccttcaacgccctgtgtcacagcacccacttgtacgggcggaggctggtgctggagtgggccgactccgaggtgaccctgcaggccctgcggcggaagacggccgctcactttcacgagcccccgaagaaaaagcggtctgtggtgttggacgagatcctggagcagctggaaggcagtgacagcgacagcgaggagcagacccttcagctgtgagctggcaccgagagggtgtgtggctccggggccctggggaccgggacagccgctccagcttctgcactcaccaccatgtgggctggggggcggggcggggagcggcaggcggccccaccctgcactggtccaaggtcggaggagacaggggatgaggaaggcctcaggccactgcccagcggcccaggcatcctgggtttcaccagtgacgcgttctagcagacactgactgcgcacctgctctgtagcagacacggaagagtccaagggagcagccacgttaggaagagagacttgggaacagctacacagggagctagaacccctgctccccctgtccccaccccaggagagtaaggggacgagggccagctctctggcatcaggctgcttggacatgaaaccccgtctccaagctcaagctgggagaccctggcccagtttccttatctccttgggcccagccttccccttgctagctagttcttacttcataaggttttagagagaaataaacgcagtaatgcatgaagagtgccgggcatggtgctgagccctgttcctgctctccctccagggctgctgagctagaattcccacctatgtctttccaagggactgttcacggcttgggacttggtctctgtcctgccccatcctcgtcacttgggaccacgagccctggttcagtcacccagggaagcctcccagcggctcatgaagcatcgagctccaagcccagatgccaagctccctggctgagctgaatgatgtcactcatggtggacgcgttctgctcacgggcccagagccctgtgaaatgcatcaaggtcctctccgctggccagcagcatccccaggcttctctcaggcgcccgtgttcacattttctccagcctgagacgcagcctcccgcctggaagggcctgtgccagcaccaggcagagggcaagacggagagggcagagcaagaactgcactgcatctcactgcagtctgaatctagacatcgccattccccgaggtgcgacctcagactaatgacatcctggctgagcctctgtttttctctctaggaaatgggggtgataattgtgcctacctcagatagacagtgccagaattaagtgagtcaagccaagtaaagcccagagaagattctcatcagc

SEQ ID NO: 9470 - protein, 960 aa, Homo sapiens; identical to SEQ ID NO: 9464

SEQ ID NO: 9471 - DNA, 9380 bp, Homo sapiens
ctcggacgcctcgctccgacatgccccgctctggcggccgggctcgcggaggatcatgactgcggcagcgaactgggtggcgaacggggcgagcctggaggattgtcactccaacctcttttcgctggctgaactcacgggaatcaaatggcgtaggtacaattttggagggcatggggactgtggacccataatttcagccccagcccaagatgatccaattctgttaagtttcatccgctgtctgcaagctaacctgctttgtgtatggcgtcgtgatgtcaaaccagattgcaaagagttatggatattctggtggggagatgaacccaacctagtgggtgtaatacatcatgaactgcaggttgtggaagaaggactctgggaaaatggcctttcctatgaatgtaggacgctgctcttcaaagcgatccacaatctgttagaaaggtgcctaatggataagaacttcgttaggattgggaaatggtttgtccgaccctacgaaaaggatgaaaagccagtcaacaaaagtgagcatttgtcctgtgctttcacattctttctgcatggagaaagtaatgtatgcacaagtgtggagattgcccagcaccagccaatttatttgatcaatgaggagcatatacacatggctcagtcttcacctgcaccatttcaagtactggtaagtccttatggcttaaatgggacgctaacaggccaagcatacaagatgtcagacccagccactcgtaagttgattgaggaatggcagtatttctacccgatggtgctaaaaaagaaagaagaatcgaaagaggaagacgagttgggatatgatgatgatttccctgtggcagttgaagtaattgttggtggtgttcggatggtttacccttcagcatttgttttgatctctcagaatgacatcccggttcctcagagtgttgccagtgctggaggccacattgcagttgggcagcaagggcttggtagtgtgaaggacccaagtaactgtgggatgcctctgacccctcccacctctccagaacaggctatcctaggtgagagtggaggtatgcagagtgctgccagtcacctggtttcccaagatggagggatgataacgatgcacagtccaaagagatcggggaagattcctccaaaactccacaatcatatggtccatcgagtctggaaggaatgcatcctcaacagaacccagtccaagaggagccaaatgtcaactccaactcttgaagaagagcctgctagcaatcctgctacttgggattttgtggatccaacccaaagagtcagctgttcttgttccaggcataagcttttaaaacgttgtgcagtcgggcccaatcgacctcccacagtatctcaaccagggttcagtgcaggaccatcatcatcttcatctttaccacctcctgcttcttctaagcacaaaacagcagaaagacaggaaaaaggagacaagctgcaaaagagacccttaataccatttcaccataggccctctgtggccgaagaattatgcatggagcaagatacaccaggacagaaactagggttggcagggatagactcctccttagaggtgtctagcagtaggaaatatgataagcaaatggccgtgccttccagaaatacaagcaagcaaatgaatctgaatcctatggattcacctcattcccctatatcccctctgccaccaacactcagccctcagccacgaggtcaggaaacagagagtttggacccaccatcggtccctgtgaatccagccctttatggaaatggactagaactccagcagttgtctactctggatgacagaactgtcctcgtaggccaaagactgcctctcatggcagaggtcagcgagacagccttatattgtgggattaggccctcgaacccggagtcatcagaaaagtggtggcatagttatcgtctcccacccagtgatgatgctgagttcaggcctccagagctccagggtgagagatgtgatgccaaaatggaggtaaactcagagagcactgcattgcaaagactcttagcacaacctaacaaacggtttaaaatctggcaagacaaacagccccagttgcagccactccacttccttgacccattgcctctatcacaacaacctggagacagtttgggagaagtgaatgacccatatacctttgaagatggtgacataaaatacatctttacagccaacaagaaatgcaaacaagggacggagaaagattccctgaaaaagaataagtcagaggatggatttggtaccaaggatgtcactacaccaggtcattccacgccggtgcctgatgggaaaaatgccatgtctattttcagttctgctactaaaacagatgtccggcaggataatgctgctggcagagctggctccagtagccttacacaggtaacagatttggcaccttccctgcatgacttagacaacatctttgataattctgatgacgacgaacttggggctgtatcacctgctctgcgctcatcaaaaatgcctgcagttgggacagaagaccgacctcttgggaaggatggaagagctgctgttccttatccaccaacagttgcagacttgcaaaggatgtttcccactccaccatctttggaacagcatcctgcattttctcctgtgatgaattataaagatgggatcagctcagagacagtgacagcattaggcatgatggagagccctatggtcagtatggtttcaacacaactcacagaattcaaaatggaagtggaagatggattaggaagtcccaagcccgaggaaattaaggacttttcatatgtgcacaaagttccatcctttcaaccttttgtgggatcctccatgtttgctccactgaagatgttgccgagccattgtttgctacctctgaagatacctgatgcctgtctgtttcggccttcatgggcaattcctcctaaaattgaacaactgcccatgccccctgcagccactttcattagagatggctacaataacgtgcctagtgttgggagcctagcagatccagactatctgaacacaccacagatgaacacacccgtgacgttgaacagcgctgccccagccagcaatagtggggcaggagtcctaccatctccagcaacccctcgcttctctgtccccacaccacgaacccccaggaccccaagaactcccagaggtgggggcactgccagtggtcaagggtctgttaagtatgatagcaccgatcaaggatcaccagcctccaccccctctactacacggcccctcaactctgtggagcccgccaccatgcagccaattcccgaagcccacagcctctatgttaccctgattctctccgattccgtgatgaatatctttaaagacagaaactttgacagctgttgcatctgtgcctgcaacatgaacatcaaaggggcggatgtcgggctttacatccccgattcttccaatgaggaccagtaccgctgtacctgtgggtttagtgcgattatgaaccgcaaacttggctacaattcaggactcttccttgaagatgagttggatatttttgggaagaattctgatattggtcaggctgcagagaggcgcttaatgatgtgtcagtccaccttccttcctcaggtggaaggaaccaaaaaaccccaggagccacccataagccttctcctcctcctccagaatcaacacacacaaccttttgcttcactgaatttcctggactacatttcctctaacaatcgccaaactcttccctgtgtaagctggagttatgaccgggtgcaagcagataataatgattactggacggaatgctttaatgcgttggagcaggggcggcagtatgtggataaccccactggtggaaaagtggacgaagctctggtgagaagtgccactgtgcactcttggcctcacagcaatgtgctggacatcagcatgctctcctcccaggatgtggttcgtatgctgttgtccctgcagccctttctccaagatgccatccaaaagaagcgcacgggcaggacctgggagaacatccagcatgtgcagggaccactcacttggcagcagttccataaaatggcaggacggggaacctacggttcggaagaatctcctgagccgttgcccatccccactctgctggtaggctatgacaaggatttcctcaccatctcgccattctccttgccgttttgggagaggctcttgttggacccatatgggggccaccgtgatgttgcctatattgtggtgtgtccagaaaatgaggccttgctcgaaggagccaaaactttcttcagggacttgagtgctgtatacgagatgtgtaggcttgggcagcacaagcccatctgcaaagtgctacgtgacgggatcatgcgcgtgggaaaaactgtggcacagaagctgacagatgagcttgtgagtgagtggtttaaccagccttggagcggcgaggagaatgacaatcattccagactcaaactttatgcgcaagtttgccgccatcacctagcaccttatttagccactctgcagcttgatagcagcctattgataccacctaaataccagaccccaccagcagcagcacagggacaagctacgccagggaatgctgggcccttagctccaaatggatcagcagctcccccagctggcagtgcatttaatcccacctcgaatagtagttctacaaatcctgcagcaagtagttctgcatctggttcctctgtgccaccggtctcatcgtctgcctctgctcctggtattagccagataagcactacctcttcttcaggattcagtggtagtgttggagggcagaaccccagcactgggggcatttctgcggatagaacgcaagggaacataggctgtggtggagacactgaccctgggcagagctcttctcagccctcacaggatggacaagagagtgttacagaaagggagagaataggaattcccacggagcctgactctgcagacagccatgcccaccctccagctgttgtcatttacatggtggacccgttcacgtatgctgcagaggaggactccacttctgggaacttttggctgttgagcttgatgcgctgctacacagaaatgctggataatttacctgagcatatgagaaattctttcattctccagattgtgccttgccagtacatgctgcagacaatgaaggatgagcaagttttctacattcaatacttgaagtccatggcattttcagtgtactgccagtgcaggcgaccactgcctacacagatccacattaaatccctcacgggatttgggcctgcagccagcattgagatgaccctcaagaaccctgagcggcccagcccaatccagctttactcccctccctttatattggccccaatcaaagacaagcagacagagctgggagagacgtttggtgaggcgagccagaaatacaatgtgctcttcgtgggctattgtctgtctcacgaccagcgctggcttttggcttcctgcactgacctccatggggaattattagagacctgcgttgtaaatattgctttaccaaacaggtcacggaggagtaaagtatctgcacgtaaaattggactacagaagttatgggagtggtgcatagggattgtccaaatgacatctctaccctggagagttgtaatcgggcgacttgggcgtcttggccatggggagcttaaagattggagtatcctccttggagaatgttcactacagacaatcagcaaaaagctcaaggatgtgtgccggatgtgtggaatctctgccgcagactctccttctatccttagtgcctgcctggttgccatggagccccaggggtcctttgtagtgatgccagatgctgtcacaatgggctctgtttttggccgaagtactgcactgaacatgcagtcatctcagctcaacacccctcaagatgcttcttgtacacacatcttggtgttcccaacatcatcaaccatccaggtggctccagccaactaccccaatgaagatgggtttagccccaacaatgatgatatgtttgttgaccttccattcccagatgatatggacaatgatattggcatattaatgactgggaacctccattcctctcccaactcttccccagtaccctccccaggctctccttctggaattggtgtgggctctcacttccagcatagtcggagccagggtgagcgtcttctttctagagaagcaccagaggagctaaagcagcagcccctggcccttgggtattttgtatcaactgccaaagctgagaatcttccccagtggttttggtcatcgtgtccccaggctcaaaaccagtgccctctcttcttaaaggcttcgctgcatcaccacatttcagtagcacagacagacgaacttctgcctgccaggaattctcagcgggttccacaccctcttgactccaaaaccacgtcggatgttttaaggtttgttttggagcagtacaacgctctgtcctggctcacgtgcaatccggccacccaggaccgtacttcctgccttcccgtccactttgtggtgctcactcagttgtacaatgccatcatgaatatactttaattggaaaagcacttgttctctctggctcagttccttctccctgcaacctcagtccaaggaacctgctacactctgcaaataacccacatccttttcttcagaccactctccacagtcctgcactgtgattccttctcagcaggcacatgtcaattctgcagtgttcattaccagagtgactccttgacacttctctcatggacctggaaacttccataagtggtgactttcagccagtgcggtggtgtgtgtagccccaaccactggtccccaggaagtggtggtggttgatggcttttcagcgggaaacagaagagacagtgtccttttgcacaagagtctgtgttttcagcctctgtatacaattgagggcagtctagccctttggatgaaatcctcttagttactggtgtatggcctgtgggttacctgaactccataatctgggactttttaaaaataagaaccagctcaagtacatggtttcatactggggtttctgtctccctagtgttcccatccagattagcatgagtgctttggttgacttcaaacctgtgtgtcaatgcagaaggtctggagacagcttcattttgtttatttattttaatttgttttgtcatatggtttttgtgactttatttttttaattcacaaggaccaggtacagtagctgaaacccaattcagatccaccataggattctttgactacatacctctgtcctagaagccggaaaaggagtaaaaacacattggggagatcatgcctaaaagtaatatattcaaaaccacccagcagtaggttttgttaacaacaaactggattttaaaagttctgccatgttaagtggccagcatttcatgaaggataacatttttatacagaaggcagtcaagctcaactcagagccatggaggcaagtaccttaattagttttatatagtcacaacggaaatatattttctagtgaattcttattggaagccaggtctctcctctcattagatcaaaagggacttatgtacatacaacaattgaaagtgtttgctcatgaaatcagttataaatatggtgaattttttctggaccataggaatattatttcaaagaaatattacaacttaaccattaaattagtacttgaagttgagcctttgtggtgggactttttaaaaaaatgcctttttaaagcattaatggctaattgaagtattttatgactcctcattcctggcccagagggttgtctttgaaaccctgtttctaacccttgtgttgtgtgtttctgtctgaggacagtgggtgtgtactggcctcccgggagccactgtgaccaggcctttgagctcttgtcatctgtggagagaatcatgcaaattttaaaagttcttccaagagacttccatgtcctggttattaacaaaaaaggaaaaatgtaataattgatatgattttgtaaaagtatttttcttgaaataatctaaagtttaaaacattatattaaaaaaaaagttgtgtggtgggaatgtgaaagcagagaaataacttgtaaatggataattttgttctctgtaccaccagttgaagggggggttgactttcgcaatgtataggataaaaaatctgatatatcaaaccatttgtatctaatgtgtacagtgtaaaattgactttaaaaatattgcagtgctattttttcttaatcagaaaggaaaattctcaaggccttttgaagagcataagaagatgaagattgtaaacttgtataaaattatcttggtgagaagacaaattgtaaagtagatatttgtaatcttttaccactttggggttgcttttttcccggaattcatcagaactttgaattttttttttaaatgggctgtttttaatgcaggggcttttcttccctagaaacccaattctaagcagaaaaagaaaaaaaacacaaaaaataaaaaacccctacaaaaaaactttaaaaaaaatggcagcaaagggtagttttcatctggtgtcttttatttaagttttttaagttaagaaaagctggtgacatatttatacgtttttgtgcaaaaataaatgaatggcaatagattttaaaaaatcttattatgtacttctgtgtgaaaaagtctgtataatatttcccttaaatatgcattattttacttgtgagttttttactgaattaatctgaaatgtacaagccctggatttgctacagagtgagaagttattttatttttttttatttttaattttggaaattctgcagaaatcagaactcttaccatggtttgaacaaaaaaaggggaaatggggaggggaaaagggtgggattgtccagcatgcttgtatgtatatttcagaaccttttttaaatgtaaaagctgtacatttctgggaagttctgaatttcttttgtttccttttttccttcaagcattttgcagtgagcttcttttatatatagcaaacaatttgaaagaatacaaaaatatgtgaagttcatttaaaaaaataactacagtatagcgctggtacagtacactaaaagactttgataaaaagaaacaataataaaaggcctccattttaaatgtcattcatatataccttgtggatgagagctatatacttttacacacttttttagaggaataaattattgaattactgaagc

SEQ ID NO: 9472 - protein, 2210 aa, Homo sapiens; identical to SEQ ID NO: 1461

SEQ ID NO: 9473 - DNA, 962 bp, Homo sapiens
ggctgaactcacgggaatcaaatggcgtaggtacaattttggagggcatggggactgtggacccataatttcagccccagcccaagatgatccaattctgttaagtttcatccgctgtctgcaagctaacctgctttgtgtatggcgtcgtgatgtcaaaccagattgcaaagagttatggatattctggtggggagatgaacccaacctagtgggtgtaatacatcatgaactgcaggttgtggaagaaggactctgggaaaatggcctttcctatgaatgtaggacgctgctcttcaaagcgatccacaatctgttagaaagatttggtcagaggaagcccctttgtgatggctcgctcctatgtccttttgacatgatcccatcgttggagcatccccttactttctggcatagcaatatgttccaggctctgaatagtgttttgaggggagaagtggatgagaaagaatgggttcattaagagcttgtatgagaaaaactttttacgtctcttcctgagtctgtatgtagtactttcaggtaatcaaagctgtgaggacttaccagtttcttatccaaactattggctagggtggttaccactgtaatacaactgcttaggacacttgaactacagttgatatgttatttaagctactcagaaagacttttctgacggaagatttctctatttctcattctcaactttagctcctctgagtgttcctccaaatctgtcttttggagtagacctagaaatcatctgttactaaggtgtactatgcatgtggaaccattgatttaagagttgagtactcttaagtattctaaatatttggtaattctgtctcccactgtaaaacgaaacaaagtacacagaaactctatccaagaaaatgtggaaaacttactgttgccataatcctgtaccagaataaagctcttggtatctctgcaat

SEQ ID NO: 9474 - protein, 30 aa, Homo sapiens
MNCRLWKKDSGKMAFPMNVGRCSSKRSTIC

SEQ ID NO: 9475 - DNA, 491 bp, Homo sapiens
aaagatgatttataaaggatgtgtacaggttagatttcgaggggactgttttctgtttaagaagtaactcattttgccgggtgcggtggctcatgcctgtactttgggaggctgaggtgggctggtctccaactcctgggcttaagtgatcttccctctgtggtggcctcccaaaatgttgggataacaggcgtgaaccactgtgcctggctgggttttcatacatgcaagtttacacatgtattttatcttacatgatagactgacattcacttagacaactctagaagctaaatttgtaatctgttcagataggtgttggcagctagtaacaactatcccatagagttatcccataggcatcaatattttaaccaaaatctggattggagaaacttagtcattatggggcctatctgttagcaaaatcgaatagtcagatatgctttgaccttaggttcctttagccaaaccttttttgtttttcccag

SEQ ID NO: 9476 - protein, 65 aa, Homo sapiens
EVTHFAGCGGSCLYFGRLRWAGLQLLGLSDLPSVVASQNVGITGVNHCAWLGFHTCKFTHVFYLT

SEQ ID NO: 9477 - DNA, 4057 bp, Homo sapiens
agtcgcccagagaagcgggagtgggagaagctttgagagttgcaggggactacttttttccggtcgggcggcgggcctcatgggtgcttgtttaccgggctgggagcagggcattcaaaagctgggtgtcggagcgcactgaagtccaacacgcctgcagagaccgccctaagcctggaggtgtgtctggcttgcatccagaaccacagggtggattctcgccaccgacttggctggatgacggctggctggtggtgagctcccctgcccactggctgacctcaagcagttggccccggtaggtggaggctattcgagggggacaagctggggacgcagcgtcagctcctgccagcgcgcgggtctcctccacctccaagcagtgtggtgcgtgggacgcgcatcttcccggactatccctttccagcgcggtctgtgcggaccccgagcccggcagccaccagggacggagggcggggtgcctttctctgggctcatccgctgtcagccgtgggaactcttaactttatccagagggatctgtgcaggcgggggtgggagaggttctcctcccctggcggttacctccccctcccgggccgcccctcccccgcctcccatggcttcgctttcagagcatcctcactccgcccagttcggtgccagctgcgtgggctccagcttcgatcgttttccttggaatgctccaaaactcagcagcgactaagggaattccattggaatttgccgggcgtgctctcaccccgcacggcacccgcgccgtcagtcctcggatcccatcacttcagcccgaagattgcaactttgcagagacgaagaaatagcatggcatgaaacatggctcagttctattacaaaagaaatgttaatgctccctatagagaccgcatccctctaaggatagtaagagcagaatcagaactctcgccatcagaaaaagcctacttgaatgctgtggaaaagggagattatgccagtgtcaagaaatccctagaggaagctgaaatttattttaaaatcaatattaattgcattgatcctctcggaagaactgctctcctcattgcaattgaaaatgagaacttggagctcatcgaactactcttaagctttaatgtctatgttggagatgctctattacatgctatcagaaaagaagtcgtcggagctgttgagctgttattgaaccacaaaaaacctagtggagaaaaacaggtgcctcctatactccttgataagcagttctctgaattcactccagacattacaccaatcattttggcagcccatacaaataattatgagataataaaactcttggttcagaaaggagtctcagtgcctcgaccccacgaggtccgctgtaactgtgtggaatgcgtgtccagttcagatgtggacagcctccgtcactcacgctccagactcaacatctacaaggccttggccagtccctctctcattgcactgtcaagcgaagatccttttctcacagcctttcagttaagttgggaacttcaggaactgagcaaggtggaaaatgaattcaagtcggagtatgaagagctgtcacggcagtgcaaacaatttgctaaggacctactggatcagacgagaagttccagagaactggaaatcattcttaattaccgagatgacaatagtctcatagaagaacaaagtggaaatgatcttgcaagactaaaattggccattaagtaccgtcaaaaagagtttgttgcccagcccaattgtcaacagctgctggcatctcgctggtacgatgagtttccaggctggaggagaagacactgggcagtgaagatggtgacatgtttcataataggacttctttttcctgtcttctctgtgtgctacctgatagctcccaaaagcccacttggactgttcatcaggaagccatttatcaagtttatctgccacacagcctcctatttgacttttttgttcctgctgctgcttgcctctcagcacatcgacaggtcagacttgaacaggcaaggtccaccaccaaccatcgtcgagtggatgatattaccgtgggtcctgggcttcatatggggagaaattaaacagatgtgggatggcggacttcaggactacatccatgattggtggaatctaatggactttgtaatgaactccttatatttagcaacaatctccttgaaaattgttgcatttgtaaagtacagtgcccttaatccacgagaatcatgggacatgtggcatcccactctggtggcagaggctttatttgctattgcaaacatcttcagttctctgcgtctgatctcactgtttactgcaaattctcacctgggacctctgcaaatatctctgggaagaatgctcctggacattttgaagtttctattcatatactgccttgtgttgctagcatttgcaaatggcctaaatcaattgtacttctattatgaagaaacgaaagggttaacctgcaaaggcataagatgtgaaaagcagaataatgcattttcaacgttatttgagacactgcagtccctgttttggtcaatatttgggctcatcaatttatatgtgaccaatgtcaaagcacagcatgaatttactgagtttgttggtgccaccatgtttgggacatacaatgtcatctctctggttgttctactcaacatgttaatagctatgatgaataattcttaccaactgattgctgaccatgcagatatagaatggaaatttgcacgaacaaagctttggatgagttattttgaagaaggaggtactctgcctactcccttcaatgtcatcccgagccccaagtctctctggtacctgatcaaatggatctggacacacttgtgcaagaaaaagatgagaagaaagccagaaagttttggaacaatagggaggcgagctgctgataacttgagaagacatcaccaataccaagaagttatgaggaacctggtgaagcgatacgttgctgcaatgattagagatgctaaaactgaagaaggcctgaccgaagagaactttaaggaactaaagcaagacatttctagtttccgctttgaagtcctgggattactaagaggaagcaaactttccacaatacaatctgcgaatgcctcgaaggagtcttcaaattcggcagactcagatgaaaagagtgatagcgaaggtaatagcaaggacaagaaaaagaatttcagcctttttgatttaaccaccctgattcatccgagatcagcagcaattgcctctgaaagacataacataagcaatggctctgccctggtggttcaggagccgcccagggagaagcagagaaaagtgaattttgtgaccgatatcaaaaactttgggttatttcatagacgatcaaaacaaaatgctgctgagcaaaatgcaaaccaaatcttctctgtttcagaagaagttgctcgtcaacaggctgcaggaccacttgagagaaatattcaactggaatctcgaggattagcttcacggggtgacctgagcattcccggtctcagtgaacaatgtgtgttagtagaccatagagaaaggaatacggacacactggggttacaggtaggaaagagagtgtgtccattcaagtcagagaaggtggtggtggaggacacggttcctataataccaaaggagaaacatgcaaaagaagaggactctagtatagactatgatctaaacctcccagacacagtcacccacgaagattacgtgaccacaagattgtgatacttgaaggaggaagcgtttaccatacacatacgtattttccgtagtgctctgggtgggggaaaatgtttaaattgtattagcaaatgctaacttacactttatagcgtttatcagctgtggcatattacctgtaacatgtttaaataaggcaaaggcaatcaaaaacctttttgttttgtagcctgcttttgctttcacaatttgtcttacaattgtttttgttaataaataaatgcaccttgtattcttgtactgttgcaat

SEQ ID NO: 9478 - protein, 977 aa, Homo sapiens; identical to SEQ ID NO: 1463

SEQ ID NO: 9479 - DNA, 2661 bp, Homo sapiens
atggctcagttctattacaaaagaaatgttaatgctccctatagagaccgcatccctctaaggatagtaagagcagaatcagaactctcgccatcagaaaaagcctacttgaatgctgtggaaaagggagattatgccagtgtcaagaaatccctagaggaagctgaaatttattttaaaatcaatattaattgcattgatcctctcggaagaactgctctcctcattgcaattgaaaatgagaacttggagctcatcgaactactcttaagctttaatgtctatgttggagatgctctattacatgctatcagaaaagaagtcgtcggagctgttgagctgttattgaaccacaaaaaacctagtggagaaaaacagtttgttgcccagcccaattgtcaacagctgctggcatctcgctggtacgatgagtttccaggctggaggagaagacactgggcagtgaagatggtgacatgtttcataataggacttctttttcctgtcttctctgtgtgctacctgatagctcccaaaagcccacttggactgttcatcaggaagccatttatcaagtttatctgccacacagcctcctatttgacttttttgttcctgctgctgcttgcctctcagcacatcgacaggtcagacttgaacaggcaaggtccaccaccaaccatcgtcgagtggatgatattaccgtgggtcctgggcttcatatggggagaaattaaacagatgtgggatggcggacttcaggactacatccatgattggtggaatctaatggactttgtaatgaactccttatatttagcaacaatctccttgaaaattgttgcatttgtaaagtacagtgcccttaatccacgagaatcatgggacatgtggcatcccactctggtggcagaggctttatttgctattgcaaacatcttcagttctctgcgtctgatctcactgtttactgcaaattctcacctgggacctctgcaaatatctctgggaagaatgctcctggacattttgaagtttctattcatatactgccttgtgttgctagcatttgcaaatggcctaaatcaattgtacttctattatgaagaaacgaaagggttaacctgcaaaggcataagatgtgaaaagcagaataatgcattttcaacgttatttgagacactgcagtccctgttttggtcaatatttgggctcatcaatttatatgtgaccaatgtcaaagcacagcatgaatttactgagtttgttggtgccaccatgtttgggacatacaatgtcatctctctggttgttctactcaacatgttaatagctatgatgaataattcttaccaactgattgctgaccatgcagatatagaatggaaatttgcacgaacaaagctttggatgagttattttgaagaaggaggtactctgcctactcccttcaatgtcatcccgagccccaagtctctctggtacctgatcaaatggatctggacacacttgtgcaagaaaaagatgagaagaaagccagaaagttttggaacaatagggaggcgagctgctgataacttgagaagacatcaccaataccaagaagttatgaggaacctggtgaagcgatacgttgctgcaatgattagagatgctaaaactgaagaaggcctgaccgaagagaactttaaggaactaaagcaagacatttctagtttccgctttgaagtcctgggattactaagaggaagcaaactttccacaatacaatctgcgaatgcctcgaaggagtcttcaaattcggcagactcagatgaaaagagtgatagcgaaggtaatagcaaggacaagaaaaagaatttcagcctttttgatttaaccaccctgattcatccgagatcagcagcaattgcctctgaaagacataacataagcaatggctctgccctggtggttcaggagccgcccagggagaagcagagaaaagtgaattttgtgaccgatatcaaaaactttgggttatttcatagacgatcaaaacaaaatgctgctgagcaaaatgcaaaccaaatcttctctgtttcagaagaagttgctcgtcaacaggctgcaggaccacttgagagaaatattcaactggaatctcgaggattagcttcacggggtgacctgagcattcccggtctcagtgaacaatgtgtgttagtagaccatagagaaaggaatacggacacactggggttacaggtaggaaagagagtgtgtccattcaagtcagagaaggtggtggtggaggacacggttcctataataccaaaggagaaacatgcaaaagaagaggactctagtatagactatgatctaaacctcccagacacagtcacccacgaagattacgtgaccacaagattgtgatacttgaaggaggaagcgtttaccatacacatacgtattttccgtagtgctctgggtgggggaaaatgtttaaattgtattagcaaatgctaacttacactttatagcgtttatcagctgtggcatattacctgtaacatgtttaaataaggcaaaggcaatcaaaaacctttttgttttgtagcctgcttttgctttcacaatttgtcttacaattgtttttgttaataaataaatgcaccttgt

SEQ ID NO: 9480 - protein, 804 aa, Homo sapiens
MAQFYYKRNVNAPYRDRIPLRIVRAESELSPSEKAYLNAVEKGDYASVKKSLEEAEIYFKININCIDPLGRTALLIAIENENLELIELLLSFNVYVGDALLHAIRKEVVGAVELLLNHKKPSGEKQFVAQPNCQQLLASRWYDEFPGWRRRHWAVKMVTCFIIGLLFPVFSVCYLIAPKSPLGLFIRKPFIKFICHTASYLTFLFLLLLASQHIDRSDLNRQGPPPTIVEWMILPWVLGFIWGEIKQMWDGGLQDYIHDWWNLMDFVMNSLYLATISLKIVAFVKYSALNPRESWDMWHPTLVAEALFAIANIFSSLRLISLFTANSHLGPLQISLGRMLLDILKFLFIYCLVLLAFANGLNQLYFYYEETKGLTCKGIRCEKQNNAFSTLFETLQSLFWSIFGLINLYVTNVKAQHEFTEFVGATMFGTYNVISLVVLLNMLIAMMNNSYQLIADHADIEWKFARTKLWMSYFEEGGTLPTPFNVIPSPKSLWYLIKWIWTHLCKKKMRRKPESFGTIGRRAADNLRRHHQYQEVMRNLVKRYVAAMIRDAKTEEGLTEENFKELKQDISSFRFEVLGLLRGSKLSTIQSANASKESSNSADSDEKSDSEGNSKDKKKNFSLFDLTTLIHPRSAAIASERHNISNGSALVVQEPPREKQRKVNFVTDIKNFGLFHRRSKQNAAEQNANQIFSVSEEVARQQAAGPLERNIQLESRGLASRGDLSIPGLSEQCVLVDHRERNTDTLGLQVGKRVCPFKSEKVVVEDTVPIIPKEKHAKEEDSSIDYDLNLPDTVTHEDYVTTRL

SEQ ID NO: 9481 - DNA, 2843 bp, Homo sapiens
atggctcagttctattacaaaagaaatgttaatgctccctatagagaccgcatccctctaaggatagtaagagcagaatcagaactctcgccatcagaaaaagcctacttgaatgctgtggaaaagggagattatgccagtgtcaagaaatccctagaggaagctgaaatttattttaaaatcaatattaattgcattgatcctctcggaagaactgctctcctcattgcaattgaaaatgagaacttggagctcatcgaactactcttaagctttaatgtctatgttggagatgctctattacatgctatcagaaaagaagtcgtcggagctgttgagctgttattgaaccacaaaaaacctagtggagaaaaacaggtgcctcctatactccttgataagcagttctctgaattcactccagacattacaccaatcattttggcagcccatacaaataattatgagataataaaactcttggttcagaaaggagtctcagtgcctcgaccccacgaggtccgctgtaactgtgtggaatgcgtgtccagttcagatgtggacagcctccgtcactcacgctccagactcaacatctacaaggccttggccagtccctctctcattgcactgtcaagcgaagatccttttctcacagcctttcagttaagttgggaacttcaggaactgagcaaggtggaaaatgaattcaagtcggagtatgaagagctgtcacggcagtgcaaacaatttgctaaggacctactggatcagacgagaagttccagagaactggaaatcattcttaattaccgagatgacaatagtctcatagaagaacaaagtggaaatgatcttgcaagactaaaattggccattaagtaccgtcaaaaagaggcttcatatggggagaaattaaacagatgtgggatggcggacttcaggactacatccatgattggtggaatctaatggactttgtaatgaactccttatatttagcaacaatctccttgaaaattgttgcatttgtaaagtacagtgcccttaatccacgagaatcatgggacatgtggcatcccactctggtggcagaggctttatttgctattgcaaacatcttcagttctctgcgtctgatctcactgtttactgcaaattctcacctgggacctctgcaaatatctctgggaagaatgctcctggacattttgaagtttctattcatatactgccttgtgttgctagcatttgcaaatggcctaaatcaattgtacttctattatgaagaaacgaaagggttaacctgcaaaggcataagatgtgaaaagcagaataatgcattttcaacgttatttgagacactgcagtccctgttttggtcaatatttgggctcatcaatttatatgtgaccaatgtcaaagcacagcatgaatttactgagtttgttggtgccaccatgtttgggacatacaatgtcatctctctggttgttctactcaacatgttaatagctatgatgaataattcttaccaactgattgctgaccatgcagatatagaatggaaatttgcacgaacaaagctttggatgagttattttgaagaaggaggtactctgcctactcccttcaatgtcatcccgagccccaagtctctctggtacctgatcaaatggatctggacacacttgtgcaagaaaaagatgagaagaaagccagaaagttttggaacaatagggaggcgagctgctgataacttgagaagacatcaccaataccaagaagttatgaggaacctggtgaagcgatacgttgctgcaatgattagagatgctaaaactgaagaaggcctgaccgaagagaactttaaggaactaaagcaagacatttctagtttccgctttgaagtcctgggattactaagaggaagcaaactttccacaatacaatctgcgaatgcctcgaaggagtcttcaaattcggcagactcagatgaaaagagtgatagcgaaggtaatagcaaggacaagaaaaagaatttcagcctttttgatttaaccaccctgattcatccgagatcagcagcaattgcctctgaaagacataacataagcaatggctctgccctggtggttcaggagccgcccagggagaagcagagaaaagtgaattttgtgaccgatatcaaaaactttgggttatttcatagacgatcaaaacaaaatgctgctgagcaaaatgcaaaccaaatcttctctgtttcagaagaagttgctcgtcaacaggctgcaggaccacttgagagaaatattcaactggaatctcgaggattagcttcacggggtgacctgagcattcccggtctcagtgaacaatgtgtgttagtagaccatagagaaaggaatacggacacactggggttacaggtaggaaagagagtgtgtccattcaagtcagagaaggtggtggtggaggacacggttcctataataccaaaggagaaacatgcaaaagaagaggactctagtatagactatgatctaaacctcccagacacagtcacccacgaagattacgtgaccacaagattgtgatacttgaaggaggaagcgtttaccatacacatacgtattttccgtagtgctctgggtgggggaaaatgtttaaattgtattagcaaatgctaacttacactttatagcgtttatcagctgtggcatattacctgtaacatgtttaaataaggcaaaggcaatcaaaaacctttttgttttgtagcctgcttttgctttcacaatttgtcttacaattgtttttgttaataaataaatgcaccttgt

SEQ ID NO: 9482 - protein, 557 aa, Homo sapiens
MWDGGLQDYIHDWWNLMDFVMNSLYLATISLKIVAFVKYSALNPRESWDMWHPTLVAEALFAIANIFSSLRLISLFTANSHLGPLQISLGRMLLDILKFLFIYCLVLLAFANGLNQLYFYYEETKGLTCKGIRCEKQNNAFSTLFETLQSLFWSIFGLINLYVTNVKAQHEFTEFVGATMFGTYNVISLVVLLNMLIAMMNNSYQLIADHADIEWKFARTKLWMSYFEEGGTLPTPFNVIPSPKSLWYLIKWIWTHLCKKKMRRKPESFGTIGRRAADNLRRHHQYQEVMRNLVKRYVAAMIRDAKTEEGLTEENFKELKQDISSFRFEVLGLLRGSKLSTIQSANASKESSNSADSDEKSDSEGNSKDKKKNFSLFDLTTLIHPRSAAIASERHNISNGSALVVQEPPREKQRKVNFVTDIKNFGLFHRRSKQNAAEQNANQIFSVSEEVARQQAAGPLERNIQLESRGLASRGDLSIPGLSEQCVLVDHRERNTDTLGLQVGKRVCPFKSEKVVVEDTVPIIPKEKHAKEEDSSIDYDLNLPDTVTHEDYVTTRL

SEQ ID NO: 9483 - DNA, 2968 bp, Homo sapiens
cttcgctttcagagcatcctcactccgcccagttcggtgccagctgcgtgggctccagcttcgatcgttttccttggaatgctccaaaactcagcagcgactaagggaattccattggaatttgccgggcgtgctctcaccccgcacggcacccgcgccgtcagtcctcggatcccatcacttcagcccgaagattgcaactttgcagagacgaagaaatagcatggcatgaaacatggctcagttctattacaaaagaaatgttaatgctccctatagagaccgcatccctctaaggatagtaagagcagaatcagaactctcgccatcagaaaaagcctacttgaatgctgtggaaaagggagattatgccagtgtcaagaaatccctagaggaagctgaaatttattttaaaatcaatattaattgcattgatcctctcggaagaactgctctcctcattgcaattgaaaatgagaacttggagctcatcgaactactcttaagctttaatgtctatgttggagatgctctattacatgctatcagaaaagaagtcgtcggagctgttgagctgttattgaaccacaaaaaacctagtggagaaaaacaggtgcctcctatactccttgataagcagttctctgaattcactccagacattacaccaatcattttggcagcccatacaaataattatgagataataaaactcttggttcagaaaggagtctcagtgcctcgaccccacgaggtccgctgtaactgtgtggaatgcgtgtccagttcagatgtggacagcctccgtcactcacgctccagactcaacatctacaaggccttggccagtccctctctcattgcactgtcaagcgaagatccttttctcacagcctttcagttaagttgggaacttcaggaactgagcaaggtggaaaatgaattcaagtcggagtatgaagagctgtcacggcagtgcaaacaatttgctaaggacctactggatcagacgagaagttccagagaactggaaatcattcttaattaccgagatgacaatagtctcatagaagaacaaagtggaaatgatcttgcaagactaaaattggccattaagtaccgtcaaaaagagtttgttgcccagcccaattgtcaacagctgctggcatctcgctggtacgatgagtttccaggctggaggagaagacactgggcagtgaagatggtgacatgtttcataataggacttctttttcctgtcttctctgtgtgctacctgatagctcccaaaagcccacttggactgttcatcaggaagccatttatcaagtttatctgccacacagcctcctatttgacttttttgttcctgctgctgcttgcctctcagcacatcgacaggtcagacttgaacaggcaaggtccaccaccaaccatcgtcgagtggatgatattaccgtgggtcctgggcttcatatggggagaaattaaacagatgtgggatggcggacttcaggactacatccatgattggtggaatctaatggactttgtaatgaactccttatatttagcaacaatctccttgaaaattgttgcatttgtaaagtacagtgcccttaatccacgagaatcatgggacatgtggcatcccactctggtggcagaggctttatttgctattgcaaacatcttcagttctctgcgtctgatctcactgtttactgcaaattctcacctgggacctctgcaaatatctctgggaagaatgctcctggacattttgaagtttctattcatatactgccttgtgttgctagcatttgcaaatggcctaaatcaattgtacttctattatgaagaaacgaaagggttaacctgcaaaggcataagatgtgaaaagcagaataatgcattttcaacgttatttgagacactgcagtccctgttttggtcaatatttgggctcatcaatttatatgtgaccaatgtcaaagcacagcatgaatttactgagtttgttggtgccaccatgtttgggacatacaatgtcatctctctggttgttctactcaacatgttaatagctatgatgaataattcttaccaactgattgctaggcgagctgctgataacttgagaagacatcaccaataccaagaagttatgaggaacctggtgaagcgatacgttgctgcaatgattagagatgctaaaactgaagaaggcctgaccgaagagaactttaaggaactaaagcaagacatttctagtttccgctttgaagtcctgggattactaagaggaagcaaactttccacaatacaatctgcgaatgcctcgaaggagtcttcaaattcggcagactcagatgaaaagagtgatagcgaagaagaagttgctcgtcaacaggctgcaggaccacttgagagaaatattcaactggaatctcgaggattagcttcacggggtgacctgagcattcccggtctcagtgaacaatgtgtgttagtagaccatagagaaaggaatacggacacactggggttacaggtaggaaagagagtgtgtccattcaagtcagagaaggtggtggtggaggacacggttcctataataccaaaggagaaacatgcaaaagaagaggactctagtatagactatgatctaaacctcccagacacagtcacccacgaagattacgtgaccacaagattgtgatacttgaaggaggaagcgtttaccatacacatacgtattttccgtagtgctctgggtgggggaaaatgtttaaattgtattagcaaatgctaacttacactttatagcgtttatcagctgtggcatattacctgtaacatgtttaaataaggcaaaggcaatcaaaaacctttttgttttgtagcctgcttttgctttcacaatttgtcttacaattgtttttgttaataaataaatgcaccttgt

SEQ ID NO: 9484 - protein, 828 aa, Homo sapiens
MAQFYYKRNVNAPYRDRIPLRIVRAESELSPSEKAYLNAVEKGDYASVKKSLEEAEIYFKININCIDPLGRTALLIAIENENLELIELLLSFNVYVGDALLHAIRKEVVGAVELLLNHKKPSGEKQVPPILLDKQFSEFTPDITPIILAAHTNNYEIIKLLVQKGVSVPRPHEVRCNCVECVSSSDVDSLRHSRSRLNIYKALASPSLIALSSEDPFLTAFQLSWELQELSKVENEFKSEYEELSRQCKQFAKDLLDQTRSSRELEIILNYRDDNSLIEEQSGNDLARLKLAIKYRQKEFVAQPNCQQLLASRWYDEFPGWRRRHWAVKMVTCFIIGLLFPVFSVCYLIAPKSPLGLFIRKPFIKFICHTASYLTFLFLLLLASQHIDRSDLNRQGPPPTIVEWMILPWVLGFIWGEIKQMWDGGLQDYIHDWWNLMDFVMNSLYLATISLKIVAFVKYSALNPRESWDMWHPTLVAEALFAIANIFSSLRLISLFTANSHLGPLQISLGRMLLDILKFLFIYCLVLLAFANGLNQLYFYYEETKGLTCKGIRCEKQNNAFSTLFETLQSLFWSIFGLINLYVTNVKAQHEFTEFVGATMFGTYNVISLVVLLNMLIAMMNNSYQLIARRAADNLRRHHQYQEVMRNLVKRYVAAMIRDAKTEEGLTEENFKELKQDISSFRFEVLGLLRGSKLSTIQSANASKESSNSADSDEKSDSEEEVARQQAAGPLERNIQLESRGLASRGDLSIPGLSEQCVLVDHRERNTDTLGLQVGKRVCPFKSEKVVVEDTVPIIPKEKHAKEEDSSIDYDLNLPDTVTHEDYVTTRL

SEQ ID NO: 9485 - DNA, 3163 bp, Homo sapiens
cttcgctttcagagcatcctcactccgcccagttcggtgccagctgcgtgggctccagcttcgatcgttttccttggaatgctccaaaactcagcagcgactaagggaattccattggaatttgccgggcgtgctctcaccccgcacggcacccgcgccgtcagtcctcggatcccatcacttcagcccgaagattgcaactttgcagagacgaagaaatagcatggcatgaaacatggctcagttctattacaaaagaaatgttaatgctccctatagagaccgcatccctctaaggatagtaagagcagaatcagaactctcgccatcagaaaaagcctacttgaatgctgtggaaaagggagattatgccagtgtcaagaaatccctagaggaagctgaaatttattttaaaatcaatattaattgcattgatcctctcggaagaactgctctcctcattgcaattgaaaatgagaacttggagctcatcgaactactcttaagctttaatgtctatgttggagatgctctattacatgctatcagaaaagaagtcgtcggagctgttgagctgttattgaaccacaaaaaacctagtggagaaaaacaggtgcctcctatactccttgataagcagttctctgaattcactccagacattacaccaatcattttggcagcccatacaaataattatgagataataaaactcttggttcagaaaggagtctcagtgcctcgaccccacgaggtccgctgtaactgtgtggaatgcgtgtccagttcagatgtggacagcctccgtcactcacgctccagactcaacatctacaaggccttggccagtccctctctcattgcactgtcaagcgaagatccttttctcacagcctttcagttaagttgggaacttcaggaactgagcaaggtggaaaatgaattcaagtcggagtatgaagagctgtcacggcagtgcaaacaatttgctaaggacctactggatcagacgagaagttccagagaactggaaatcattcttaattaccgagatgacaatagtctcatagaagaacaaagtggaaatgatcttgcaagactaaaattggccattaagtaccgtcaaaaagagtttgttgcccagcccaattgtcaacagctgctggcatctcgctggtacgatgagtttccaggctggaggagaagacactgggcagtgaagatggtgacatgtttcataataggacttctttttcctgtcttctctgtgtgctacctgatagctcccaaaagcccacttggactgttcatcaggaagccatttatcaagtttatctgccacacagcctcctatttgacttttttgttcctgctgctgcttgcctctcagcacatcgacaggtcagacttgaacaggcaaggtccaccaccaaccatcgtcgagtggatgatattaccgtgggtcctgggcttcatatggggagaaattaaacagatgtgggatggcggacttcaggactacatccatgattggtggaatctaatggactttgtaatgaactccttatatttagcaacaatctccttgaaaattgttgcatttgtaaagtacagtgcccttaatccacgagaatcatgggacatgtggcatcccactctggtggcagaggctttatttgctattgcaaacatcttcagttctctgcgtctgatctcactgtttactgcaaattctcacctgggacctctgcaaatatctctgggaagaatgctcctggacattttgaagtttctattcatatactgccttgtgttgctagcatttgcaaatggcctaaatcaattgtacttctattatgaagaaacgaaagggttaacctgcaaaggcataagatgtgaaaagcagaataatgcattttcaacgttatttgagacactgcagtccctgttttggtcaatatttgggctcatcaatttatatgtgaccaatgtcaaagcacagcatgaatttactgagtttgttggtgccaccatgtttgggacatacaatgtcatctctctggttgttctactcaacatgttaatagctatgatgaataattcttaccaactgattgctgaccatgcagatatagaatggaaatttgcacgaacaaagctttggatgagttattttgaagaaggaggtactctgcctactcccttcaatgtcatcccgagccccaagtctctctggtacctgatcaaatggatctggacacacttgtgcaagaaaaagatgagaagaaagccagaaagttttggaacaatagggaggcgagctgctgataacttgagaagacatcaccaataccaagaagttatgaggaacctggtgaagcgatacgttgctgcaatgattagagatgctaaaactgaagaaggcctgaccgaagagaactttaaggaactaaagcaagacatttctagtttccgctttgaagtcctgggattactaagaggaagcaaactttccacaatacaatctgcgaatgcctcgaaggagtcttcaaattcggcagactcagatgaaaagagtgatagcgaagaagaagttgctcgtcaacaggctgcaggaccacttgagagaaatattcaactggaatctcgaggattagcttcacggggtgacctgagcattcccggtctcagtgaacaatgtgtgttagtagaccatagagaaaggaatacggacacactggggttacaggtaggaaagagagtgtgtccattcaagtcagagaaggtggtggtggaggacacggttcctataataccaaaggagaaacatgcaaaagaagaggactctagtatagactatgatctaaacctcccagacacagtcacccacgaagattacgtgaccacaagattgtgatacttgaaggaggaagcgtttaccatacacatacgtattttccgtagtgctctgggtgggggaaaatgtttaaattgtattagcaaatgctaacttacactttatagcgtttatcagctgtggcatattacctgtaacatgtttaaataaggcaaaggcaatcaaaaacctttttgttttgtagcctgcttttgctttcacaatttgtcttacaattgtttttgttaataaataaatgcaccttgt

SEQ ID NO: 9486 - protein, 893 aa, Homo sapiens
MAQFYYKRNVNAPYRDRIPLRIVRAESELSPSEKAYLNAVEKGDYASVKKSLEEAEIYFKININCIDPLGRTALLIAIENENLELIELLLSFNVYVGDALLHAIRKEVVGAVELLLNHKKPSGEKQVPPILLDKQFSEFTPDITPIILAAHTNNYEIIKLLVQKGVSVPRPHEVRCNCVECVSSSDVDSLRHSRSRLNIYKALASPSLIALSSEDPFLTAFQLSWELQELSKVENEFKSEYEELSRQCKQFAKDLLDQTRSSRELEIILNYRDDNSLIEEQSGNDLARLKLAIKYRQKEFVAQPNCQQLLASRWYDEFPGWRRRHWAVKMVTCFIIGLLFPVFSVCYLIAPKSPLGLFIRKPFIKFICHTASYLTFLFLLLLASQHIDRSDLNRQGPPPTIVEWMILPWVLGFIWGEIKQMWDGGLQDYIHDWWNLMDFVMNSLYLATISLKIVAFVKYSALNPRESWDMWHPTLVAEALFAIANIFSSLRLISLFTANSHLGPLQISLGRMLLDILKFLFIYCLVLLAFANGLNQLYFYYEETKGLTCKGIRCEKQNNAFSTLFETLQSLFWSIFGLINLYVTNVKAQHEFTEFVGATMFGTYNVISLVVLLNMLIAMMNNSYQLIADHADIEWKFARTKLWMSYFEEGGTLPTPFNVIPSPKSLWYLIKWIWTHLCKKKMRRKPESFGTIGRRAADNLRRHHQYQEVMRNLVKRYVAAMIRDAKTEEGLTEENFKELKQDISSFRFEVLGLLRGSKLSTIQSANASKESSNSADSDEKSDSEEEVARQQAAGPLERNIQLESRGLASRGDLSIPGLSEQCVLVDHRERNTDTLGLQVGKRVCPFKSEKVVVEDTVPIIPKEKHAKEEDSSIDYDLNLPDTVTHEDYVTTRL

SEQ ID NO: 9487 - DNA, 2992 bp, Homo sapiens
cttcgctttcagagcatcctcactccgcccagttcggtgccagctgcgtgggctccagcttcgatcgttttccttggaatgctccaaaactcagcagcgactaagggaattccattggaatttgccgggcgtgctctcaccccgcacggcacccgcgccgtcagtcctcggatcccatcacttcagcccgaagattgcaactttgcagagacgaagaaatagcatggcatgaaacatggctcagttctattacaaaagaaatgttaatgctccctatagagaccgcatccctctaaggatagtaagagcagaatcagaactctcgccatcagaaaaagcctacttgaatgctgtggaaaagggagattatgccagtgtcaagaaatccctagaggaagctgaaatttattttaaaatcaatattaattgcattgatcctctcggaagaactgctctcctcattgcaattgaaaatgagaacttggagctcatcgaactactcttaagctttaatgtctatgttggagatgctctattacatgctatcagaaaagaagtcgtcggagctgttgagctgttattgaaccacaaaaaacctagtggagaaaaacaggtgcctcctatactccttgataagcagttctctgaattcactccagacattacaccaatcattttggcagcccatacaaataattatgagataataaaactcttggttcagaaaggagtctcagtgcctcgaccccacgaggtccgctgtaactgtgtggaatgcgtgtccagttcagatgtggacagcctccgtcactcacgctccagactcaacatctacaaggccttggccagtccctctctcattgcactgtcaagcgaagatccttttctcacagcctttcagttaagttgggaacttcaggaactgagcaaggtggaaaatgaattcaagtcggagtatgaagagctgtcacggcagtgcaaacaatttgctaaggacctactggatcagacgagaagttccagagaactggaaatcattcttaattaccgagatgacaatagtctcatagaagaacaaagtggaaatgatcttgcaagactaaaattggccattaagtaccgtcaaaaagagtttgttgcccagcccaattgtcaacagctgctggcatctcgctggtacgatgagtttccaggctggaggagaagacactgggcagtgaagatggtgacatgtttcataataggacttctttttcctgtcttctctgtgtgctacctgatagctcccaaaagcccacttggactgttcatcaggaagccatttatcaagtttatctgccacacagcctcctatttgacttttttgttcctgctgctgcttgcctctcagcacatcgacaggtcagacttgaacaggcaaggtccaccaccaaccatcgtcgagtggatgatattaccgtgggtcctgggcttcatatggggagaaattaaacagatgtgggatggcggacttcaggactacatccatgattggtggaatctaatggactttgtaatgaactccttatatttagcaacaatctccttgaaaattgttgcatttgtaaagtacagtgcccttaatccacgagaatcatgggacatgtggcatcccactctggtggcagaggctttatttgctattgcaaacatcttcagttctctgcgtctgatctcactgtttactgcaaattctcacctgggacctctgcaaatatctctgggaagaatgctcctggacattttgaagtttctattcatatactgccttgtgttgctagcatttgcaaatggcctaaatcaattgtacttctattatgaagaaacgaaagggttaacctgcaaaggcataagatgtgaaaagcagaataatgcattttcaacgttatttgagacactgcagtccctgttttggtcaatatttgggctcatcaatttatatgtgaccaatgtcaaagcacagcatgaatttactgagtttgttggtgccaccatgtttgggacatacaatgtcatctctctggttgttctactcaacatgttaatagctatgatgaataattcttaccaactgattgctgaccatgcagatatagaatggaaatttgcacgaacaaagctttggatgagttattttgaagaaggaggtactctgcctactcccttcaatgtcatcccgagccccaagtctctctggtacctgatcaaatggatctggacacacttgtgcaagaaaaagatgagaagaaagccagaaagttttggaacaatagggaggcgagctgctgataacttgagaagacatcaccaataccaagaagttatgaggaacctggtgaagcgatacgttgctgcaatgattagagatgctaaaactgaagaagttgctcgtcaacaggctgcaggaccacttgagagaaatattcaactggaatctcgaggattagcttcacggggtgacctgagcattcccggtctcagtgaacaatgtgtgttagtagaccatagagaaaggaatacggacacactggggttacaggtaggaaagagagtgtgtccattcaagtcagagaaggtggtggtggaggacacggttcctataataccaaaggagaaacatgcaaaagaagaggactctagtatagactatgatctaaacctcccagacacagtcacccacgaagattacgtgaccacaagattgtgatacttgaaggaggaagcgtttaccatacacatacgtattttccgtagtgctctgggtgggggaaaatgtttaaattgtattagcaaatgctaacttacactttatagcgtttatcagctgtggcatattacctgtaacatgtttaaataaggcaaaggcaatcaaaaacctttttgttttgtagcctgcttttgctttcacaatttgtcttacaattgtttttgttaataaataaatgcaccttgt

SEQ ID NO: 9488 - protein, 836 aa, Homo sapiens
MAQFYYKRNVNAPYRDRIPLRIVRAESELSPSEKAYLNAVEKGDYASVKKSLEEAEIYFKININCIDPLGRTALLIAIENENLELIELLLSFNVYVGDALLHAIRKEVVGAVELLLNHKKPSGEKQVPPILLDKQFSEFTPDITPIILAAHTNNYEIIKLLVQKGVSVPRPHEVRCNCVECVSSSDVDSLRHSRSRLNIYKALASPSLIALSSEDPFLTAFQLSWELQELSKVENEFKSEYEELSRQCKQFAKDLLDQTRSSRELEIILNYRDDNSLIEEQSGNDLARLKLAIKYRQKEFVAQPNCQQLLASRWYDEFPGWRRRHWAVKMVTCFIIGLLFPVFSVCYLIAPKSPLGLFIRKPFIKFICHTASYLTFLFLLLLASQHIDRSDLNRQGPPPTIVEWMILPWVLGFIWGEIKQMWDGGLQDYIHDWWNLMDFVMNSLYLATISLKIVAFVKYSALNPRESWDMWHPTLVAEALFAIANIFSSLRLISLFTANSHLGPLQISLGRMLLDILKFLFIYCLVLLAFANGLNQLYFYYEETKGLTCKGIRCEKQNNAFSTLFETLQSLFWSIFGLINLYVTNVKAQHEFTEFVGATMFGTYNVISLVVLLNMLIAMMNNSYQLIADHADIEWKFARTKLWMSYFEEGGTLPTPFNVIPSPKSLWYLIKWIWTHLCKKKMRRKPESFGTIGRRAADNLRRHHQYQEVMRNLVKRYVAAMIRDAKTEEVARQQAAGPLERNIQLESRGLASRGDLSIPGLSEQCVLVDHRERNTDTLGLQVGKRVCPFKSEKVVVEDTVPIIPKEKHAKEEDSSIDYDLNLPDTVTHEDYVTTRL

SEQ ID NO: 9489 - DNA, 419 bp, Homo sapiens
ctaaaattggccattaagtaccgtcaaaaagagtttgttgcccagcccaattgtcaacagctgctggcatctcgctggtacgatgagtttccaggctggaggagaagacactgggcagtgaagatggtgacatgtttcataataggacttctttttcctgtcttctctgtgtgctacctgatagctcccaaaagcccacttggactgttcatcaggaagccatttatcaagtttatctgccacacagcctcctatttgacttttttgttcctgctgctgcttgcctctcagcacatcgacaggtcagacttgaacaggcaaggtccaccaccaaccatcgtcgagtggatgatattaccgtgggtcctgggtaaatgtgttactatagaaaatataataaaaacatgttactgccacgg

SEQ ID NO: 9490 - protein, 97 aa, Homo sapiens
MVTCFIIGLLFPVFSVCYLIAPKSPLGLFIRKPFIKFICHTASYLTFLFLLLLASQHIDRSDLNRQGPPPTIVEWMILPWVLGKCVTIENIIKTCYC

SEQ ID NO: 9491 - DNA, 623 bp, Homo sapiens
agaacatgatggctgcctgtgacccccgccacggccgatacctcaccgtggctgctgtcttccatggtcggatatccatgaaggaggtcgatgagcagatgcttaacgtgcagaacaagaacagcagctactttgtggaatggatccccaacaacgtcaagacagctgtctgtgacatcccacctcgtggcctcaagatggcagtcaccttcattggcaatagctcggccatccaggagctcttcaagcgcatcttggagcagttcactgccatgttcggcaggaaggccttcctccactggtacacaggcgagggcatggactagatggagttcaccgaggctgagagcaacgtgaacgacctcgtctctgagtatcagagtaccaggatgccaccgcagaagaggaggaggattttgttgaggaggccgaagacgaggcctatgacagagcccccatcacctcaggcttttcagttcccttagccatcttactcaactgcccctttcctctccctcagaatttgtgtttgctgcctctatcttgttttttgttttttcttctggggaggtctagaacagtgcctggcacatagtaggcactcaataaatacttgtttgttg

SEQ ID NO: 9492 - protein, 106 aa, Homo sapiens; identical to SEQ ID NO: 1465

SEQ ID NO: 9493 - DNA, 1072 bp, Homo sapiens
ggagggcggcggggacagacccgtcgccccggctccgcagccccgccccggccccgcctccgctccggccgccgaaggctataagatctaggaacccgagccggtggtagggcgggcgcggaccgtgctgggagcggcgcggctggagcgcagcgccgaagggactggcagggctgaagtgtgcgggacagcaagcccccgaatagccccggctgccacctcgcaggacccaaggccacgcgcgccgggcccagctgagccgcctcatgaagccgcccgcggcgcagggcagccccgcggccgccgcggccgcagccccggccctggactcggcggccgcggaggacctgtcggacgcgctgtgcgagtttgacgcggtgctggccgacttcgcgtcgcccttccacgagcgccacttccactacgaggagcacctggagcgcatgaagcggcgcagcagcgccagtgtcagcgacagcagcggcttcagcgactcggagagtgcagattcactttataggaacagcttcagcttcagtgatgaaaaactgaattctccaacagactctaccccagctcttctctctgccactgtcactcctcagaaagctaaattaggagacacaaaagagctagaagccttcattgctgatcttgacaaaactttagcaagtatgtgaaacaagaagttctgggtcctttcatcataagggagaagcttcagaaagttccgaggacctgctaaaatcagctactagaatctgctgccagaggggacaaagacgtgcactcaaccttctaccaggccactctcaggctcaccttaaaatcagcccttgatcccatttctgggcaatttagacagtgaaactgactttgtttacctgcttgcagcatattagaacagacgatccatgctaatattgtattttctcttaaaacatagctttcctgtaatttaaagtgcttttatgaaaatatttgtaattaattatatatagttggaaatagcagtaagctttcccattataatatatttttgtatacaaataaaatttgaactgaagtctgc

SEQ ID NO: 9494 - protein, 137 aa, Homo sapiens
MKPPAAQGSPAAAAAAAPALDSAAAEDLSDALCEFDAVLADFASPFHERHFHYEEHLERMKRRSSASVSDSSGFSDSESADSLYRNSFSFSDEKLNSPTDSTPALLSATVTPQKAKLGDTKELEAFIADLDKTLASM

SEQ ID NO: 9495 - DNA, 925 bp, Homo sapiens
ctaggaacccgagccggtggtagggcgggcgcggaccgtgctgggagcggcgcggctggagcgcagcgccgaagggactggcagggctgaagtgtgcgggacagcaagcccccgaatagccccggctgccacctcgcaggacccaaggccacgcgcgccgggcccagctgagccgcctcatgaagccgcccgcggaggacctgtcggacgcgctgtgcgagtttgacgcggtgctggccgacttcgcgtcgcccttccacgagcgccacttccactacgaggagcacctggagcgcatgaagcggcgcagcagcgccagtgtcagcgacagcagcggcttcagcgactcggagagtgcagattcactttataggaacagcttcagcttcagtgatgaaaaactgaattctccaacagactctaccccagctcttctctctgccactgtcactcctcagaaagctaaattaggagacacaaaagagctagaagccttcattgctgatcttgacaaaactttagcaagtatgtgaaacaagaagttctgggtcctttcatcataagggagaagcttcagaaagttccgaggacctgctaaaatcagctactagaatctgctgccagaggggacaaagacgtgcactcaaccttctaccaggccactctcaggctcaccttaaaatcagcccttgatcccatttctgggcaatttagacagtgaaactgactttgtttacctgcttgcagcatattagaacagacgatccatgctaatattgtattttctcttaaaacatagctttcctgtaatttaaagtgcttttatgaaaatatttgtaattaattatatatagttggaaatagcagtaagctttcccattataatatatttttgtatacaaataaaatttgaactgaagtctgc

SEQ ID NO: 9496 - protein, 117 aa, Homo sapiens; identical to SEQ ID NO: 1470

SEQ ID NO: 9497 - DNA, 1097 bp, Homo sapiens
ggggacaggtaaccggcagcgcctggggaggaatctggccgcgccaagtcgctgggtgaccctgggcctggcgaaggctcagttttcttgtctgtaaaacggacttggtaatagaacgcacttcgggggtggtggagaagattacaagccccggccctggactcggcggccgcggaggacctgtcggacgcgctgtgcgagtttgacgcggtgctggccgacttcgcgtcgcccttccacgagcgccacttccactacgaggagcacctggagcgcatgaagcggcgcagcagcgccagtgtcagcgacagcagcggcttcagcgactcggagagtcctccaccaggctggagggggagccagagagcacatgggcatgaaggtggttcctggtgatctttctcacaatggagactaccccagggtctctttgtcctgaacaactttgtcaacaacagcaacaacaacaaaaacaacaaaagagacagctttttccaggaactcacatgtcctgggaggattacaggtgcagattcactttataggaacagcttcagcttcagtgatgaaaaactgaattctccaacagactctaccccagctcttctctctgccactgtcactcctcagaaagctaaattaggagacacaaaagagctagaagccttcattgctgatcttgacaaaactttagcaagtatgtgaaacaagaagttctgggtcctttcatcataagggagaagcttcagaaagttccgaggacctgctaaaatcagctactagaatctgctgccagaggggacaaagacgtgcactcaaccttctaccaggccactctcaggctcaccttaaaatcagcccttgatcccatttctgggcaatttagacagtgaaactgactttgtttacctgcttgcagcatattagaacagacgatccatgctaatattgtattttctcttaaaacatagctttcctgtaatttaaagtgcttttatgaaaatatttgtaattaattatatatagttggaaatagcagtaagctttcccattataatatatttttgtatacaaataaaatttgaactgaagtctgc

SEQ ID NO: 9498 - protein, 45 aa, Homo sapiens
METTPGSLCPEQLCQQQQQQQKQQKRQLFPGTHMSWEDYRCRFTL

SEQ ID NO: 9499 - DNA, 3712 bp, Homo sapiens
acatcaagaaggcatttagcctgtgaacctaaaggatcagaggacagtcctggcaatattctggatctacggctcattctctacagattctctccaggccccatgagttatgctgagtctttcctgaatctttgctggattccttttttcccctgctaacatcctcttttgtaatggcctttccatatctagattgttccttcttccaacattcaatagcgtttggcctccttgcctgtgaggtgaacaaattgtggtgtctttctcccctgcagaggagtgtacgtggatggaaacttgctggagagtaggggcagaagagagctgaagttcaaagtcagggtagggcctgtggtgcatgccgggtgggtggagtgagcagtggtgtggaaagttgctctcccaggccagctgcttgtgggagatagagagcggaggtgtggtccctgcgatctgggccagccagcctctgggcccagggatgggggcgaagctctcaggtatccttcatagccacggataatgtgccaagggcctggtattttctggctcagagtctaggcatgaggcctgcctcctcaggaccctctgtggttttcttgcccctaaattttgccttatcttctccccatgagtttctcaggctgtatttgtggcgattctcctggtgactgcatggtgacaacagtaaggcttccttgcaggtctgcagtgggtgtggccagcttcctgtgtgtaggggaaagggcttcccttgggagaattggagagcccacctttggaggtgggctcggttgagggagccagcaggagggcttcccaagtaaggttccacggagtccaagggtcctgagaagtagtagcaggagcaccacaaagaagtgtcccgtggtcaggtacactggggaaatggggctggttttgtttaaccgcaagtcttttcaggatgttggaagtgggcatacccatgggaatgagcaaggctgtttggtgtttctcaggtgtacctgatcacacagccctcggaggaccagcactctgaggaatgtatttttggggaagtgtaggtatcaggtccaggattttggatctcagtccatgttcatcctcaaagcccagtgatggtggtcatttcaggtgagctgggctggacctctgaaggaagcaaagattgtgagggttgctctcaagggtcttctgggcatgtttggaaaagtggacaagatggcggtgtcagcgaaaaagagcagggggcaggtgggcccctgggcaggagagggtggggggaaagggagccaggtgaggcacctgagaagttgtggcagcctcttagggacaaagctgaatttccctgagactagaaacctcttcttccgaaaactctgatactttttgtactgggcctatctcttgtcacttaggcaaattccttttcagttaatgggaccaaagagagatgtttttgcctccccctaagctggaggtagttggcttaaagtggaagaatcccgaggaggcggggacctggtaaggcccccatcattcagctgccctctcacacctgaagagccacttctctgctccaactgtggctggctttgtgttttgttttaaccaggaaggctgttccccgtgacctcaggggccacatcctgcttctgctgcctgccttgcctttgcaccctttgagtcagtgctgctcagccagcagcccctttctgagtcacagccacacagctgggccaaccgtgcgttggtttccttccccttagcaggacttagagaatctcagaactttagagctagaagtgcctttaaggattatttagtccgccttcccattctattgataagtaagctaggcccagagatgtactagctcaaaggcaccctagtacttagtagttgactggatggtccccttgactcccagttcagccttgaacttctggggcctcatcttgctgtggttcaagtctttggaggtatgagaatagagggagccatgatgtcactccaagtgtctaatagatgaacttccaggagaagatgtctttatctttgaccttctggcttatctgaagagtacagactcttaggaaaacctctcttaagtaaaagagaggattattaaattataggacagcaagagagcaaagatctctcttgagcagggaaagaggcttaagtcatgggatactggatgtttgtattttaggaggctcagagggcagaagggacatatttcacttgagatgattccttttgcctaaaatccttacccccacactcccaccatcaaccaagcactggtcatgatgatcctatcacccccttcctgtattggggaagcaagggcctttggtatacttgatttgacacacacacactctctcacttctcactcacactctcacactcacatgctctcacacacacactctcattttctcacacacactccacactcacacacgcacacactctcacacactttctcacacacacactcacacacactcatacactcacacactttctcacacacacatattctcacacacacccacactcacacactcatgcacacacacacactttcacacaaacacacacacacactttctctctcacacacacacactccctctctcccctgtctcgaatcattttgggggcataaacataaaacctggaaatcaacctgttttctaatctttttttttgagacagagtctcactctgtcacccaggctggagtgcagtggtgtgatcttggctcactgcaaactccacctcccagattcaagcgagtctcctgcctcagcctcccaagtagctggggctacagacacacaccactatgcctggctaatttttgtatttttagtagagatggggtttcaccatgttggccaggctggtcttgaactcctcatctctggtgatccacctgcttcagcttcccaaagtgctgagattacagccgtgagccaccccatgcctggctgttttctttactatagagttgcagctttggcttattttgaagacaaattgttggttatcaatagactataaagtgctaagtctataatctcatgagtactatttctaatgagtatattttccttcctgaaaggtgcagattcactttataggaacagcttcagcttcagtgatgaaaaactgaattctccaacagactctaccccagctcttctctctgccactgtcactcctcagaaagctaaattaggagacacaaaagagctagaagccttcattgctgatcttgacaaaactttagcaagtatgtgaaacaagaagttctgggtcctttcatcataagggagaagcttcagaaagttccgaggacctgctaaaatcagctactagaatctgctgccagaggggacaaagacgtgcactcaaccttctaccaggccactctcaggctcaccttaaaatcagcccttgatcccatttctgggcaatttagacagtgaaactgactttgtttacctgcttgcagcatattagaacagacgatccatgctaatattgtattttctcttaaaacatagctttcctgtaatttaaagtgcttttatgaaaatatttgtaattaattatatatagttggaaatagcagtaagctttcccattataatatatttttgtatacaaataaaatttgaactgaagtctg

SEQ ID NO: 9500 - protein, 67 aa, Homo sapiens [sequence omitted]

SEQ ID NO: 9501 - DNA, 1373 bp, Homo sapiens
gatcctcaagaggtaggaattaaagagggaaaaaaagcccctagtggcaaattgacttaaaaggctaagaacaattagccatttgtagccagcaggtgttaattaataaaactgtccagtactgcatttcagggaaggcatgaatgatgtgatgaactctacaaaaataaagtcagctatatgaaaaaaatctctacatctcaggctctagagagaaccaaatcagaatgaggactcgtttccttgtgtgggcacctggaggggatgaggctgtcctgggcccagaagactcatggcaccttccctgtaccattttgataagaaacagtgaactcttcattcatttcatattggaggaactctgagggctgcagcgttgccctggggggacagcacaagcaagaatgcatcagaaggctagtgccgcaggaatgacacaatctaggtgtctgctctgcacagtgctatgcttactgaattttttgactaataactcatattctacacaatacaaaaaccagactccttttatcttcccttcctgctcctcactctcctgcaaacatttaagacagtgaaggaagattcctcttctaggtgagggagaagtggggtgggatgtttggagagggtggtgatgaactaaaaaataaagaaacacttaggctagtcttcagaatcagtttctgagtttactgtatcaaaacactggagcacacacttagggttggcccaggacactcttcaataaaagtctctgaagataaggaggtagatgtaaaatagaaataatccattctataactctggaagttccaacttcctggaaaactcaatatggagtcatcagctgtctttgttatggaaactgaactctctctctctctctctctccctctcctgtttcacagctaaattaggagacacaaaagagctagaagccttcattgctgatcttgacaaaactttagcaagtatgtgaaacaagaagttctgggtcctttcatcataagggagaagcttcagaaagttccgaggacctgctaaaatcagctactagaatctgctgccagaggggacaaagacgtgcactcaaccttctaccaggccactctcaggctcaccttaaaatcagcccttgatcccatttctgggcaatttagacagtgaaactgactttgtttacctgcttgcagcatattagaacagacgatccatgctaatattgtattttctcttaaaacatagctttcctgtaatttaaagtgcttttatgaaaatatttgtaattaattatatatagttggaaatagcagtaagctttcccattataatatatttttgtatacaaataaaatttgaactgaagtctg

SEQ ID NO: 9502 - protein, 57 aa, Homo sapiens
MHQKASAAGMTQSRCLLCTVLCLLNFLTNNSYSTQYKNQTPFIFPSCSSLSCKHLRQ

SEQ ID NO: 9503 - DNA, 701 bp, Homo sapiens
gcgctacccagaatgcctcactcagaagcatcgcgggactcctggctttcccatacatctcaaacagggaccagagcaagggaaataaatacgagaaattaaagtctgttttcattatgtagcattttgaaaacaagttagcttgcaaattcctaaaacgcagtaattatgcctttatgccgttttgtgtctctcatagtttctataccagcatttctaaccttgacactatggaatttcaagccagacaattctttgttgtgggaggccattctgagcattgtagacttcctagtctgtaccgccgaatgctagcggcagcctttcttctccaagctgcgacaatcaaaaatgtctgcagacattgccaaatggcccctgggaggcaaagctaccctttggttgacagctgctgatctatacaacagtgcggctgtcacccactgctcaggtccaggagggcagctctcccagggaggccaagggtctgggaaggtgagtacacacagaagtcggaagtaaagagccaccagcaaaggtgacccacctggacaccttcaccacagcagcactgggctctcccgcgctgtgctgtgatgctgcaacccaggcctcatgtgtctccctgggcctgcctcaatgcgggctgcctgtggcctgtccccttgccttctccagataaaaagtcattctgttcctgg

SEQ ID NO: 9504 - protein, 56 aa, Homo sapiens
MSADIAKWPLGGKATLWLTAADLYNSAAVTHCSGPGGQLSQGGQGSGKVSTHRSRK

SEQ ID NO: 9505 - DNA, 7119 bp, Homo sapiens
aggtgccgcttcctgtccccttctccgcgctgcctcacggtgcctgcacgggacgccgctcgatccccgagccccctcgccgtccccgacagcccccccggcgccatgcaatcccggcttctactcctcggggcacccggaggccacggcggcccggcctcgcggcgcatgcggctgctcctgcggcaggtggtgcagcgcaggccgggtggcgacaggcagcggccggaggtcagactgttgcacgccggctcgggggccgacacaggttttcagactctctggctcaatctgtagttcagcatctaagatggataatgcagaaggatcttttggggcaagatgtttttctaataggacctcctgggcctcttcgacgctctattgctatgcagtacttggagctgaccaaacgggaggtcgaatacattgccctgtcaagggacaccactgaaactgatctcaaacagcgacgagagatccgtgcaggcacagccttttacattgatcagtgtgcagttcgtgcagccacagaaggcagaactctcattttggaaggtttggaaaaggcagagaggaatgttttgcctgttttgaacaacttgctggaaaacagagagatgcagcttgaagatggacgcttcctgatgtctgctgagcgttacgacaaacttctccgagatcataccaaaaaagagttggattcttggaaaattgtccgagttagtgaaaatttccgagtgattgccttgggcttgccagtgccaaggtattctgggaatccattagacccccctcttcgttctcgatttcaagccagggatatttattatttacccttcaaggaccaacttaagttgttatattcaattggagccaatgtttctgctgagaaagtttctcagctcttgtcctttgccacaactctgtgttcccaagaatcttctactcttggacttccagactttcctttagatagtttagcagctgcggttcaaatcttggattcctttcctatgatgccaatcaaacatgcaatccagtggctttatccatatagtattttactaggtcatgaagggaagatggctgtggaaggtgttttaaagcgctttgaacttcaagattcaggaagctctctacttcctaaagagattgtaaaagtagagaagatgatggaaaaccatgtgtcccaagcttctgtgaccatccggattgcagataaagaggtgaccattaaggtgccagccgggaccaggctattaagtcaaccttgtgcgtcagaccgtttcatacagactttgagccataagcagctacaggctgaaatgatgcagtctcacatggttaaagatatatgtttaattggaggaaagggttgtggaaaaacagtgatcgctaagaactttgccgataccttaggatacaacatagaacctattatgctctatcaggatatgacagcgcgtgatctgctacagcagagatacacccttccaaatggagacactgcctggcggtcctcaccccttgtgaatgctgctctggaaggcaagctggtcctgctggatggcattcaccgggtgaatgcgggcacgcttgctgtattgcaaaggttaatccatgatcgagagctaagcctctatgatggttctaggctgctgagagaagacaggtatatgcgtttaaaggaggagctgcaactgtctgatgaacagctacagaagagatccatttttcctatccatccctccttcagaatcattgccttggcagaaccccctgttattggaagcacagcacaccagtggctgggaccagaattcttaaccatgttctttttccattacatgaaaccacttgtgaaaagtgaagaaatccaagtgattaaggaaaaggtcccaaatgtacctcaggaagctctggataagttattatcatttacacacaaactcagagaaacacaggatccaacggcacaatcattagcggcatcactttctaccagacaactgttgcgaatttctcgtcggctgtcacagtatcctaatgaaaatcttcacagtgctgttactaaagcctgcctttccaggtttttacccagtcttgctaggtcagcattagaaaaaaatctggcagatgctacaatagaaataaatactgatgacaatttggagccagaactgaaggattacaaatgtgaagtaacatctggaactctgaggattggtgctgttagtgcaccgatctataatgcacatgagaaaatgaaagtgcctgatgttcttttctatgacaacattcagcatgtgatagtgatggaagatatgctgaaagactttctccttggagaacacttattattggttggcaaccagggtgtaggaaaaaacaagattgttgacagattccttcacctgctcaacagaccccgagaatatattcagctacacagggataccacagtacaaactcttacgcttcagccttcggttaaagacggacttattgtatatgaagactcacctttggttaaagcagtaaagttgggtcatattctggtagtagatgaggctgacaaagctccaacaaatgtcacgtgtattttaaaaactctagtagaaaatggagaaatgattctagcagatggaagacgcattgttgcaaattctgctaatgtgaatggaagagaaaatgttgtagtgattcatcctgattttaggatgattgttctggcaaatagacctggatttcctttcctaggcaatgatttcttcggtaccttaggtgatatttttagctgccatgcagttgataaccccaaaccccactcggagctcgagatgctcagacagtatggaccaaatgtgcctgagcccatccttcagaagcttgtggctgcctttggagagctgaggagtttggctgaccaagggattattaactatccttattctaccagagaagttgtcaacatagtcaaacatttacagaaatttccgactgaaggtctctccagtgtagttcgaaatgtgtttgactttgattcctacaacaatgacatgagggagatattgattaacactttacacaaatacgggatacctatcggagcaaagcctaccagtgtgcagctggcaaaggagttgactctgccagaacaaacgttcatgggctactggacaattggtcaggcaagaagtgggatgcaaaaactcttgtgtccagtggaaactcatcatatagacataaagggtccagcacttataaatatacaggagtatccaatagaaagacatgaagaaagatccctaaactttactgaagaatgtgcctcatggagaataccattggatgaaattaatataatctgtgacattgctacatcacatgaaaatgagcaaaatactctctatgtagttacatgcaatcccgcttccctgtactttatgaatatgactgggaaaagtggcttctttgtggacttttttgatatcttcccaagaacagccaatggcgtttggcacccttttgtgacagtggcaccgctgggaagtcctctcaaaggtcaagtggttctccatgagcagcagagtaatgttatcctgttgttagatactactggccgggcccttcatcgtctcatcctcccttccgagaagtttacatctaagaaacctttctggtggaacaaagaagaagctgaaacttataaaatgtgtaaagaattttcacacaaaaactggctggtgttctacaaagaaaaagggaacagcctgactgtgctggatgttctagaagggcgaactcacaccatctcacttcccatcaacctcaagacagttttccttgtagcagaggacaaatggcttctggtggagagcaaaacaaatcagaaatatcttttaactaagcctgcacacatcgaatctgagggtagtggggtttgccagttgtatgtgctgaaagaggagccgcccagcacagggtttggagttacacaagaaacagagttcagcatacctcataaaatttccagtgatcaactatcatctgaacatctaagttcagctgtggaacaaaagattgcctctcccaacagaattctctcagatgagaaaaattatgctacaatagttgttggttttccagatctcatgtcacccagtgaagtttattcttggaagagaccatcatctttgcataaacgaagtggcactgatacatcattctatagaggaaagaagaaaagggggactccaaaacaaagcaattgtgtgactcttttagatacgaatcaggtagtgaggattttacccccaggagaagtccctctaaaagatatctacccaaaagatgttactcctccacaaacatctggttatatagaagtcactgatcttcaatcaaagaaactccgatatatccctattcccagatcagaatctctctcgccgtataccacatggctgtcgaccatttcagacacagatgcactgctggctgagtgggacaaaagcggtgttgttactgttgatatgggaggtcacatcaggctttgggaaactggacttgaacgtctgcagcgatcactcatggaatggagaaacatgattggacaagatgacagaaatatgcagataacaatcaacagagacagtggtgaagatgtaagctcccccaaacacgggaaggaggacccagacaacatgcctcacgtgggcggcaacacttgggctggcggaacagggggaagagacacggcaggcctgggtggcaaaggaggcccttaccggctggatgcaggccatacggtgtaccaggtctctcaggctgagaaagatgcagttcccgaagaggtcaagagagctgctagagagatgggccagagagcattccagcagaggctaaaggagatccaaatgagtgaatacgatgctgcaacctatgaaaggttttcaggtgctgttcggcgacaggtgcactccctccgaatcatcctggataatttacaggctaaaggtaaagaaagacaatggctaagacatcaagctactggagaattagatgatgccaagatcattgatgggctgactggagaaaaagccatctacaaacgtcggggtgagctggagccacaacttggcagcccacaacagaaacccaagcgtctgcgcctggtggtagatgtgtctggtagcatgtaccgtttcaacaggatggatggccggcttgagcgcacaatggaggctgtgtgtatggtcatggaagccttcgagaactatgaggagaagttccagtatgacatcgttggacactctggagatggctacaacattggtctggttccaatgaacaaaatccccaaggacaataagcaaagactagaaattctgaagacaatgcatgcccactctcagttctgcatgagtggggaccacacgttagaagggacagaacatgccatcaaggaaattgtcaaagaagaagctgatgagtactttgtcatagtcttgagtgatgcaaatctgtcacgatatggaatacatcctgctaagtttgctcaaatcctcacaagagaccctcaagtaaatgcttttgccatttttattggctctttaggtgatcaagcaaccaggcttcagagaactttaccagctggtcggtctttcgttgccatggataccaaggatatccctcagattttacaacagatcttcacctccaccatgttgtcgagtgtctaagaagtgcccttcatcaccctgatgacaccaggatttgaaataagacaggaataaagagtattctgaaaaaaagaagatatggatgaagtgaacccatgcagtgactggatgattccggcattcctgggtcttcctacacttgctccgtaatgagaattcagagaagcagccagaaggagacttaaacatggaaagatactccactgatgagtttagaagtgattagggcaagctagttgacctgcactttatcaaaggttggggttaaaggaaggtggttttgagaactatgtgtttggtctatttccaaaaacctgagggggagaaaatactttgcttttgccttaacacatcatctggtcacgttagaaaagtgaccccatcaaactgagcctttgatgtcacattctgacacaagatgcaagtctgtgcaaaacccaccaaaatgctcctatccaacaattatttttattttctccctgctctgtattgaccagaaaacaatgattttataatatttaacccaccaaaaagtccctccaacagcaatatcttatgaaagtctggctgttctcaataatttcattttcttggccaaagccaaaaggaatcaaaaaatccttggagtgcttgcctttccacgtgacttttaaaaggctcttaaagagcaaatgtcctcttctccttgctgctagagtgggaggagaaagatgtcttgccttaaaagtttactgtttcttctgttcttctagcatctctcaaaaaattcacagtactccattttggggtccaaactgtaatgctcaaaataataaatgcttacacgaaaattatttattgagaatattcatataaaaattacctaaagcaaagtaaaaaaagtaaaatcaaggtggtatatttgaagtgaatggtgattggaaatttttagctgtaacaaaaagaaagaaaacaactttttttaaagcctcattctcttttctttcaaaatgtaccttattcccacacactcttgggctgacctttattttatcaataagctcaatattactttgtttaaaataagatgcttcagcaaaagtcattctctctttaaccatataatttaaaaactcctcttcacgattgatagcaaaatcagaaacgttagggcaccagtgagttgaaaaaactggtcttaagttggaaaaactattattaataatattatcctatccatccatatctattgaaattgtacaggtccataatttcattttaattaattataggaaagaagaaaagataatacccatttgttctatcacccctctccctatcattaactatcaaataaataaataaaagcaatctgatttccaacgtggtacta

SEQ ID NO: 9506 - protein, 1809 aa, Homo sapiens
MQKDLLGQDVFLIGPPGPLRRSIAMQYLELTKREVEYIALSRDTTETDLKQRREIRAGTAFYIDQCAVRAATEGRTLILEGLEKAERNVLPVLNNLLENREMQLEDGRFLMSAERYDKLLRDHTKKELDSWKIVRVSENFRVIALGLPVPRYSGNPLDPPLRSRFQARDIYYLPFKDQLKLLYSIGANVSAEKVSQLLSFATTLCSQESSTLGLPDFPLDSLAAAVQILDSFPMMPIKHAIQWLYPYSILLGHEGKMAVEGVLKRFELQDSGSSLLPKEIVKVEKMMENHVSQASVTIRIADKEVTIKVPAGTRLLSQPCASDRFIQTLSHKQLQAEMMQSHMVKDICLIGGKGCGKTVIAKNFADTLGYNIEPIMLYQDMTARDLLQQRYTLPNGDTAWRSSPLVNAALEGKLVLLDGIHRVNAGTLAVLQRLIHDRELSLYDGSRLLREDRYMRLKEELQLSDEQLQKRSIFPIHPSFRIIALAEPPVIGSTAHQWLGPEFLTMFFFHYMKPLVKSEEIQVIKEKVPNVPQEALDKLLSFTHKLRETQDPTAQSLAASLSTRQLLRISRRLSQYPNENLHSAVTKACLSRFLPSLARSALEKNLADATIEINTDDNLEPELKDYKCEVTSGTLRIGAVSAPIYNAHEKMKVPDVLFYDNIQHVIVMEDMLKDFLLGEHLLLVGNQGVGKNKIVDRFLHLLNRPREYIQLHRDTTVQTLTLQPSVKDGLIVYEDSPLVKAVKLGHILVVDEADKAPTNVTCILKTLVENGEMILADGRRIVANSANVNGRENVVVIHPDFRMIVLANRPGFPFLGNDFFGTLGDIFSCHAVDNPKPHSELEMLRQYGPNVPEPILQKLVAAFGELRSLADQGIINYPYSTREVVNIVKHLQKFPTEGLSSVVRNVFDFDSYNNDMREILINTLHKYGIPIGAKPTSVQLAKELTLPEQTFMGYWTIGQARSGMQKLLCPVETHHIDIKGPALINIQEYPIERHEERSLNFTEECASWRIPLDEINIICDIATSHENEQNTLYVVTCNPASLYFMNMTGKSGFFVDFFDIFPRTANGVWHPFVTVAPLGSPLKGQVVLHEQQSNVILLLDTTGRALHRLILPSEKFTSKKPFWWNKEEAETYKMCKEFSHKNWLVFYKEKGNSLTVLDVLEGRTHTISLPINLKTVFLVAEDKWLLVESKTNQKYLLTKPAHIESEGSGVCQLYVLKEEPPSTGFGVTQETEFSIPHKISSDQLSSEHLSSAVEQKIASPNRILSDEKNYATIVVGFPDLMSPSEVYSWKRPSSLHKRSGTDTSFYRGKKKRGTPKQSNCVTLLDTNQVVRILPPGEVPLKDIYPKDVTPPQTSGYIEVTDLQSKKLRYIPIPRSESLSPYTTWLSTISDTDALLAEWDKSGVVTVDMGGHIRLWETGLERLQRSLMEWRNMIGQDDRNMQITINRDSGEDVSSPKHGKEDPDNMPHVGGNTWAGGTGGRDTAGLGGKGGPYRLDAGHTVYQVSQAEKDAVPEEVKRAAREMGQRAFQQRLKEIQMSEYDAATYERFSGAVRRQVHSLRIILDNLQAKGKERQWLRHQATGELDDAKIIDGLTGEKAIYKRRGELEPQLGSPQQKPKRLRLVVDVSGSMYRFNRMDGRLERTMEAVCMVMEAFENYEEKFQYDIVGHSGDGYNIGLVPMNKIPKDNKQRLEILKTMHAHSQFCMSGDHTLEGTEHAIKEIVKEEADEYFVIVLSDANLSRYGIHPAKFAQILTRDPQVNAFAIFIGSLGDQATRLQRTLPAGRSFVAMDTKDIPQILQQIFTSTMLSSV

SEQ ID NO: 9507 - DNA, 1569 bp, Homo sapiens
gggattacaggcacccgccaccatgcccagctaatttttgtatttttagtagagacggggtttcaccatgttggttaggctggtgttgaactcctgacctcgtgatccgccctcctcggcctcccaaagtgctgggattacaggcgtgagccactgctcccggcgtttgggttttttaagctattcaaattaagactagactggaatctggagcagtgtgtgtgacaacccctctctgcacacccaactttccccgggccggctagtgactcaaagcgacagcccagatttaagaaaacgaaacctagtgcagctggggcacttccgggatctcgctatccggccgccacccgcagctgcagcacagtcatggcccaggcgtcgccgccccggcccgagagggtgctcggcgccagcagcccggaggcccggcccgcgcaggaggcgctcctccttcccaccgctgtattcttcaggacttgtggaatgtgaggatcaggatccacttaatcctgatagaagttttgatgtggaatcagtaaagaaagaaatccagagaggaaggaagttgaaatgcaaattttgtcataaaagaggagccaccgtgggatgtgatttaaaaaactgtaacaagaattaccactttttctgtgccaagaaggacgacgcagttccacagtctgatggagttcgaggaatttataaactgctttgccagcaacatgctcaattcccgatcatcgctcaaagtgctaaattttcaggagtgaaaagaaaaagaggaaggaagaaacccctctcaggcaatcatgtacagccacccgaaacaatgaaatgtaatacattcataagacaagtgaaagaagagcatggcagacacacagatgcaactgtgaaagttccttttcttaagaaatgcaaggaagcaggacttcttaattacttacttgaagaaatattagacaaagttcattcaattccagaaaaactcatggatgagactacttcagaatcagactatgaagaaatcgggagtgcactttttgactgtagattgttcgaagacacatttgtaaattttcaagcagcaatagagaaaaaaattcatgcatctcaacaaaggtggcagcagttgaaggaagagattgagctacttcaggacttaaaacaaaccttgtgctcttttcaagaaaatagagatcttatgtcaagttctacatcaatatcatccctgtcttattagggattaccgtttcctaagccaagagtcatgtcaaattgcaatcaggctcaaaaccagagaccaggctgtgaaatccacacatctttagaactagtcgtctcctcttggcctcagcagctcttccctgttcttactggttgacattttgatcactctttgcacactcttgtgttttttgctcactgtcacattcccagcacctagtatgctcagtaaatgtttgtggaataagtgcataaaatgttcttaacctttgattctacttacagcccatgatagcctcttagatataataaatttggattatactactttacttgtaccaa

SEQ ID NO: 9508 - protein, 137 aa, Homo sapiens [sequence omitted]

SEQ ID NO: 9509 - DNA, 1853 bp, Homo sapiens
gggattacaggcacccgccaccatgcccagctaatttttgtatttttagtagagacggggtttcaccatgttggttaggctggtgttgaactcctgacctcgtgatccgccctcctcggcctcccaaagtgctgggattacaggcgtgagccactgctcccggcgtttgggttttttaagctattcaaattaagactagactggaatctggagcagtgtgtgtgacaacccctctctgcacacccaactttccccgggccggctagtgactcaaagcgacagcccagatttaagaaaacgaaacctagtgcagctggggcacttccgggatctcgctatccggccgccacccgcagctgcagcacagtcatggcccaggcgtcgccgccccggcccgagagggtgctcggcgccagcagcccggaggcccggcccgcgcaggaggcgctcctccttcccaccgggcaagactcagccaaaggtggaaaagttgaaggggtgttcccagcagagaggatgacacaaaggcaccaaaccacaaaacgtcacacgtaaacatcatacgtggcaaccacaagccaatcagttggatatttcattcattggtatacatatggactgtaaggtgtctttcaggttgcagaaaagatggaaaaaaggacatgtgcactctgccccaaagatgtcgaatataatgtcctatactttgcacaatcagagaatatagctgctcatgagaattgtttgctgtattcttcaggacttgtggaatgtgaggatcaggatccacttaatcctgatagaagttttgatgtggaatcagtaaagaaagaaatccagagaggaaggaagttgaaatgcaaattttgtcataaaagaggagccaccgtgggatgtgatttaaaaaactgtaacaagaattaccactttttctgtgccaagaaggacgacgcagttccacagtctgatggagttcgaggaatttataaactgctttgccagcaacatgctcaattcccgatcatcgctcaaagtgctaaattttcaggagtgaaaagaaaaagaggaaggaagaaacccctctcaggcaatcatgtacagccacccgaaacaatgaaatgtaatacattcataagacaagtgaaagaagagcatggcagacacacagatgcaactgtgaaagttccttttcttaagaaatgcaaggaagcaggacttcttaattacttacttgaagaaatattagacaaagttcattcaattccagaaaaactcatggatgagactacttcagaatcagactatgaagaaatcgggagtgcactttttgactgtagattgttcgaagacacatttgtaaattttcaagcagcaatagagaaaaaaattcatgcatctcaacaaaggtggcagcagttgaaggaagagattgagctacttcaggacttaaaacaaaccttgtgctcttttcaagaaaatagagatcttatgtcaagttctacatcaatatcatccctgtcttattagggattaccgtttcctaagccaagagtcatgtcaaattgcaatcaggctcaaaaccagagaccaggctgtgaaatccacacatctttagaactagtcgtctcctcttggcctcagcagctcttccctgttcttactggttgacattttgatcactctttgcacactcttgtgttttttgctcactgtcacattcccagcacctagtatgctcagtaaatgtttgtggaataagtgcataaaatgttcttaacctttgattctacttacagcccatgatagcctcttagatataataaatttggattatactactttacttgtaccaa

SEQ ID NO: 9510 - protein, 292 aa, Homo sapiens; identical to SEQ ID NO: 1478

SEQ ID NO: 9511 - DNA, 1691 bp, Homo sapiens
gggattacaggcacccgccaccatgcccagctaatttttgtatttttagtagagacggggtttcaccatgttggttaggctggtgttgaactcctgacctcgtgatccgccctcctcggcctcccaaagtgctgggattacaggcgtgagccactgctcccggcgtttgggttttttaagctattcaaattaagactagactggaatctggagcagtgtgtgtgacaacccctctctgcacacccaactttccccgggccggctagtgactcaaagcgacagcccagatttaagaaaacgaaacctagtgcagctggggcacttccgggatctcgctatccggccgccacccgcagctgcagcacagtcatggcccaggcgtcgccgccccggcccgagagggtgctcggcgccagcagcccggaggcccggcccgcgcaggaggcgctcctccttcccaccggtgtctttcaggttgcagaaaagatggaaaaaaggacatgtgcactctgccccaaagatgtcgaatataatgtcctatactttgcacaatcagagaatatagctgctcatgagaattgtttgctgtattcttcaggacttgtggaatgtgaggatcaggatccacttaatcctgatagaagttttgatgtggaatcagtaaagaaagaaatccagagaggaaggaagttgaaatgcaaattttgtcataaaagaggagccaccgtgggatgtgatttaaaaaactgtaacaagaattaccactttttctgtgccaagaaggacgacgcagttccacagtctgatggagttcgaggaatttataaactgctttgccagcaacatgctcaattcccgatcatcgctcaaagtgctaaattttcaggagtgaaaagaaaaagaggaaggaagaaacccctctcaggcaatcatgtacagccacccgaaacaatgaaatgtaatacattcataagacaagtgaaagaagagcatggcagacacacagatgcaactgtgaaagttccttttcttaagaaatgcaaggaagcaggacttcttaattacttacttgaagaaatattagacaaagttcattcaattccagaaaaactcatggatgagactacttcagaatcagactatgaagaaatcgggagtgcactttttgactgtagattgttcgaagacacatttgtaaattttcaagcagcaatagagaaaaaaattcatgcatctcaacaaaggtggcagcagttgaaggaagagattgagctacttcaggacttaaaacaaaccttgtgctcttttcaagaaaatagagatcttatgtcaagttctacatcaatatcatccctgtcttattagggattaccgtttcctaagccaagagtcatgtcaaattgcaatcaggctcaaaaccagagaccaggctgtgaaatccacacatctttagaactagtcgtctcctcttggcctcagcagctcttccctgttcttactggttgacattttgatcactctttgcacactcttgtgttttttgctcactgtcacattcccagcacctagtatgctcagtaaatgtttgtggaataagtgcataaaatgttcttaacctttgattctacttacagcccatgatagcctcttagatataataaatttggattatactactttacttgtaccaa

SEQ ID NO: 9512 - protein, 331 aa, Homo sapiens; identical to SEQ ID NO: 1476

SEQ ID NO: 9513 - DNA, 1452 bp, Homo sapiens
gtgacagcccagtgcttccaccacaaccgatgtcaactctcctagcgcccctccgctcaccgggcaagactcagccaaaggtggaaaagttgaaggggtgttcccagcagagaggatgacacaaaggcaccaaaccacaaaacgtcacacgtaaacatcatacgtggcaaccacaagccaatcagttggatatttcattcattggtatacatatggactgtaaggtgtctttcaggttgcagaaaagatggaaaaaaggacatgtgcactctgccccaaagatgtcgaatataatgtcctatactttgcacaatcagagaatatagctgctcatgagaattgtttgctgtattcttcaggacttgtggaatgtgaggatcaggatccacttaatcctgatagaagttttgatgtggaatcagtaaagaaagaaatccagagaggaaggaagttgaaatgcaaattttgtcataaaagaggagccaccgtgggatgtgatttaaaaaactgtaacaagaattaccactttttctgtgccaagaaggacgacgcagttccacagtctgatggagttcgaggaatttataaactgctttgccagcaacatgctcaattcccgatcatcgctcaaagtgctaaattttcaggagtgaaaagaaaaagaggaaggaagaaacccctctcaggcaatcatgtacagccacccgaaacaatgaaatgtaatacattcataagacaagtgaaagaagagcatggcagacacacagatgcaactgtgaaagttccttttcttaagaaatgcaaggaagcaggacttcttaattacttacttgaagaaatattagacaaagttcattcaattccagaaaaactcatggatgagactacttcagaatcagactatgaagaaatcgggagtgcactttttgactgtagattgttcgaagacacatttgtaaattttcaagcagcaatagagaaaaaaattcatgcatctcaacaaaggtggcagcagttgaaggaagagattgagctacttcaggacttaaaacaaaccttgtgctcttttcaagaaaatagagatcttatgtcaagttctacatcaatatcatccctgtcttattagggattaccgtttcctaagccaagagtcatgtcaaattgcaatcaggctcaaaaccagagaccaggctgtgaaatccacacatctttagaactagtcgtctcctcttggcctcagcagctcttccctgttcttactggttgacattttgatcactctttgcacactcttgtgttttttgctcactgtcacattcccagcacctagtatgctcagtaaatgtttgtggaataagtgcataaaatgttcttaacctttgattctacttacagcccatgatagcctcttagatataataaatttggattatactactttacttgtaccaa

SEQ ID NO: 9514 - protein, 292 aa, Homo sapiens; identical to SEQ ID NO: 1478

SEQ ID NO: 9515 - DNA, 943 bp, Homo sapiens
tagttgaagtttgccatatcttttgactttgtaaaaacttttggcatatgagttgtatatttcatgtagtcaaacagtaatcttttcctttatggattccaatttttaaatggtttatatttttagctaaattttcaggagtgaaaagaaaaagaggaaggaagaaacccctctcaggcaatcatgtacagccacccgaaacaatgaaatgtaatacattcataagacaagtgaaagaagagcatggcagacacacagatgcaactgtgaaagttccttttcttaagaaatgcaaggaagcaggacttcttaattacttacttgaagaaatattagacaaagttcattcaattccagaaaaactcatggatgagactacttcagaatcagactatgaagaaatcgggagtgcactttttgactgtagattgttcgaagacacatttgtaaattttcaagcagcaatagagaaaaaaattcatgcatctcaacaaaggtggcagcagttgaaggaagagattgagctacttcaggacttaaaacaaaccttgtgctcttttcaagaaaatagagatcttatgtcaagttctacatcaatatcatccctgtcttattagggattaccgtttcctaagccaagagtcatgtcaaattgcaatcaggctcaaaaccagagaccaggctgtgaaatccacacatctttagaactagtcgtctcctcttggcctcagcagctcttccctgttcttactggttgacattttgatcactctttgcacactcttgtgttttttgctcactgtcacattcccagcacctagtatgctcagtaaatgtttgtggaataagtgcataaaatgttcttaacctttgattctacttacagcccatgatagcctcttagatataataaatttggattatactactttacttgtaccaa

SEQ ID NO: 9516 - protein, 137 aa, Homo sapiens [sequence omitted]

SEQ ID NO: 9517 - DNA, 751 bp, Homo sapiens
aagaaaaaagagaaatgccaagaattacatttctgacagcttccctgtagtgctgctgctgctgttgccatctaacattaaagttccatggcacatgactgctctctttcctttcccctgttttggattacatatataaatggaggagtttctgcctatacaaactgtttaatattgaaaatgtttctctccctccagactatgaagaaatcgggagtgcactttttgactgtagattgttcgaagacacatttgtaaattttcaagcagcaatagagaaaaaaattcatgcatctcaacaaaggtggcagcagttgaaggaagagattgagctacttcaggacttaaaacaaaccttgtgctcttttcaagaaaatagagatcttatgtcaagttctacatcaatatcatccctgtcttattagggattaccgtttcctaagccaagagtcatgtcaaattgcaatcaggctcaaaaccagagaccaggctgtgaaatccacacatctttagaactagtcgtctcctcttggcctcagcagctcttccctgttcttactggttgacattttgatcactctttgcacactcttgtgttttttgctcactgtcacattcccagcacctagtatgctcagtaaatgtttgtggaataagtgcataaaatgttcttaacctttgattctacttacagcccatgatagcctcttagatataataaatttggattatactactttacttgtaccaa

SEQ ID NO: 9518 - protein, 56 aa, Homo sapiens
MAHDCSLSFPLFWITYINGGVSAYTNCLILKMFLSLQTMKKSGVHFLTVDCSKTHL

SEQ ID NO: 9519 - DNA, 2662 bp, Homo sapiens
gtgagaacaacctgggcagaggcagatgtctcggctcaagttgctggaaacttcttcctcacttttagctaagatctgtcctaggaagtttacagaaaaagcctctgctgctgcttcctgtgccagcagagctcaacttggggatgctagatgactttgccttcgtgctgtgggccaaaatgctaggaagatggagactacctgcttccaatgtttcttgtctttctacgaaagtacctgaggttcctccatgccccgttttgacaagatagctttgaagcaaatgtacacacattaaagcaacaaaaatgtatggactcagtagttacagggagtttcaaaagatttagaagaattctgctttaagttttgcatcaatcatttgacagaagttacacagactgcagcattttggcaaatggatggccctctgctaaaggaattcattgctaaagccagtaaatgtggagcctttaagaactgaagcgcaaggctgctgggttctgtgtgagtgctctggggcactgttgaggatgtgtccagtttgtgctctacgggtgatgtgattctgcaggtaaaagaccatcaggttgtttttttccacatctgggacacagttgtttgtgtaggaacataacaagggtgtacggcttttcttgagcccattttaaacaacccttgtttccagataagtgtattttaaatgtgacctttcgtaaatttgggctggaacatgtaaaagggtgaaagttagtcgtttttggtcttcttttcatttttgattagaggaacttctgaacttggaaaggggaagttggcagcaactctcctgggccacgtatcaacaatcttctgacagcaggagcagtgatagttggggaattgtgagatgaatggagaggccccatcgtgaattaaagatgctgacctggggattgttaagtgctgccttagttgctagtttagtagccttactgtgaaggaataattaagattgtttcagacttttgtttgtgtgcttgcgttgatgacttttttaacttcaagataaatcaaagtaataagtttaacgtatattaaacctgttgaaatgataattatgtaaagataaatattctaggttagtcaagatttctcttaagatttaagtgcataaagaatagtaatttagaagtatccgtgaaaagttgataatgaaagaaatttgatgaaggtgaatattttataaattagaatctccactacttatccaatggtgttttatttcattaaggtagaacttgagaactcaagtttaaattgtcccccaccaccttcttctataaatgcaaacttaagaggaaaataatgacatgtatagtatactcttgccttcctaaattatgactgctgaatcatcatatctactatatatgactggaagaagtggttcttcaagtcaaccctcttacaagacttagtggaatttgctttatctactttaggccaaatccatcacacattggcttatgtgaaactttatcatctttcacttttggttttcctctgtttttaaacatcttaggtataacagcacaatttcaccttgaaaaagcaccaaaattatggtgttcctgaaaagatcctattaaaagacagtagtttatttgaactggttatggaaggtgactttgggatgtaagagtgttcaactgtgagtttcatcatgtgtgtccgttgagcttgcttttaagagcaatgttttgctttgctctctggtccatgaactcatttccatttgagtgagttcccttagtgaattttgtctcctgcttggaaagtctctcttctgaacctggagcctgaatacattttcagagccaaattacaagtgggtgaagacatgctacaactactatttttagcaatgtttttaaatttgtgtctattggggtgggaaggggagtgaggccctaaagataggaattcactgatagctgaaatagatacaagcctaggagccccagcccccttttcttgaccatatcacaagtgattgaagcccagtgaattagtcggttagaattcgttctacaacatgatagaacttttcttactagcttcagaaatgcacattgatttgtgctatgatgggtggtgtttgtaacaatcactgttctataggcttatgatctgagcaaaatgtgaacttcagtatgtttactattgctcttacttgaaaactttttttcaaaaaaagcacaaattaaagtagtaaattcatatccatagatagttcattcattcaacaaatatttaccaagttcctaatataagtgaaggaccacttctcatattagattactaagtcatttgtatgaatatgtgtggcagtgaagagaacaggtctttcaaaaagcatttgattattttttttaaatacactctcttatttttctacttgtttttttgttaatcatagcaggatatgacaactcttatttgaattgattttttcatctaatgtaataatggaagccaaagtattcatatttcttaagatagccctaaatgtactcttgaacttcttactggaacaatgtttgatactctagtatgtaagctgtatttatgtaatatttagaacgacatgttaataaacaaagtaacattaaaacaggca

SEQ ID NO: 9520 - protein, 42 aa, Homo sapiens
MSRLKLLETSSSLLAKICPRKFTEKASAAASCASRAQLGDAR

SEQ ID NO: 9521 - DNA, 4049 bp, Homo sapiens
ggccggggccacgtgacccggcgggcccggcgccctggcgctcctcctcttcgctgccggtgggcaccgccgctcgctcgcacttctgcgcccattggagcttcggagatccctgcggtcccgcgggacggcgcggcagcagctgacctcgcagacaggatcttgctctcttgcccagactggaatacagtggtgtgaacacggctcactgcagcctcaacctcctggactcagagatgtcggcttatttataggaattgcttgaagccagagtcatggtggatgtcggaaagtggcccatcttcactctactctcccctcaagagatcgcgtctattcggaaggcgtgtgtcttcggcacctcagccagtgaagcactgtacgttactgacaatgatgaggtctttgtatttggactgaactatagtaactgtctaggaactggagataaccagagtacacttgtacccaaaaagctagaaggcttatgtggaaagaagattaaaagcctcagttacgggagtggaccacatgttcttctcagcaccgaagatggagtggtttatgcctggggccacaatggatatagccagcttgggaatgggacgaccaaccaaggcattgctcccgtccaggtctgtaccaatctcttgatcaagcaagtggtggaagtagcttgtggctcacatcattcaatggctctggcagctgatggagaggtgtttgcttggggttataacaactgtggccaagtgggatcaggttctacagcaaatcaaccaactcctcgaaaagttacaaactgtttacatattaagagggtagttggcattgcctgtggtcagacttcatccatggctgttctggacaatggcgaggtatatggctggggttacaatggcaacggtcagctgggcctgggaaacaatggcaaccagctgacccctgtgagagtggcagctttgcacagcgtgtgtgtgaaccagattgtctgcggttacgcacatactctagcactaacagatgagggcttgctgtatgcctggggagctaacacatatgggcagctgggaactggcaataaaaataacctgctaagcccagcacacatcatggtggagaaagaaagggtggtagagattgcagcctgtcactctgcccacacgtctgcagccaagacgcagggtgggcacgtgtacatgtggggccagtgccggggtcagtccgtgatcctcccgcacctcacccacttctcctgcaccgacgacgtgtttgcctgctttgccactcccgccgtctcgtggcgcctcctgtctgtggagcatgaagactttttaacagttgcagagtcactgaagaaagaatttgatagtccagaaactgctgatctgaagtttcgaattgatggaaaatatattcatgtccataaagctgttttgaaaatcaggtgtgagcattttcgatccatgttccagtcgtattggaatgaagacatgaaggaagtgatagaaatcgatcagttttcttacccagtgtatcgtgcctttctccagtacctctacacagacacagtcgacctgccgccagaagatgctataggtcttctggatttggcgacatcttactgtgaaaacagactgaaaaaactttgtcagcacattatcaagagaggaattactgtggagaatgccttttcgctattctctgctgcagtcagatatgatgcagaggatttagaagaattctgctttaagttttgcatcaatcatttgacagaagttacacagactgcagcattttggcaaatggatggccctctgctaaaggaattcattgctaaagccagtaaatgtggagcctttaagaactgaagcgcaaggctgctgggttctgtgtgagtgctctggggcactgttgaggatgtgtccagtttgtgctctacgggtgatgtgattctgcaggtaaaagaccatcaggttgtttttttccacatctgggacacagttgtttgtgtaggaacataacaagggtgtacggcttttcttgagcccattttaaacaacccttgtttccagataagtgtattttaaatgtgacctttcgtaaatttgggctggaacatgtaaaagggtgaaagttagtcgtttttggtcttcttttcatttttgattagaggaacttctgaacttggaaaggggaagttggcagcaactctcctgggccacgtatcaacaatcttctgacagcaggagcagtgatagttggggaattgtgagatgaatggagaggccccatcgtgaattaaagatgctgacctggggattgttaagtgctgccttagttgctagtttagtagccttactgtgaaggaataattaagattgtttcagacttttgtttgtgtgcttgcgttgatgacttttttaacttcaagataaatcaaagtaataagtttaacgtatattaaacctgttgaaatgataattatgtaaagataaatattctaggttagtcaagatttctcttaagatttaagtgcataaagaatagtaatttagaagtatccgtgaaaagttgataatgaaagaaatttgatgaaggtgaatattttataaattagaatctccactacttatccaatggtgttttatttcattaaggtagaacttgagaactcaagtttaaattgtcccccaccaccttcttctataaatgcaaacttaagaggaaaataatgacatgtatagtatactcttgccttcctaaattatgactgctgaatcatcatatctactatatatgactggaagaagtggttcttcaagtcaaccctcttacaagacttagtggaatttgctttatctactttaggccaaatccatcacacattggcttatgtgaaactttatcatctttcacttttggttttcctctgtttttaaacatcttaggtataacagcacaatttcaccttgaaaaagcaccaaaattatggtgttcctgaaaagatcctattaaaagacagtagtttatttgaactggttatggaaggtgactttgggatgtaagagtgttcaactgtgagtttcatcatgtgtgtccgttgagcttgcttttaagagcaatgttttgctttgctctctggtccatgaactcatttccatttgagtgagttcccttagtgaattttgtctcctgcttggaaagtctctcttctgaacctggagcctgaatacattttcagagccaaattacaagtgggtgaagacatgctacaactactatttttagcaatgtttttaaatttgtgtctattggggtgggaaggggagtgaggccctaaagataggaattcactgatagctgaaatagatacaagcctaggagccccagcccccttttcttgaccatatcacaagtgattgaagcccagtgaattagtcggttagaattcgttctacaacatgatagaacttttcttactagcttcagaaatgcacattgatttgtgctatgatgggtggtgtttgtaacaatcactgttctataggcttatgatctgagcaaaatgtgaacttcagtatgtttactattgctcttacttgaaaactttttttcaaaaaaagcacaaattaaagtagtaaattcatatccatagatagttcattcattcaacaaatatttaccaagttcctaatataagtgaaggaccacttctcatattagattactaagtcatttgtatgaatatgtgtggcagtgaagagaacaggtctttcaaaaagcatttgattattttttttaaatacactctcttatttttctacttgtttttttgttaatcatagcaggatatgacaactcttatttgaattgattttttcatctaatgtaataatggaagccaaagtattcatatttcttaagatagccctaaatgtactcttgaacttcttactggaacaatgtttgatactctagtatgtaagctgtatttatgtaatatttagaacgacatgttaataaacaaagtaacattaaaacaggca

SEQ ID NO: 9522 - protein, 531 aa, Homo sapiens; identical to SEQ ID NO: 1480

SEQ ID NO: 9523 - DNA, 1995 bp, Homo sapiens
ggccggggccacgtgacccggcgggcccggcgccctggcgctcctcctcttcgctgccggtgggcaccgccgctcgctcgcacttctgcgcccattggagcttcggagatccctgcggtcccgcgggacggcgcggcagcagctgacctcgcagacaggatcttgctctcttgcccagactggaatacagtggtgtgaacacggctcactgcagcctcaacctcctggactcagagatgtcggcttatttataggaattgcttgaagccagagtcatggtggatgtcggaaagtggcccatcttcactctactctcccctcaagagatcgcgtctattcggaaggcgtgtgtcttcggcacctcagccagtgaagcactgtacgttactgacaatgatgaggtctttgtatttggactgaactatagtaactgtctaggaactggagataaccagagtacacttgtacccaaaaagctagaaggcttatgtggaaagaagattaaaagcctcagttacgggagtggaccacatgttcttctcagcaccgaagatggagtggtttatgcctggggccacaatggatatagccagcttgggaatgggacgaccaaccaaggcattgctcccgtccaggtctgtaccaatctcttgatcaagcaagtggtggaagtagcttgtggctcacatcattcaatggctctggcagctgatggagaggtgtttgcttggggttataacaactgtggccaagtgggatcaggttctacagcaaatcaaccaactcctcgaaaagttacaaactgtttacatattaagagggtagttggcattgcctgtggtcagacttcatccatggctgttctggacaatggcgaggtatatggctggggttacaatggcaacggtcagctgggcctgggaaacaatggcaaccagctgacccctgtgagagtggcagctttgcacagcgtgtgtgtgaaccagattgtctgcggttacgcacatactctagcactaacagatgagggcttgctgtatgcctggggagctaacacatatgggcagctgggaactggcaataaaaataacctgctaagcccagcacacatcatggtggagaaagaaagggtggtagagattgcagcctgtcactctgcccacacgtctgcagccaagacgcagggtgggcacgtgtacatgtggggccagtgccggggtcagtccgtgatcctcccgcacctcacccacttctcctgcaccgacgacgtgtttgcctgctttgccactcccgccgtctcgtggcgcctcctgtctgtggtgagtattgtgattggaaaataattggttcactgaatgggactatttggccagaattgcacatgtatggcatacccagctgaagcacttctgtacacatcttcagatttgtatatactacttaacctggacttgttataaaaggcttcccccagttcttatatcttaaaatggcacaggcattcttttcagaacaaatgtcctaacaatttaaatgttaagtttggaaaaaatatggtcattgactatatcctcctagatcaggggtccccacaccccaggccatatgcctgtactggtccgtggcctgttattaactgggttgcacggcaggaggtgagtggcagtgagcgaagcttcatctgtatttacagctgctccccatcactcacattaccgcctgagctccacctcccatcagatcagcagcggtattagattctcaaagaagcgtaagccctattgtgaactgcacatgcgagggatacaggttgcgagctccttatgagaatctaatgcctagatgatctgtcactgtctcccatcacccccagatggggccgtccagttgtaggaaaacaagctcaggactcccactgattctacattatggtgagttgtgtaattatttcattacatattacagtgtaacaataataaaaattaagtgcacaat

SEQ ID NO: 9524 - protein, 355 aa, Homo sapiens
MVDVGKWPIFTLLSPQEIASIRKACVFGTSASEALYVTDNDEVFVFGLNYSNCLGTGDNQSTLVPKKLEGLCGKKIKSLSYGSGPHVLLSTEDGVVYAWGHNGYSQLGNGTTNQGIAPVQVCTNLLIKQVVEVACGSHHSMALAADGEVFAWGYNNCGQVGSGSTANQPTPRKVTNCLHIKRVVGIACGQTSSMAVLDNGEVYGWGYNGNGQLGLGNNGNQLTPVRVAALHSVCVNQIVCGYAHTLALTDEGLLYAWGANTYGQLGTGNKNNLLSPAHIMVEKERVVEIAACHSAHTSAAKTQGGHVYMWGQCRGQSVILPHLTHFSCTDDVFACFATPAVSWRLLSVVSIVIGK

SEQ ID NO: 9525 - DNA, 2753 bp, Homo sapiens
atcaatgttcggtagcagacctgtaatttgcaaattgaatgacaggcagcattgaaaatgcactgcagtggccttttctagatatgaagtgcatttactctgctcacatttccatggcctgagctaattacttggtctcatctaaatggaaaaatatgataaaatatagttttctatgtgtaaaggatggaggaatataaaacaatttggaacagagtctcgctgtgcctcccaggctggagtgcagtggcacgttcgcggctcagtgcaacatccgcctcccggattcacaccattctcctgcctcagcctcccgagtagctgggactacaggagcctgccaccacgcccagctaattttttgtatttttagtagagacagggtttcactgtgttagccaggatggtcttgatttcctgatctcgtgatccacctgccttggcctcccaaagtgctgggattacaggcgtgagccaccgtgccgggccacatgtcttctttgtgctaggcactgttccaacactgagggtttcacagtggggacaaaatttaagagtactatggaatttacatttatagcaacagaaagacaaaaaataaatgagaaaaaaatcaataaaatagaatgctcaaagtgtgaatgaaagaagtaaaaccggtaacagaagtgcaagggtggtagagggaggaaatttaatgttaaatagtttgacaagagaaggtctttccattaaattgatttctgagtaaagaatttataaggaagtctgaaatgtagatgtctctagggagaccattccagacagagaaaccaacaagaaaaagaaatatcctgaagctgaacacaggcgaatgttctgggagtaggaatgaagccagtgaggccagagggaagaaagtctagaattagaaatcagcgaggtcaagcatatggcaatgtattctctgagatctttcaagccagagcagtgagtttggcgtttcatgaaggaaagtcatgggagtgattgaagcagaaaaagagataatatatagtctactgagtcactctggctgctgtgtggaaatgtatgttaaagagggccaagaacagaagtagatcattttgaggcaagaattgatataagagatgatgctcgctccaactagaatagtagcaacagagatggtgagaaattgtcaagttattgatccattttgaagggaaagtcaaaagaatttgctgatagaacaaatttagaatgtgaaagtaagaatggaactcccctttacctagaagagaatttgaggagagatttgagacataaaatcaagaggcattctgtatatattgtttagaggcctcataaaataactaggtgaaagtgttaaaaaaataactgtgtgtttaggagtctgcagtttcagtaagagagattttccctgagactaaaataatatccattcatgcttcttttgtatttattataccctaggaactgttttctctactatatgtatgagtttttaatttatacaaaattcccataggtactattattatcaacattttaccatgagaaggctaagacataaagaaattaagtatttgtgccaaagacaaagagttactaactgatagagcaaatgtctgtgtgtctgttaaccctgcttattgtctctcttggtaattaattatcatacagctaacatttaaagccatgaaattaggtgaaatccccaggggagagtcagggagaatggaagagttccaaggaggggtgaaaaataacatcttatgagaaagaaaacaagccaggttgtgctgtcttggaagcaaagacagtatttcaagaaggatttgatcatgtgtataaaattatgctgataggctaaattagaaaggcttctggttggctttggggcttaactgcatggaggatttggggaaccttgatgaaatcagcccagtgaagggacaagtgtgaacttcagagagacaaaaaatgatgacaagaaatagagataatttttgaagagttattttggaagcagaacaatggcaaagaagggtggttggatcaaaaaaggattttttgtttgcatacattttaagttagaaaaacacggcactgtctctgcactttgctgacgtagagtatataagcacaagtgtaaagaggtgttgggagtagagaaaattatcatgctatttggtttattaattcagtgaatgagaaaaactcatcagcttagggtaagtcaaagttctgaagctacaggaaggaaaatgaataggagagatagtatataactactgtcaatgaaaagagtcaaactatataaaatattttaagagatttattctgagccaaatatgagtgatcatggtccgtggaggtcctgagaacatgtgcccaaggtggtagaggtacagcttcgttttatatattttaaggaggcatgagacatcaatcaaacacatttaagaaatacattggtttggttcagaaaggcgggacaactcaaagtgggggcttccagcgctataggtaaatttaaacattttctggttgacagttgagtttatctgaagacctgggatcaatagaaaggagatgttcaggttaagataaaggttatgggacatgaagttttattgtgcagaggaatatctcacatagcagacttcagagagagagcaggtgacaaaatgtttcttattggacctaaaagggtgcctggttcttagttggttatctcatggatctgg

SEQ ID NO: 9526 - protein, 65 aa, Homo sapiens
MCKGWRNIKQFGTESRCASQAGVQWHVRGSVQHPPPGFTPFSCLSLPSSWDYRSLPPRPANFLYF

SEQ ID NO: 9527 - DNA, 770 bp, Homo sapiens
cccagcacgtccttactctggcactacgaaatgctccagactcgtgtgtatttcttgctccaccatagaatcagccatttctacaaatgtcactggtttcttttatggagaatgacattggaaaccaagatctgactactaagtgtgttctttgctactgggttgtcatttctcttaaggcttccaagctgacagagcaaacgagtatatgacacatctgattttttatttgactgtggaactctgtatctatatacacttgcaattcttatcaagtaaaaatacatcaaagatatcaacaaccacagacgtatacacccgacaagaaccgctgtatattctagtacatcatttattggaccaacaaatacatggcatctggcaaggaattgaaaagtggcttgtctatctggaatacagggaggaaggagttgaaatgagatgggaagagtcatctgtatgcagaggaggtataaagtcatgcaaatggataagatttcaagaagaaagaagaaaaaggtaggctctgagtttggagagttgaatgagcctacagagataatgaagttgttgctggagagcctccataacttctgttgagaaatcggccttaatcttattgatgatgactttcacatgatcctcagatatctgcctctagatcccagatgagcaccagttgcagcagtcaaacgtcatctatctgtatatcaagataaattatgaaaggattatataccaactgtctaaatgacaaagagaagaaaggt

SEQ ID NO: 9528 - protein, 104 aa, Homo sapiens
MTHLIFYLTVELCIYIHLQFLSSKNTSKISTTTDVYTRQEPLYILVHHLLDQQIHGIWQGIEKWLVYLEYREEGVEMRWEESSVCRGGIKSCKWIRFQEERRKR

SEQ ID NO: 9529 - DNA, 947 bp, Homo sapiens
accgcaacctgttttatcagcaaagtctttataacctgtattttgtgctgacctcctatctcatcctgtgacttagaatgccttaacaactgtctggaatgcagcccgatctgtggagtggctgcagcacctgtgtttcagcctgaagaatgggcacagatatttcatgattctgaagaagaattggaggtgagacttgagaaaatggagaaaaagatatgctttggattttcttgaagactagaagctttcttaaccatccaccaccttgttgactggttattattctctctaccttctgtgaaacaaactgatggatactaatggcacaattacacttatagctagtcagttgcatagtttatgcacatagttctgcttccagtgtttagtaatgagttaaacattttggctatatttgtctctgaagctataatttcaattaatcattatgtatagcaataataacaagtaaaacaaaaagaagaattttttgtttctatggtaattatgttgggtgctttggatcctcccaataaagttgacttcctaaaataattacacttgaattaggtatagagaagctaattgtaacaaattgaaagttactgtaaatcttctaatcgtagttctctgcaagtgtacttaagttattgctccacttgaaataaatgaaaactggaaatctgaggtgatgaattatgggtcccttttatgtaagaaagatgacaaggaaatctaatctgctgagttatactaaaataaaataccttggcctgggatcaaatataggtgaaagaattaacatttatgttttttaattaagataaaatgtacaagttttatgtacatattttatgatttcctgatataacaaaaagtgttgataaaagcacccaatactgattctaatgacatttgattagcattaaagagttgctattatt

SEQ ID NO: 9530 - protein, 39 aa, Homo sapiens [sequence omitted]

SEQ ID NO: 9531 - DNA, 455 bp, Homo sapiens
atatgcagtctttaaaggattacaacacttaaaattgaatggacttgtgtcaagctttttgcatcatacattttttgaaagatttttaaaaaagcctacaacttacatatgtagtagaatcagccattgctctgctcctggcatagagtcacatttgcgctctatgcaagcccttggaacagaacatactcatcttcatgtaggacctatgaaaattgtctatttttatctatatatttaaagttttctaaaaatgataaaaggttattacgaattttgttgtacaaaatctgtacaaaaatctgtttttacatcataatgcaagaattggaaatttttctatggtagcctagttatttgagcctggtttcaatgtgagaaccacgtttactgttattgtatttaattttcttttccttttcaacaatctcctaataaaactgtctgaaatctcc

SEQ ID NO: 9532 - protein, 33 aa, Homo sapiens
LFEPGFNVRTTFTVIVFNFLFLFNNLLIKLSEI

SEQ ID NO: 9533 - DNA, 3118 bp, Homo sapiens
gggatgctgaggtgggtggatcgcctgaggggctgttgaaagttgccatagataatgccagagctcaagagaaacaggtccaactggaaaaaactgagctgaagatggattttttaagggaaagagaactaagggaaacacttgagaagcagttggctatggaacaaaagaatagagccatagttcaaaagaggctaaagaaggagaagaaggcaaagagaaaattgcaggaagcacttgagtttgagacgaaacggcgtgaacaagcagaacagacgctaaaacaggcagcttcaacagatagtctcagggtcttaaatgactctctgaccccagagatagaggctgaccgcagtggcggcagaacagatgctgaaaggacaatacaagatggaagactgtatttgaaaactactgtcatgtactgaatctttcctgttgaagaaatccatgttatagaaaagaactttgcagtcagacattcgtcatgggaaagttcagaaaaaaataaagtccttttaagggaacttcctgaattttgtgtattaatgttctttaaaagtttaagtattctacaaaaaaaaaaaaagttttctccattgattttcacctgtggttcataccagagacctgagaatgtttgtaaatgtacaagtatcaaagttcttacagttaattactgcaacttgctgctggacaattgtatacagagttaaaggcaggtctgaataagacctagctttgtttttttctaatggaatgaaccattttcctcttctgaaaattctgtatctgagcacatcaagagactcttgtagcagtggttacccagacttacagaattatgtcctccagaaaccagcaagaacacttggaatgaacgaatgaacttgtagggggcatagaggattcttgaaaaaaaaaaatgcaagagtgattttctgttacattcaatttcaaactctctaattgtgggttttctcctgaagaattttttttcacatactttccaaaagaccaacaaatggatgttgacaacaacccaatgaaataacattttgcatatctgaaaagaagcattgaatataagccaaaagctttcactgaaggtttttttttcttaaaaataaaaaaaaatatataagtgtaacatgttttcattccaaactggtagtggtatgtagaattaaagataataatgttgcttcttattcaaactgttggtcatatgtacagtatataaacataaaacacacaaggaaggtattatgtatgcagtagtatactagagtttaggaaaatgaaaattttagaaaatatgttttgtcaccctgttggtcagaaagatgtctttctggttttaacgcatgcaggcatgtaaatatttgtctggagtcacagtattaatgaatgagatcttaagcatctggtgacatcagaactctgtgtcagccacttttatttgtatattgaaccctagctagtgccccaagctgcactattgggaatggattgtggctgaacagcaaatcaaaacaccagaaatatttttatatgttaacgtcatattatgttaatgttgctgaaaacaaaacctaacaaaccttgatgtaccagtccaataccatgtagcgctgagtgataaagttaaaatgtgctgtgcttcccacccttgtcagagggaagggtggctatgtgttattttcactgtctttttgaaagttacagtatgtgttttcactttcgtgcagataactggaagtaaagcggcaaacagtgcttattacatgctaaagttaccttctctttgttttttgcatatctggaattacacctttaaagactgatatgaatcagtacggtcactatacattttatgatttttctgtcatcttaaaattgtatgatcgtaacattatttattaccacaaaacagcaaaatcttcaatgtctaagaaaactagcttaaaatgtttaaatatagttctgattgggtattaattacttgattaagaaaaaattaacattatagatactctggcattacgcttctataccttttaggtcttccttgcaatactggaacataattcttttgtgtagctcactattagccagctaagttcatctttttaataccataaaaaggttatatgtacagttcctattttagcttgcttacaaagggagcattatttttatttaaagtattgctagtaaatgatttgtagaaacttggttttctaagcatagttcttccataaccaccttttgttgtttgagcacaagggattcttttcctagttctatgtgtttgtttccctatatgcagtctttaaaggattacaacacttaaaattgaatggacttgtgtcaagctttttgcatcatacattttttgaaagatttttaaaaaagcctacaacttacatatgtagtagaatcagccattgctctgctcctggcatagagtcacctgtttgttatgtggattaaatagttttaaaatacatatttgaagacctttgagaatgctttagtgtttgatttgaaataaaaggaaattttagcaaggattaaagaaaaaagctatcagctgtatgttaagagagactcttactaacatgttgtaaatattacaattcatgaaatgttattgtaagtctgtaacttaattttttccctgttttagttatacaggttggtttggaaatttgtgttttggcataaacaagtaaaatgtgcccattttatggtttccatgcttttgtaatcctaaaaatattaatgtctagttgttctatattataaccacatttgcgctctatgcaagcccttggaacagaacatactcatcttcatgtaggacctatgaaaattgtctatttttatctatatatttaaagttttctaaaaatgataaaaggttattacgaattttgttgtacaaaatctgtacaaaaatctgtttttacatcataatgcaagaattggaaatttttctatggtagcctagttatttgagcctggtttcaatgtgagaaccacgtttactgttattgtatttaattttcttttccttttcaacaatctcctaataaaactgtctgaaatctcc

SEQ ID NO: 9534 - protein, 107 aa, Homo sapiens
MDFLRERELRETLEKQLAMEQKNRAIVQKRLKKEKKAKRKLQEALEFETKRREQAEQTLKQAASTDSLRVLNDSLTPEIEADRSGGRTDAERTIQDGRLYLKTTVMY

SEQ ID NO: 9535 - DNA, 4634 bp, Homo sapiens
atctttgatcaatgtacttgccagggagagcccaagtccttcaaacctcctccttttcaccttcatccttaactttgtgctagagcgagacccacacaacaacagccgaccctccccgccccacccccacccccaaaccagccctcgatcccagcccccggagaggactcgcatttcgacttgcgggacacttttgtgcgttcctctccagagcgcctctcgtgctcgcccctcttgcgctcgctctttattaccttcacctccttttctcccccttctctccctttctccttctcgttctctcccggagttgttgttgcccccctcgctccttctccccccttttttccccttcccctcccgggggtgtgtggcaacttttcctctcgcttctcctccgtctgtttccccttatatgtgaccatggcagtgccggcggctttgatccctccgacccagctggtcccccctcaacccccaatctccacgtctgcttcctcctctggcaccaccacctccacctcttcggcgacttcgtctccggctccttccatcggacccccggcgtcctctgggccaactctgttccgcccggagcccatcgcttcggcggcggcggcggcggccacagtcacctctaccggcggcggcggcggcggcggcggcggcggcagcggaggcggcggcggcagcagcggcaacggaggcggcggtggcggcggcggcggtggcagcaactgcaaccccaacctggcggccgcgagcaacggcagcggcggcggcggcggcggcatcagcgctggcggcggcgtcgcttccagcacccccatcaacgccagcaccggcagcagcagcagcagcagtagcagcagcagcagcagcagcagtagtagcagcagcagcagtagcagcagcagctgcggccccctccccgggaaacccgtgtactcaaccccgtccccagtggaaaacacccctcagaataatgagtgcaaaatggtggatctgaggggggccaaagtggcttccttcacggtggagggctgcgagctgatctgcctgccccaggctttcgacctgttcctgaagcacttggtggggggcttgcatacggtctacaccaagctgaagcggctggagatcacgccggtggtgtgcaatgtggaacaagttcgcatcctgaggggactgggcgccatccagccaggagtgaaccgctgcaaactcatctccaggaaggacttcgagaccctctacaatgactgcaccaacgcaagttctagacctggaaggcctcctaagaggactcaaagtgtcacctccccagagaactctcacatcatgccgcattctgtccctggtctcatgtctcctgggataattccaccaacagatgagaccccgctttctacaccaaccgcaagagacagccttgacaaactctctctaactgggcatggacaaccactgcctccaggttttccatctccttttctgtttcctgatggactgtcttccatcgagactcttctgactaacatacaggggctgttgaaagttgccatagataatgccagagctcaagagaaacaggtccaactggaaaaaactgagctgaagatggattttttaagggaaagagaactaagggaaacacttgagaagcagttggctatggaacaaaagaatagagccatagttcaaaagaggctaaagaaggagaagaaggcaaagagaaaattgcaggaagcacttgagtttgagacgaaacggcgtgaacaagcagaacagacgctaaaacaggcagcttcaacagatagtctcagggtcttaaatgactctctgaccccagagatagaggctgaccgcagtggcggcagaacagatgctgaaaggacaatacaagatggaagactgtatttgaaaactactgtcatgtactgaatctttcctgttgaagaaatccatgttatagaaaagaactttgcagtcagacattcgtcatgggaaagttcagaaaaaaataaagtccttttaagggaacttcctgaattttgtgtattaatgttctttaaaagtttaagtattctacaaaaaaaaaaaaagttttctccattgattttcacctgtggttcataccagagacctgagaatgtttgtaaatgtacaagtatcaaagttcttacagttaattactgcaacttgctgctggacaattgtatacagagttaaaggcaggtctgaataagacctagctttgtttttttctaatggaatgaaccattttcctcttctgaaaattctgtatctgagcacatcaagagactcttgtagcagtggttacccagacttacagaattatgtcctccagaaaccagcaagaacacttggaatgaacgaatgaacttgtagggggcatagaggattcttgaaaaaaaaaaatgcaagagtgattttctgttacattcaatttcaaactctctaattgtgggttttctcctgaagaattttttttcacatactttccaaaagaccaacaaatggatgttgacaacaacccaatgaaataacattttgcatatctgaaaagaagcattgaatataagccaaaagctttcactgaaggtttttttttcttaaaaataaaaaaaaatatataagtgtaacatgttttcattccaaactggtagtggtatgtagaattaaagataataatgttgcttcttattcaaactgttggtcatatgtacagtatataaacataaaacacacaaggaaggtattatgtatgcagtagtatactagagtttaggaaaatgaaaattttagaaaatatgttttgtcaccctgttggtcagaaagatgtctttctggttttaacgcatgcaggcatgtaaatatttgtctggagtcacagtattaatgaatgagatcttaagcatctggtgacatcagaactctgtgtcagccacttttatttgtatattgaaccctagctagtgccccaagctgcactattgggaatggattgtggctgaacagcaaatcaaaacaccagaaatatttttatatgttaacgtcatattatgttaatgttgctgaaaacaaaacctaacaaaccttgatgtaccagtccaataccatgtagcgctgagtgataaagttaaaatgtgctgtgcttcccacccttgtcagagggaagggtggctatgtgttattttcactgtctttttgaaagttacagtatgtgttttcactttcgtgcagataactggaagtaaagcggcaaacagtgcttattacatgctaaagttaccttctctttgttttttgcatatctggaattacacctttaaagactgatatgaatcagtacggtcactatacattttatgatttttctgtcatcttaaaattgtatgatcgtaacattatttattaccacaaaacagcaaaatcttcaatgtctaagaaaactagcttaaaatgtttaaatatagttctgattgggtattaattacttgattaagaaaaaattaacattatagatactctggcattacgcttctataccttttaggtcttccttgcaatactggaacataattcttttgtgtagctcactattagccagctaagttcatctttttaataccataaaaaggttatatgtacagttcctattttagcttgcttacaaagggagcattatttttatttaaagtattgctagtaaatgatttgtagaaacttggttttctaagcatagttcttccataaccaccttttgttgtttgagcacaagggattcttttcctagttctatgtgtttgtttccctatatgcagtctttaaaggattacaacacttaaaattgaatggacttgtgtcaagctttttgcatcatacattttttgaaagatttttaaaaaagcctacaacttacatatgtagtagaatcagccattgctctgctcctggcatagagtcacctgtttgttatgtggattaaatagttttaaaatacatatttgaagacctttgagaatgctttagtgtttgatttgaaataaaaggaaattttagcaaggattaaagaaaaaagctatcagctgtatgttaagagagactcttactaacatgttgtaaatattacaattcatgaaatgttattgtaagtctgtaacttaattttttccctgttttagttatacaggttggtttggaaatttgtgttttggcataaacaagtaaaatgtgcccattttatggtttccatgcttttgtaatcctaaaaatattaatgtctagttgttctatattataaccacatttgcgctctatgcaagcccttggaacagaacatactcatcttcatgtaggacctatgaaaattgtctatttttatctatatatttaaagttttctaaaaatgataaaaggttattacgaattttgttgtacaaaatctgtacaaaaatctgtttttacatcataatgcaagaattggaaatttttctatggtagcctagttatttgagcctggtttcaatgtgagaaccacgtttactgttattgtatttaattttcttttccttttcaacaatctcctaataaaactgtctgaaatctcc

SEQ ID NO: 9536 - protein, 506 aa, Homo sapiens
MAVPAALIPPTQLVPPQPPISTSASSSGTTTSTSSATSSPAPSIGPPASSGPTLFRPEPIASAAAAAATVTSTGGGGGGGGGGSGGGGGSSGNGGGGGGGGGGSNCNPNLAAASNGSGGGGGGISAGGGVASSTPINASTGSSSSSSSSSSSSSSSSSSSSSSSSCGPLPGKPVYSTPSPVENTPQNNECKMVDLRGAKVASFTVEGCELICLPQAFDLFLKHLVGGLHTVYTKLKRLEITPVVCNVEQVRILRGLGAIQPGVNRCKLISRKDFETLYNDCTNASSRPGRPPKRTQSVTSPENSHIMPHSVPGLMSPGIIPPTDETPLSTPTARDSLDKLSLTGHGQPLPPGFPSPFLFPDGLSSIETLLTNIQGLLKVAIDNARAQEKQVQLEKTELKMDFLRERELRETLEKQLAMEQKNRAIVQKRLKKEKKAKRKLQEALEFETKRREQAEQTLKQAASTDSLRVLNDSLTPEIEADRSGGRTDAERTIQDGRLYLKTTVMY

SEQ ID NO: 9537 - DNA, 5240 bp, Homo sapiens
atctttgatcaatgtacttgccagggagagcccaagtccttcaaacctcctccttttcaccttcatccttaactttgtgctagagcgagacccacacaacaacagccgaccctccccgccccacccccacccccaaaccagccctcgatcccagcccccggagaggactcgcatttcgacttgcgggacacttttgtgcgttcctctccagagcgcctctcgtgctcgcccctcttgcgctcgctctttattaccttcacctccttttctcccccttctctccctttctccttctcgttctctcccggagttgttgttgcccccctcgctccttctccccccttttttccccttcccctcccgggggtgtgtggcaacttttcctctcgcttctcctccgtctgtttccccttatatgtgaccatggcagtgccggcggctttgatccctccgacccagctggtcccccctcaacccccaatctccacgtctgcttcctcctctggcaccaccacctccacctcttcggcgacttcgtctccggctccttccatcggacccccggcgtcctctgggccaactctgttccgcccggagcccatcgcttcggcggcggcggcggcggccacagtcacctctaccggcggcggcggcggcggcggcggcggcggcagcggaggcggcggcggcagcagcggcaacggaggcggcggtggcggcggcggcggtggcagcaactgcaaccccaacctggcggccgcgagcaacggcagcggcggcggcggcggcggcatcagcgctggcggcggcgtcgcttccagcacccccatcaacgccagcaccggcagcagcagcagcagcagtagcagcagcagcagcagcagcagtagtagcagcagcagcagtagcagcagcagctgcggccccctccccgggaaacccgtgtactcaaccccgtccccagtggaaaacacccctcagaataatgagtgcaaaatggtggatctgaggggggccaaagtggcttccttcacggtggagggctgcgagctgatctgcctgccccaggctttcgacctgttcctgaagcacttggtggggggcttgcatacggtctacaccaagctgaagcggctggagatcacgccggtggtgtgcaatgtggaacaagttcgcatcctgaggggactgggcgccatccagccaggagtgaaccgctgcaaactcatctccaggaaggacttcgagaccctctacaatgactgcaccaacgcaagttctagacctggaaggcctcctaagaggactcaaagtgtcacctccccagagaactctcacatcatgccgcattctgtccctggtctcatgtctcctgggataattccaccaacaggtctgacagcagccgctgcagcagctgctgctgctaccaatgcagctattgctgaagcaatgaaggtgaaaaaaatcaaattagaagccatgagcaactatcatgccagtaataaccaacatggagcagactctgaaaacggggacatgaattcaagtgtcggactggaacttccttttatgatgatgccccaccctctaattcctgtcagcctacctccagcatctgtcaccatggcaatgagccagatgaaccacctcagcaccattgcaaatatggcagcagcagcacaagttcagagtcccccatccagagttgagacatcagttattaaggagcgtgttcctgatagcccctcacctgccccctctctggaggaggggagaaggcctggcagtcacccatcatcacatcgcagcagcagcgtgtccagctcccctgctcggactgagagctcttctgacagaatcccggtccatcagaatgggttgtccatgaaccagatgctgatgggcttatcaccaaatgtacttcctgggcccaaagagggagatttggccggtcatgacatgggacatgagtcaaaaaggatgcatattgaaaaagatgagaccccgctttctacaccaaccgcaagagacagccttgacaaactctctctaactgggcatggacaaccactgcctccaggttttccatctccttttctgtttcctgatggactgtcttccatcgagactcttctgactaacatacaggggctgttgaaagttgccatagataatgccagagctcaagagaaacaggtccaactggaaaaaactgagctgaagatggattttttaagggaaagagaactaagggaaacacttgagaagcagttggctatggaacaaaagaatagagccatagttcaaaagaggctaaagaaggagaagaaggcaaagagaaaattgcaggaagcacttgagtttgagacgaaacggcgtgaacaagcagaacagacgctaaaacaggcagcttcaacagatagtctcagggtcttaaatgactctctgaccccagagatagaggctgaccgcagtggcggcagaacagatgctgaaaggacaatacaagatggaagactgtatttgaaaactactgtcatgtactgaatctttcctgttgaagaaatccatgttatagaaaagaactttgcagtcagacattcgtcatgggaaagttcagaaaaaaataaagtccttttaagggaacttcctgaattttgtgtattaatgttctttaaaagtttaagtattctacaaaaaaaaaaaaagttttctccattgattttcacctgtggttcataccagagacctgagaatgtttgtaaatgtacaagtatcaaagttcttacagttaattactgcaacttgctgctggacaattgtatacagagttaaaggcaggtctgaataagacctagctttgtttttttctaatggaatgaaccattttcctcttctgaaaattctgtatctgagcacatcaagagactcttgtagcagtggttacccagacttacagaattatgtcctccagaaaccagcaagaacacttggaatgaacgaatgaacttgtagggggcatagaggattcttgaaaaaaaaaaatgcaagagtgattttctgttacattcaatttcaaactctctaattgtgggttttctcctgaagaattttttttcacatactttccaaaagaccaacaaatggatgttgacaacaacccaatgaaataacattttgcatatctgaaaagaagcattgaatataagccaaaagctttcactgaaggtttttttttcttaaaaataaaaaaaaatatataagtgtaacatgttttcattccaaactggtagtggtatgtagaattaaagataataatgttgcttcttattcaaactgttggtcatatgtacagtatataaacataaaacacacaaggaaggtattatgtatgcagtagtatactagagtttaggaaaatgaaaattttagaaaatatgttttgtcaccctgttggtcagaaagatgtctttctggttttaacgcatgcaggcatgtaaatatttgtctggagtcacagtattaatgaatgagatcttaagcatctggtgacatcagaactctgtgtcagccacttttatttgtatattgaaccctagctagtgccccaagctgcactattgggaatggattgtggctgaacagcaaatcaaaacaccagaaatatttttatatgttaacgtcatattatgttaatgttgctgaaaacaaaacctaacaaaccttgatgtaccagtccaataccatgtagcgctgagtgataaagttaaaatgtgctgtgcttcccacccttgtcagagggaagggtggctatgtgttattttcactgtctttttgaaagttacagtatgtgttttcactttcgtgcagataactggaagtaaagcggcaaacagtgcttattacatgctaaagttaccttctctttgttttttgcatatctggaattacacctttaaagactgatatgaatcagtacggtcactatacattttatgatttttctgtcatcttaaaattgtatgatcgtaacattatttattaccacaaaacagcaaaatcttcaatgtctaagaaaactagcttaaaatgtttaaatatagttctgattgggtattaattacttgattaagaaaaaattaacattatagatactctggcattacgcttctataccttttaggtcttccttgcaatactggaacataattcttttgtgtagctcactattagccagctaagttcatctttttaataccataaaaaggttatatgtacagttcctattttagcttgcttacaaagggagcattatttttatttaaagtattgctagtaaatgatttgtagaaacttggttttctaagcatagttcttccataaccaccttttgttgtttgagcacaagggattcttttcctagttctatgtgtttgtttccctatatgcagtctttaaaggattacaacacttaaaattgaatggacttgtgtcaagctttttgcatcatacattttttgaaagatttttaaaaaagcctacaacttacatatgtagtagaatcagccattgctctgctcctggcatagagtcacctgtttgttatgtggattaaatagttttaaaatacatatttgaagacctttgagaatgctttagtgtttgatttgaaataaaaggaaattttagcaaggattaaagaaaaaagctatcagctgtatgttaagagagactcttactaacatgttgtaaatattacaattcatgaaatgttattgtaagtctgtaacttaattttttccctgttttagttatacaggttggtttggaaatttgtgttttggcataaacaagtaaaatgtgcccattttatggtttccatgcttttgtaatcctaaaaatattaatgtctagttgttctatattataaccacatttgcgctctatgcaagcccttggaacagaacatactcatcttcatgtaggacctatgaaaattgtctatttttatctatatatttaaagttttctaaaaatgataaaaggttattacgaattttgttgtacaaaatctgtacaaaaatctgtttttacatcataatgcaagaattggaaatttttctatggtagcctagttatttgagcctggtttcaatgtgagaaccacgtttactgttattgtatttaattttcttttccttttcaacaatctcctaataaaactgtctgaaatctcc

SEQ ID NO: 9538 - protein, 708 aa, Homo sapiens
MAVPAALIPPTQLVPPQPPISTSASSSGTTTSTSSATSSPAPSIGPPASSGPTLFRPEPIASAAAAAATVTSTGGGGGGGGGGSGGGGGSSGNGGGGGGGGGGSNCNPNLAAASNGSGGGGGGISAGGGVASSTPINASTGSSSSSSSSSSSSSSSSSSSSSSSSCGPLPGKPVYSTPSPVENTPQNNECKMVDLRGAKVASFTVEGCELICLPQAFDLFLKHLVGGLHTVYTKLKRLEITPVVCNVEQVRILRGLGAIQPGVNRCKLISRKDFETLYNDCTNASSRPGRPPKRTQSVTSPENSHIMPHSVPGLMSPGIIPPTGLTAAAAAAAAATNAAIAEAMKVKKIKLEAMSNYHASNNQHGADSENGDMNSSVGLELPFMMMPHPLIPVSLPPASVTMAMSQMNHLSTIANMAAAAQVQSPPSRVETSVIKERVPDSPSPAPSLEEGRRPGSHPSSHRSSSVSSSPARTESSSDRIPVHQNGLSMNQMLMGLSPNVLPGPKEGDLAGHDMGHESKRMHIEKDETPLSTPTARDSLDKLSLTGHGQPLPPGFPSPFLFPDGLSSIETLLTNIQGLLKVAIDNARAQEKQVQLEKTELKMDFLRERELRETLEKQLAMEQKNRAIVQKRLKKEKKAKRKLQEALEFETKRREQAEQTLKQAASTDSLRVLNDSLTPEIEADRSGGRTDAERTIQDGRLYLKTTVMY

SEQ ID NO: 9539 - DNA, 4796 bp, Homo sapiens
atctttgatcaatgtacttgccagggagagcccaagtccttcaaacctcctccttttcaccttcatccttaactttgtgctagagcgagacccacacaacaacagccgaccctccccgccccacccccacccccaaaccagccctcgatcccagcccccggagaggactcgcatttcgacttgcgggacacttttgtgcgttcctctccagagcgcctctcgtgctcgcccctcttgcgctcgctctttattaccttcacctccttttctcccccttctctccctttctccttctcgttctctcccggagttgttgttgcccccctcgctccttctccccccttttttccccttcccctcccgggggtgtgtggcaacttttcctctcgcttctcctccgtctgtttccccttatatgtgaccatggcagtgccggcggctttgatccctccgacccagctggtcccccctcaacccccaatctccacgtctgcttcctcctctggcaccaccacctccacctcttcggcgacttcgtctccggctccttccatcggacccccggcgtcctctgggccaactctgttccgcccggagcccatcgcttcggcggcggcggcggcggccacagtcacctctaccggcggcggcggcggcggcggcggcggcggcagcggaggcggcggcggcagcagcggcaacggaggcggcggtggcggcggcggcggtggcagcaactgcaaccccaacctggcggccgcgagcaacggcagcggcggcggcggcggcggcatcagcgctggcggcggcgtcgcttccagcacccccatcaacgccagcaccggcagcagcagcagcagcagtagcagcagcagcagcagcagcagtagtagcagcagcagcagtagcagcagcagctgcggccccctccccgggaaacccgtgtactcaaccccgtccccagtggaaaacacccctcagaataatgagtgcaaaatggtggatctgaggggggccaaagtggcttccttcacggtggagggctgcgagctgatctgcctgccccaggctttcgacctgttcctgaagcacttggtggggggcttgcatacggtctacaccaagctgaagcggctggagatcacgccggtggtgtgcaatgtggaacaagttcgcatcctgaggggactgggcgccatccagccaggagtgaaccgctgcaaactcatctccaggaaggacttcgagaccctctacaatgactgcaccaacgcaagttctagacctggaaggcctcctaagaggactcaaagtgtcacctccccagagaactctcacatcatgccgcattctgtccctggtctcatgtctcctgggataattccaccaacaggtctgacagcagccgctgcagcagctgctgctgctaccaatgcagctattgctgaagcaatgaaggtgaaaaaaatcaaattagaagccatgagcaactatcatgccagtaataaccaacatggagcagactctgaaaacggggacatgaattcaagtgtcgatgagaccccgctttctacaccaaccgcaagagacagccttgacaaactctctctaactgggcatggacaaccactgcctccaggttttccatctccttttctgtttcctgatggactgtcttccatcgagactcttctgactaacatacaggggctgttgaaagttgccatagataatgccagagctcaagagaaacaggtccaactggaaaaaactgagctgaagatggattttttaagggaaagagaactaagggaaacacttgagaagcagttggctatggaacaaaagaatagagccatagttcaaaagaggctaaagaaggagaagaaggcaaagagaaaattgcaggaagcacttgagtttgagacgaaacggcgtgaacaagcagaacagacgctaaaacaggcagcttcaacagatagtctcagggtcttaaatgactctctgaccccagagatagaggctgaccgcagtggcggcagaacagatgctgaaaggacaatacaagatggaagactgtatttgaaaactactgtcatgtactgaatctttcctgttgaagaaatccatgttatagaaaagaactttgcagtcagacattcgtcatgggaaagttcagaaaaaaataaagtccttttaagggaacttcctgaattttgtgtattaatgttctttaaaagtttaagtattctacaaaaaaaaaaaaagttttctccattgattttcacctgtggttcataccagagacctgagaatgtttgtaaatgtacaagtatcaaagttcttacagttaattactgcaacttgctgctggacaattgtatacagagttaaaggcaggtctgaataagacctagctttgtttttttctaatggaatgaaccattttcctcttctgaaaattctgtatctgagcacatcaagagactcttgtagcagtggttacccagacttacagaattatgtcctccagaaaccagcaagaacacttggaatgaacgaatgaacttgtagggggcatagaggattcttgaaaaaaaaaaatgcaagagtgattttctgttacattcaatttcaaactctctaattgtgggttttctcctgaagaattttttttcacatactttccaaaagaccaacaaatggatgttgacaacaacccaatgaaataacattttgcatatctgaaaagaagcattgaatataagccaaaagctttcactgaaggtttttttttcttaaaaataaaaaaaaatatataagtgtaacatgttttcattccaaactggtagtggtatgtagaattaaagataataatgttgcttcttattcaaactgttggtcatatgtacagtatataaacataaaacacacaaggaaggtattatgtatgcagtagtatactagagtttaggaaaatgaaaattttagaaaatatgttttgtcaccctgttggtcagaaagatgtctttctggttttaacgcatgcaggcatgtaaatatttgtctggagtcacagtattaatgaatgagatcttaagcatctggtgacatcagaactctgtgtcagccacttttatttgtatattgaaccctagctagtgccccaagctgcactattgggaatggattgtggctgaacagcaaatcaaaacaccagaaatatttttatatgttaacgtcatattatgttaatgttgctgaaaacaaaacctaacaaaccttgatgtaccagtccaataccatgtagcgctgagtgataaagttaaaatgtgctgtgcttcccacccttgtcagagggaagggtggctatgtgttattttcactgtctttttgaaagttacagtatgtgttttcactttcgtgcagataactggaagtaaagcggcaaacagtgcttattacatgctaaagttaccttctctttgttttttgcatatctggaattacacctttaaagactgatatgaatcagtacggtcactatacattttatgatttttctgtcatcttaaaattgtatgatcgtaacattatttattaccacaaaacagcaaaatcttcaatgtctaagaaaactagcttaaaatgtttaaatatagttctgattgggtattaattacttgattaagaaaaaattaacattatagatactctggcattacgcttctataccttttaggtcttccttgcaatactggaacataattcttttgtgtagctcactattagccagctaagttcatctttttaataccataaaaaggttatatgtacagttcctattttagcttgcttacaaagggagcattatttttatttaaagtattgctagtaaatgatttgtagaaacttggttttctaagcatagttcttccataaccaccttttgttgtttgagcacaagggattcttttcctagttctatgtgtttgtttccctatatgcagtctttaaaggattacaacacttaaaattgaatggacttgtgtcaagctttttgcatcatacattttttgaaagatttttaaaaaagcctacaacttacatatgtagtagaatcagccattgctctgctcctggcatagagtcacctgtttgttatgtggattaaatagttttaaaatacatatttgaagacctttgagaatgctttagtgtttgatttgaaataaaaggaaattttagcaaggattaaagaaaaaagctatcagctgtatgttaagagagactcttactaacatgttgtaaatattacaattcatgaaatgttattgtaagtctgtaacttaattttttccctgttttagttatacaggttggtttggaaatttgtgttttggcataaacaagtaaaatgtgcccattttatggtttccatgcttttgtaatcctaaaaatattaatgtctagttgttctatattataaccacatttgcgctctatgcaagcccttggaacagaacatactcatcttcatgtaggacctatgaaaattgtctatttttatctatatatttaaagttttctaaaaatgataaaaggttattacgaattttgttgtacaaaatctgtacaaaaatctgtttttacatcataatgcaagaattggaaatttttctatggtagcctagttatttgagcctggtttcaatgtgagaaccacgtttactgttattgtatttaattttcttttccttttcaacaatctcctaataaaactgtctgaaatctcc

SEQ ID NO: 9540 - protein, 560 aa, Homo sapiens
MAVPAALIPPTQLVPPQPPISTSASSSGTTTSTSSATSSPAPSIGPPASSGPTLFRPEPIASAAAAAATVTSTGGGGGGGGGGSGGGGGSSGNGGGGGGGGGGSNCNPNLAAASNGSGGGGGGISAGGGVASSTPINASTGSSSSSSSSSSSSSSSSSSSSSSSSCGPLPGKPVYSTPSPVENTPQNNECKMVDLRGAKVASFTVEGCELICLPQAFDLFLKHLVGGLHTVYTKLKRLEITPVVCNVEQVRILRGLGAIQPGVNRCKLISRKDFETLYNDCTNASSRPGRPPKRTQSVTSPENSHIMPHSVPGLMSPGIIPPTGLTAAAAAAAAATNAAIAEAMKVKKIKLEAMSNYHASNNQHGADSENGDMNSSVDETPLSTPTARDSLDKLSLTGHGQPLPPGFPSPFLFPDGLSSIETLLTNIQGLLKVAIDNARAQEKQVQLEKTELKMDFLRERELRETLEKQLAMEQKNRAIVQKRLKKEKKAKRKLQEALEFETKRREQAEQTLKQAASTDSLRVLNDSLTPEIEADRSGGRTDAERTIQDGRLYLKTTVMY

SEQ ID NO: 9541 - DNA, 3244 bp, Homo sapiens
atctttgatcaatgtacttgccagggagagcccaagtccttcaaacctcctccttttcaccttcatccttaactttgtgctagagcgagacccacacaacaacagccgaccctccccgccccacccccacccccaaaccagccctcgatcccagcccccggagaggactcgcatttcgacttgcgggacacttttgtgcgttcctctccagagcgcctctcgtgctcgcccctcttgcgctcgctctttattaccttcacctccttttctcccccttctctccctttctccttctcgttctctcccggagttgttgttgcccccctcgctccttctccccccttttttccccttcccctcccgggggtgtgtggcaacttttcctctcgcttctcctccgtctgtttccccttatatgtgaccatggcagtgccggcggctttgatccctccgacccagctggtcccccctcaacccccaatctccacgtctgcttcctcctctggcaccaccacctccacctcttcggcgacttcgtctccggctccttccatcggacccccggcgtcctctgggccaactctgttccgcccggagcccatcgcttcggcggcggcggcggcggccacagtcacctctaccggcggcggcggcggcggcggcggcggcggcagcggaggcggcggcggcagcagcggcaacggaggcggcggtggcggcggcggcggtggcagcaactgcaaccccaacctggcggccgcgagcaacggcagcggcggcggcggcggcggcatcagcgctggcggcggcgtcgcttccagcacccccatcaacgccagcaccggcagcagcagcagcagcagtagcagcagcagcagcagcagcagtagtagcagcagcagcagtagcagcagcagctgcggccccctccccgggaaacccgtgtactcaaccccgtccccagtggaaaacacccctcagaataatgagtgcaaaatggtggatctgaggggggccaaagtggcttccttcacggtggagggctgcgagctgatctgcctgccccaggctttcgacctgttcctgaagcacttggtggggggcttgcatacggtctacaccaagctgaagcggctggagatcacgccggtggtgtgcaatgtggaacaagttcgcatcctgaggggactgggcgccatccagccaggagtgaaccgctgcaaactcatctccaggaaggacttcgagaccctctacaatgactgcaccaacgcaagttctagacctggaaggcctcctaagaggactcaaagtgtcacctccccagagaactctcacatcatgccgcattctgtccctggtctcatgtctcctgggataattccaccaacaggtctgacagcagccgctgcagcagctgctgctgctaccaatgcagctattgctgaagcaatgaaggtgaaaaaaatcaaattagaagccatgagcaactatcatgccagtaataaccaacatggagcagactctgaaaacggggacatgaattcaagtgtcggactggaacttccttttatgatgatgccccaccctctaattcctgtcagcctacctccagcatctgtcaccatggcaatgagccagatgaaccacctcagcaccattgcaaatatggcagcagcagcacaagttcagagtcccccatccagagttgagacatcagttattaaggagcgtgttcctgatagcccctcacctgccccctctctggaggaggggagaaggcctggcagtcacccatcatcacatcgcagcagcagcgtgtccagctcccctgctcggactgagagctcttctgacagaatcccggtccatcagaatgggttgtccatgaaccagatgctgatgggcttatcaccaaatgtacttcctgggcccaaagagggagatttggccggtcatgacatgggacatgagtcaaaaaggatgcatattgaaaaagatgagaccccgctttctacaccaaccgcaagagacagccttgacaaactctctctaactgggcatggacaaccactgcctccaggttttccatctccttttctgtttcctgatggactgtcttccatcgagactcttctgactaacatacaggggctgttgaaagttgccatagataatgccagagctcaagagaaacaggtccaactggaaaaaactgagctgaagatggattttttaagggaaagagaactaagggaaacacttgagaagcagttggctatggaacaaaagaatagagccatagttcaaaagaggctaaagaaggagaagaaggcaaagagaaaattgcaggaagcacttgagtttgagacgaaacggcgtgaacaagcagaacagacgctaaaacaggcagcttcaacagatagtctcagggtcttaaatgactctctgaccccagagatagaggctgaccgcagtggcggcagaacagatgctgaaaggacaatacaagatggaagactgtatttgaaaactactgtcatgtactgaatctttcctgttgaagaaatccatgttatagaaaagaactttgcagtcagacattcgtcatgggaaagttcagaaaaaaataaagtccttttaagggaacttcctgaattttgtgtattaatgttctttaaaagtttaagtattctacaaaaaaaaaaaaagttttctccattgattttcacctgtggttcataccagagacctgagaatgtttgtaaatgtacaagtatcaaagttcttacagttaattactgcaacttgctgctggacaattgtatacagagttaaaggcaggtctgaataagacctagctttgtttttttctaatggaatgaaccattttcctcttctgaaaattctgtatctgagcacatcaagagactcttgtagcagtggttacccagacttacagaattatgtcctccagaaaccagcaagaacacttggaatgaacgaatgaacttgtagggggcatagaggattcttgaaaaaaaaaaatgcaagagtgattttctgttacattcaatttcaaactctctaattgtgggttttctcctgaagaattttttttcacatactttccaaaagaccaacaaatggatgttgacaacaacccaatgaaataacattttgcatatctgaaaagaagcattgaatataagccaaaagctttcactgaaggtttttttttctt

SEQ ID NO: 9542 - protein, 708 aa, Homo sapiens; identical to SEQ ID NO: 9538

SEQ ID NO: 9543 - DNA, 1989 bp, Homo sapiens
gcggtggcggcggcggcggtggcagcaactgcaaccccaacctggcggccgcgagcaacggcagcggcggcggcggcggcggcatcagcgctggcggcggcgtcgcttccagcacccccatcaacgccagcaccggcagcagcagcagcagcagtagcagcagcagcagcagcagcagtagtagcagcagcagcagtagcagcagcagctgcggccccctccccgggaaacccgtgtactcaaccccgtccccagtggaaaacacccctcagaataatgagtgcaaaatggtggatctgaggggggccaaagtggcttccttcacggtggagggctgcgagctgatctgcctgccccaggctttcgacctgttcctgaagcacttggtggggggcttgcatacggtctacaccaagctgaagcggctggagatcacgccggtggtgtgcaatgtggaacaagttcgcatcctgaggggactgggcgccatccagccaggagtgaaccgctgcaaactcatctccaggaaggacttcgagaccctctacaatgactgcaccaacgcaagttctagacctggaaggcctcctaagaggactcaaagtgtcacctccccagagaactctcacatcatgccgcattctgtccctggtctcatgtctcctgggataattccaccaacaggtctgacagcagccgctgcagcagctgctgctgctaccaatgcagctattgctgaagcaatgaaggtgaaaaaaatcaaattagaagccatgagcaactatcatgccagtaataaccaacatggagcagactctgaaaacggggacatgaattcaagtgtcggactggaacttccttttatgatgatgccccaccctctaattcctgtcagcctacctccagcatctgtcaccatggcaatgagccagatgaaccacctcagcaccattgcaaatatggcagcagcagcacaagttcagagtcccccatccagagttgagacatcagttattaaggagcgtgttcctgatagcccctcacctgccccctctctggaggaggggagaaggcctggcagtcacccatcatcacatcgcagcagcagcgtgtccagctcccctgctcggactgagagctcttctgacagaatcccggtccatcagaatgggttgtccatgaaccagatgctgatgggcttatcaccaaatgtacttcctgggcccaaagagggagatttggccggtcatgacatgggacatgagtcaaaaaggatgcatattgaaaaagatgagaccccgctttctacaccaaccgcaagagacagccttgacaaactctctctaactgggcatggacaaccactgcctccaggttttccatctccttttctgtttcctgatggactgtcttccatcgagactcttctgactaacatacaggggctgttgaaagttgccatagataatgccagagctcaagagaaacaggtccaactggaaaaaactgagctgaagatggattttttaagggaaagagaactaagggaaacacttgagaagcagttggctatggaacaaaagaatagagccatagttcaaaagaggctaaagaaggagaagaaggcaaagagaaaattgcaggaagcacttgagtttgagacgaaacggcgtgaacaagcagaacagacgctaaaacaggcagcttcaacagatagtctcagggtcttaaatgactctctgaccccagagatagaggctgaccgcagtggcggcagaacagatgctgaaaggacaatacaagatggaagactgtatttgaaaactactgtcatgtactgaatctttcctgttgaagaaatccatgttatagaaaagaactttgcagtcagacattcgtcatgggaaagttcagaaaaaaataaagtccttttaagggaacttcctgaattttgtgtattaatgttctttaaaagtttaagtattctac

SEQ ID NO: 9544 - protein, 517 aa, Homo sapiens
MVDLRGAKVASFTVEGCELICLPQAFDLFLKHLVGGLHTVYTKLKRLEITPVVCNVEQVRILRGLGAIQPGVNRCKLISRKDFETLYNDCTNASSRPGRPPKRTQSVTSPENSHIMPHSVPGLMSPGIIPPTGLTAAAAAAAAATNAAIAEAMKVKKIKLEAMSNYHASNNQHGADSENGDMNSSVGLELPFMMMPHPLIPVSLPPASVTMAMSQMNHLSTIANMAAAAQVQSPPSRVETSVIKERVPDSPSPAPSLEEGRRPGSHPSSHRSSSVSSSPARTESSSDRIPVHQNGLSMNQMLMGLSPNVLPGPKEGDLAGHDMGHESKRMHIEKDETPLSTPTARDSLDKLSLTGHGQPLPPGFPSPFLFPDGLSSIETLLTNIQGLLKVAIDNARAQEKQVQLEKTELKMDFLRERELRETLEKQLAMEQKNRAIVQKRLKKEKKAKRKLQEALEFETKRREQAEQTLKQAASTDSLRVLNDSLTPEIEADRSGGRTDAERTIQDGRLYLKTTVMY

SEQ ID NO: 9545 - DNA, 558 bp, Homo sapiens; identical to SEQ ID NO: 1487

SEQ ID NO: 9546 - protein, 185 aa, Homo sapiens [sequence omitted]

SEQ ID NO: 9547 - DNA, 6000 bp, Homo sapiens
gatgcctggacagcatcagtagtagttgcccgagggaggggggcagtcctcgtccggggacaggtcccaaaaggctgtttatttgttagagttctacgctcttcaaatgaacccaaatcaagggcaagttatcacgcaccatgtgacacccggcagctccagactagaacaaggctctgcactgaacgtgataattgaacttttaatgccaagtgtcacttttctttcagatgccaatattttacctcttgggtactttctgtgtagaagattcataacaagaacaatacttattctgcaattctttatataaagtaagaagaaagcccaaagacaaaaccagaggcaactggctgctgcatcgcccacctagtggcagtagtgtgagctatggacaaaagatctaagtctccaggacaaagagttgtgcagctgctcattttcctgttgacttctgtctaagacttggagatgtttgtaagattgggacctacctacagaggtatcacactcctcttggtctaactcactcttgaactgacattcgtggtgaatttcttttgtcacttagcatattagaagagatgttttactataattctcacaatcaatccataagcaagtggttaaaggcctttttgtacttagttatctcagcactgtcagggatggctaaagagaataagcatggcctctgctttccattttttaacatatgacaactaaaatacaaaaaaacacaagttatgacaaacatataatgcttcctctagacaagcattgcagcttggcattgcactaagtgttttgatactaatccattaaattctcccaccacccaacaacgtagaatatatcagagagtgaagcatggagaatttatataatttgctcaaggctacaaagctaataaatgtggagccaggattcaaatgtaggcattctgattccctagtctatgctcttacccagcatgttatgctgatgctcaaaacagttgagtgttatattaatttaaataaaaaagataaattagagctagagagtgtgtaataggctccatggagaaagtcaaatggacttggaacttggcaactgaagagaccatggccagacaaatggcaagaaattctggcaagaagaacaataggcatggagtgtccgcagcagaggaaagaagccaatctcactacagtggacggaaacaaggagaaattaaatgagatcattagaatggaaaagattgtagaaatccagataatttatagtgaaaattgaatttctaagagggtgaagttaaaattgggttaatagacactatctcaaaaatgtaatctgttacattacaacagaaacaaagcttctcatgacatgcagagatccataaatgactgttttacttttggcaaaattgaaaagagaataatagtgactgcagggtcaagattaatgcatgctgatttttaggtaacatgggagaattaaagagccagagtttcactactggccaccaacagtccattttaatgtgtactcagtctttgtgacctctgtccattagagatatatcaaacttgtatttaaactgaaatgtgattagagccatgaggcctgcctggaggtaaagcaggttgagaaaaatttcctcaatgacacattctctatggaaagtctttctcaaaggaaaagaaattgtgtcctactggcaaaaagcagaaaaggaagtggggaggggaaatggaaaaacatctaaaccatctctggggaaaaggtgatactaaatataaactggccatcaacatagtgaagctgaagaaggcaaggggtgtctaaatgtatcatcagaaaagttaagaaacagggcaaagtaggctagcttaggaacatcaacagaatattggaagaagaacagggggcaattttataacctctcaatcatttccaacttcttacagtgctccagaaaagaaaaagtgtccttgataagaatgatttattgaacaattatctctttccgccctcagctctctggaactggacaacagacagatctggtgaattataattatggagttctccagaagaacttcctctcaaggatgcacaattttccagttagtcacaaggcagcatcacaagcaaaatggggctctctctttatttaacaaggcctatcttctacacacagtttctgcaatttccgcttctccttatgtgtatctttctctgcccttttgtatgttccacttatgtaggattgtttgccccacagtcacacacaatacaatcatcatgctaaccccctccccaaaaactccctactcccttttcatctctcccattgctcctccacactggtcctgcgctggcctgtttgctccctgagtaaattagatccctgcatgtgctgctcatcttccctccctccaccttccaccatactctcttcatgtccacatctgcctcttggcaaatgccctgtggaagagagatttttcccaggctctcctcccttgtaggtctctttgtgcctccgcatcctgagtttcctctgactcttgtttctttctgcttcttgtgacagctatggttacagctaacaagcatgggaggaaggatctgagggaaagttgtgcttttggttcactaaatccttagatttgatttgggtagtcagaaagtgctaaaaagtttgtttcaatggaacatcctgcagtcccaaatggggtaaacttatcttgtttttcatctgctgtcatggttaactggcaacttccaggtacaaggtgactgtctggcatctcaggtgcacacatgaaggcaatttcagaaagaatgcctatggattacagaccattcagctgagttttatctggggctttctggcacggaatatgtaccagcatcttagatcaattctggcacattattttaaaagttttttgttcctgagttccttggtacctgatcattccaatattttctgccttacaaagtcacaggaaaacaggtttggagctgagtattttcaatcaccactgacttggtgacagacactaaactcatttcacttaggattataggttgaactcaaattgggatccctgaagagaaagaccagtcctttatccagtaccttaaggaaaacatttcttatttccattaacaaccagaaaaggaaagacagtgcaacagctggaagagcactgcaaatatcagggttacaaagagtaacccagaaacctttaaaataatttaaagtggtgataaaaccagtaacacactgcacttctattaatgcagtaatccttaacccttgaacctaacttgtacttacactaagaagtcagaagaactgtttttacttgatctaccaaggcaatttcccatagtttgattggaaatagtgctgatgattttctcatttaagttatctacaaagcactaaaaaaaagtgactctgctggaattatccttctaagaaaataagaaaaaaatagaaatttcttacaactaagaaatggatcaagataacattggtctgtgagatttaaatctatcaaaatatgtgagcataccacagatatgatttcttcagttctctgcaaggtaaccaaagcaattccaagaagtcttattttattagaactcaaatttattaagtatgacctatctaagatcatagtgggcagacaactaccttggacgtggggttaagagaagataaaattcaaaagtttgaaagtaagtaaaggataagcaagattctttgaatgatcaacagcactccacaggcacacagagacacaaaaacagctaaaaaggcaaggacaaaattaaacagtaatgatgatttatagtaagatactctgagacatgatagaagtctcagtacaccaaaaggaaaatcttgtttgctcaaattatttgtttcttctgtctaatgaatgtaattctaatatacaagtgataacactggcatttctttgaaatgttgattcagtttaattatgaaaatcaccaaggtattttctagctgctgcatcactccctgtactaagattaatcacatcaacatcattcatttaatcttcaaagaggaagcagttgtccacaaaagccttcaaatagcttcattagtgcaatttttcagtctcaaacacttagctagcagcatatgattgagagtaaggtcattatattcatctatttcctaatctaatttttgtaatgtttctacatttaatgtaggaatgtgtaagtgtggagtttttgccttctctttgtttgtaaaacagctcaaaacatgaagaaaataatgattctaattataaaatatttgattgctatggttttaagtcatgaaatttaatgtacaggcccatggccagttcattttttcttttttctttttttaatgtgaaaagaatttagtgtagaaatgctctattttcttgtctcttgtagacaaagaaaaacttagcgcatgagagacgtgtctgacttcagaaactggaattacaaaagtcactgcaaataaaatttctttggtgttttaaaatgcaagatgaattctatatttaaaaacagaagcctcacttatgtttctctaataagacccattcttaacatccttttctttgatgaaagcattaatattccctttccttattggaaaccaacaggtatcagagtcccacaaaataacactgtattgttgatgcaccgatcaaatcattcttttaatcattaaaaattatgcagttgcaatcaaaaacattctcagagagacttagagcagagcctggcaccagcagggtgtggtgatatagtcatttgtaattactgtacctactctgaagggttataaaatgtgtcagaaagtaaaatttgctgagccccattaccaagaagcaaaacttactaactggtgctttaaactttgcatcttataaaggaatgatttatttgacttttgactggtccacttgcagaaatcattacattgcaatattcagtgactgtgcaaaggggaaaaaaaggataaatcatacagagacattctcaagttaacatctggcgagcatataaggccaaatctgtaaggcaagatctgcctacgatggcataaataatggtgtgtatttgcagtttaggccaagggataagggcttttgatcataaaaatagttcataaccaattgcaatgagatgatgcaattgtaaaaattttgtttccacaaactgtataaagacaattatgatattttaaatattaaccccttttaaattgttttcaaataaaattataacggctttttgtaaaaccaaattctaattgacccaatcaaattttaagataaattatgaaggtgagaataacaccagcttgaaaatatcagtttgccatttgtccagctacatgcaaagtcaccagaataaaatggaattatatgaaagaggagcaataaactgcattatttacatgtgttcaatattataatcagaggtaaaaagtgtgtttttaaatatttgtacacacaaagttttattatctactttacataatactgtgttagacacactgggaaatgcaaagatagaaaagataaactatcttctcctgagaagcctttactatggtagaaaagataggagcacatgtcattacaataagaggaaatgtgagataagtgaccaaagaggatttttgtcttaaaaaatcctaagtttttatctaagagtttacaagtagattcttctgagccagaacaccatggaaggtttcctggcatgatgacatatgagattcaaggaatgggtattatgttcaaagctcaagactggggagagaagattacattttacagtttaaaatattttatttacctttcccaacacttatgcatttgtatcttctgcagcgaatgataaaatttcttttgttttcagaagtgtcaagataattttttattaaaataaacaaataaattcgagaag

SEQ ID NO: 9548 - protein, 68 aa, Homo sapiens
MNPNQGQVITHHVTPGSSRLEQGSALNVIIELLMPSVTFLSDANILPLGYFLCRRFITRTILILQFFI

SEQ ID NO: 9549 - DNA, 557 bp, Homo sapiens
ggacattcatagttacttgggacaacagttttagcagggctctctttctcctttcctgatctctctgttaagctgcctggctcatttgatatcacatccaaattatcagctgattgctctattgttttggacaatgccctgaagcataccaaaatgtgtctggaattggtgggttcttggtcttactgactttaagaatgaagttgcggacttttgcgatgccaatattttacctcttgggtactttctgtgtagaagattcataacaagaacaatacttattctgcaattctttatataaagctaaaagaaaatgcattctgccaacaactaatgagcttggaagagaactccaaaccccagaagaggcctgtcacattggctaacaccttgatttccacccactgagaccttgagcagagacttcagttacaccccacccagacttctgacctgcaaaacttaagaagaaagcccaaagacaaaaccagaggcaactggctgctgcatcgcccacctagtggcagtagtgtgagctatggacaaaagatctaagt

SEQ ID NO: 9550 - protein, 52 aa, Homo sapiens
SIPKCVWNWWVLGLTDFKNEVADFCDANILPLGYFLCRRFITRTILILQFFI

SEQ ID NO: 9551 - DNA, 2418 bp, Homo sapiens
atagttacttgggacaacagttttagcagggctctctttctcctttcctgatctctctgttaagctgcctggctcatttgatatcacatccaaattatcagctgattgctctattgttttggacaatgccctgaagcataccaaaatgtgtctggaattggtgggttcttggtcttactgactttaagaatgaagttgcggacttttgcggtgatccaccctaccacatattgtctcctaatggccgtccagtttatcctggagcccttgcatgacacaggcctatcgaagcataggagatgccaatattttacctcttgggtactttctgtgtagaagattcataacaagaacaatacttattctgcaattctttatataaagctccagagggaagtgagaaggatgttcacttgctggtgagagaaggagctggttccatccattacgcagtcccctgggagcgctaaatgcaactttatctcaacggggagtggacgatgagcaggacgtcgctagagggaaagagcctcacttcccgtttcctttggcagcgcccttttcccgacctaagggagcagaccttcgttggttggcgtgaggactggcgggagaggttttgtgccaggatccgcactgtctggggtgaacgctcctcacctttgacctgaaccgccaacttcccatcctccacttttggagagcgcgcctgatagctgctgcccacctgggcactgacatcctccttccgaccgggtgcggagaaagcacaaaggaagtagaccaaggagactgaaggtggttatgaagactgtgcatctctgaggacatcttaaacaaagatgacccaaatctttgatcttcaaatagtcgatgtgaactgcttaacaaaatgccctgggaaaactctgtctgaaacaagcagcttgggggtttgatttcattagttactggacaagaactggaatggagtgaaaaatcttcattcatttcttggtcagatggagagaggagaaaaaaagaagtgggtttccattcacttccattttctaactgatcattagttagagaacctttggaaaggtttagctcagttttttcttccaacttatcaggttcctcaagaaattcactgccttgagatgactttgataacccatccaaatccagtgacttaaaaccgttattacaagggctcttgctgttgtctgactctgacatcattgaatccaactcagagattttgtcaaggtaagcagcatccatcgatgcttcactggatgttcttgtccggttcatttcaaaagagcgaatagaattcaaccttttggataaacataagcctgatttctcactcaattttgaagatatttctccaacagaatttgctatcgtgttcccctctgaactttcaaaatctaagttttgggcatagcttgtggaacaacagtcccaaaatcctgtctttggggaagaaaaacattctgatttcttttcattttcacttctacttatatcatcttctgaagaatctttattagaaacatttgaagaatcacaaaaatcatcaaacaccaattttctgagatggtttgagtgctttttggaacctcctgcttggaccacagagctctctctattttctggagtactgagctgaaggcaactaagggacaaaggagtacaaggagctggaagatcataaagttcttcatctttgtagggtacacagtcacttggtttattcccccattctctttccaaataagtatccatacttgtatctgtcacatctaacattacttctacctgttcttgatataggtctttgttcttagaacagttaaggtctgctttgctggtactttcctgccttgcagaactggtgtcacacagtctgctgctggaaggcttcgctaggtgagaagaactggaggtggatgagccaggctgctttctggcactatcgccttgattctttgacaccacatcctcctcactgcctttgctccctttgccatctgcagaaagtgctgtctggcaaatggaattcatagcttctttctcttcacttgaattttttagctgtgcaacttgagattctagttcctctatatacttatcacttcgttccagggctttcttgaggcgattggtttcacgctcatactgttctactttggactgaagagcagcaactgcaaaccttccaaacctacaaagaatggaaagatagttaatcttataactcaagcttttttcttttcaaggtttgagagtgcaaactgtcccaggctattctaatttcacctaacagtgacatttcagaccactcaatgagtagggcaaatgccagatgtatattttcaaaaaatggtttccccacttacataataataaacatatgataataatagc

SEQ ID NO: 9552 - protein, 66 aa, Homo sapiens
MQLYLNGEWTMSRTSLEGKSLTSRFLWQRPFPDLREQTFVGWREDWRERFCARIRTVWGERSSPLT

SEQ ID NO: 9553 - DNA, 618 bp, Homo sapiens
tgatctctctgttaagctgcctggctcatttgatatcacatccaaattatcagctgattgctctattgttttggacaatgccctgaagcataccaaaatgtgtctggaattggtgggttcttggtcttactgactttaagaatgaagttgcggacttttgcgtaagaagaaagcccaaagacaaaaccagaggcaactggctgctgcatcgcccacctagtggcagtagtgtgagctatggacaaaagatctaagtctccaggacaaagagttgtgcagctgctcattttcctgttgacttctgtctaagacttggagatgtttgtaagattgggacctacctacagagctccagagggaagtgagaaggatgttcacttgctggtgagagaaggagctggttccatccattacgcagtcccctgggagcgctaaatgcaactttatctcaacggggagtggacgatgagcaggacgtcgctagagggaaagagcctcacttcccgtttcctttggcagcgcccttttcccgacctaagggagcagaccttcgttggttggcgtgaggactggcgggagaggttttgtgccaggatccgcactgtctggggtgaacgc

SEQ ID NO: 9554 - protein, 60 aa, Homo sapiens
MQLYLNGEWTMSRTSLEGKSLTSRFLWQRPFPDLREQTFVGWREDWRERFCARIRTVWGE

SEQ ID NO: 9555 - DNA, 426 bp, Homo sapiens
ggtgatccaccctaccacatattgtctcctaatggccgtccagtttatcctggagcccttgcatgacacaggcctatcgaagcataggagatgccaatattttacctcttgggtactttctgtgtagaagattcataacaagaacaatacttattctgcaattctttatataaagtaagaagaaagcccaaagacaaaaccagaggcaactggctgctgcatcgcccacctagtggcagtagtgtgagctatggacaaaagatctaagtctccaggacaaagagttgtgcagctgctcattttcctgttgacttctgtctaagacttggagatgtttgtaagattgggacctacctacagagctccagagggaagtgagaaggatgttcacttgctggtgagagaaggagctggttccatccatta

SEQ ID NO: 9556 - protein, 36 aa, Homo sapiens
MTQAYRSIGDANILPLGYFLCRRFITRTILILQFFI

SEQ ID NO: 9557 - DNA, 342 bp, Homo sapiens
gacagcagcgggagaagaaaagggcctccctgggatgaccttccaggagacaactgctacaagaaagcctatgtacagttaaaagagcacaactgtccctgatcacatggaagccttctccaggtgctgccacaaacaatgggaaggggtcttggagcagaggttgggatctctgacaagtgcagtgacaagctaaatgagatcatgctgtctttctcaaaagtggaacagtggctaaaacaacatgtaaagcattgatcctagtgcctggtaagaggaagccttcctatactttacttccccagcctcttcagtggcagtagtaaaagatttcaaatcctt

SEQ ID NO: 9558 - protein, 39 aa, Homo sapiens
MGRGLGAEVGISDKCSDKLNEIMLSFSKVEQWLKQHVKH

SEQ ID NO: 9559 - DNA, 694 bp, Homo sapiens
tactttgcataaagcacatattcctctacataatatggtgagcctcatccagtcagttcaaggccttaagagcaaagagcaaagttcccagatgcagcccctaaaccttggacttttcagtgtccagaactataaaaaaataaatttaccttttttttttttttttttgacacctgggcgacaagagcaaaactccgtctcagaaaaagaaaaaaaaaaaaattgaacaacccttttatttctgtgctagacagggcacagtccaggctacctggtgcatcaaatacctctgacctccagagcaacacgagcagctgaatttcaaaaataaaaagtggacagagaataagcacagctgctgacacaaataacctgatgtctgggtcctagctcatgctacacatatggccagcctggctattctttctctcatcttggccctgacaacagttgggaaattatggtccccttttctgttttgcatattcatagaaaatatctgtattctaacctgcccagctacagttacttcctctgtaactccttcctatccctatcattgtaaattaagttaattcagcaaagaagttaacaggaaggaagagagagagagaaatgagagagactgagagagggagacatggatgaaggagacggaggaagaaagagaaagaaagaaggaaagaggaaaaag

SEQ ID NO: 9560 - protein, 63 aa, Homo sapiens
MVSLIQSVQGLKSKEQSSQMQPLNLGLFSVQNYKKINLPFFFFFLTPGRQEQNSVSEKEKKKN

SEQ ID NO: 9561 - DNA, 903 bp, Homo sapiens
cccagccagcagagtcagcctactcagatttcctatccgtgatgtgggagcgttgattttttgcgtttttttttgctcttcaggaatgagtctcgctgttgctcattctgtggatccctgctgcgtttataagctgtaacgctcagcgctaaggtctgcaggttcagtcctaaaaccagtgagaccagcgacccaccagaaaaaactagcaactgcagacgcgacgcctttaagagctgtaacactcatcgcgaaggtttgcagcttcactcctgaagccagggagaccacgaactcaccagaagaaataaactccggacacatttgagcatctgaaggaacaaactccgaacacaccatcttttaagaactgtaacactcactgcgagggtccaagggtctgcagcttcatttttgaagtcaccaagaccaagaaccacaaattctggacacaacatcatttcctgtgggatcatattctggaatcacagagcatgactatgagatctcagctatccagctgtcacagaggaagtgggaattttcaaccatgaatgtcaagtcatcttttcaatgtgaaggtttgctactgccgaataagaaacaccattttgttttcagatgaaaactaacgtggggtcgaggcaccagcccgctgtcggctggcacgaccactcctgcggcctgggcttcagattctctctctagctgcaggcattaaattatgatgaaggccacagaaaaatgattaaggtcaaagtctagaatcaattgtcagcctatgttatggacataacatttatgtaccattgggtcatgagggtggagcgctcatgaatggaattagcgaccttatgaaagagagactagagagctgtctcatcccttctgctgtgtgaggac

SEQ ID NO: 9562 - protein, 53 aa, Homo sapiens
RNKLRTHHLLRTVTLTARVQGSAASFLKSPRPRTTNSGHNIISCGIIFWNHRA

SEQ ID NO: 9563 - DNA, 371 bp, Homo sapiens
aacttctgacattgagattttattaagcaaaacaccacttacaattctagtcaaatttcattttattatgaagaaatgtgtttggtgttgtttagtagtattttgtaggcttacttagcagatgtcatttttgttgcataggtaatatttgttctaaactttgagattctacaaacattcacctttcaaaggcacagacactcctcttattttgtacacattgcaacactttgaactattcattaaatggaagtggatcatcagaaaggttttcatcctcgtcatcttcaggttgattaggttgaggtgaatagaacttttggttatcagattccttccaggatcccggtcgatgtctccagttgaaaagg

SEQ ID NO: 9564 - protein, 50 aa, Homo sapiens
TLRFYKHSPFKGTDTPLILYTLQHFELFIKWKWIIRKVFILVIFRLIRLR

SEQ ID NO: 9565 - DNA, 704 bp, Homo sapiens
acgagcagcgcagccctctggactgcgctcagcaaacttttataagccagatggacgatggcaagccaacaagggctggctgggaaggctgctgccttgctcctctagcccccagatggaaacggtgcaatcaaaacgaggaagagaaggaaaagaagtgtttaaaaaaccaccatgggggttcagagctgcaatccgagttccgagccgcagaatcctggagcgctgcgggctcggctcgccggagtgtgcggcaaaggtgggagcgcgcgccggctcccccgggagggagatggacaagcgagagcgagtgtgtatgcgcgcgtgtgtctgttggtgtgagctcgaggttcttggggatgtgtgtgcgtggaggtatgtgttggggatatacgagatctaggggaaacctcagcttaacacaggctgtgggagcctgtgagagtcctcctgaaataggaagagagaaatcctggagacagtcactggaggcaagagggaaggagaaaggaggggggagaaagaaacgtgctacacattgcacagccgaaattcacaggccgagtcaaaggcaaaacctggactggatctcttcctagtcggtagaaaggggaaaaaaagaaaaagaaacgtacctattttcttattcacttcacatcctttataccgatctgaaatgacatcaataaacaatctagaaagac

SEQ ID NO: 9566 - protein, 182 aa, Homo sapiens
MDDGKPTRAGWEGCCLAPLAPRWKRCNQNEEEKEKKCLKNHHGGSELQSEFRAAESWSAAGSARRSVRQRWERAPAPPGGRWTSESECVCARVSVGVSSRFLGMCVRGGMCWGYTRSRGNLSLTQAVGACESPPEIGREKSWRQSLEARGKEKGGGRKKRATHCTAEIHRPSQRQNLDWISS

SEQ ID NO: 9567 - DNA, 6500 bp, Homo sapiens
ctttctccttccctcttgcctccagtgactgtctccaggatttctctcttcctatttcaggaggactctcacaggctcccacagcctgtgttaagctgaggtttcccctagatctcgtatatccccaacacatacctccacgcacacacatccccaagaacctcgagctcacaccaacagacacacgcgcgcatacacactcgctctcgcttgtccatctccctcccgggggagccggcgcgcgctcccacctttgccgcacactccggcgagccgagcccgcagcgctccaggattctgcggctcggaactcggattgcagctctgaacccccatggtggttttttaaacacttcttttccttctcttcctcgttttgattgcaccgtttccatctgggggctagaggagcaaggcagcagccttcccagccagcccttgttggcttgccatcgtccatctggcttataaaagtttgctgagcgcagtccagagggctgcgctgctcgtcccctcggctggcagaagggggtgacgctgggcagcggcgaggagcgcgccgctgcctctggcgggctttcggcttgaggggcaaggtgaagagcgcaccggccgtggggtttaccgagctggatttgtatgttgcaccatgccttcttggatcggggctgtgattcttcccctcttggggctgctgctctccctccccgccggggcggatgtgaaggctcggagctgcggagaggtccgccaggcgtacggtgccaagggattcagcctggcggacatcccctaccaggagatcgcaggggaacacttaagaatctgtcctcaggaatatacatgctgcaccacagaaatggaagacaagttaagccaacaaagcaaactcgaatttgaaaaccttgtggaagagacaagccattttgtgcgcaccacttttgtgtccaggcataagaaatttgacgaatttttccgagagctcctggagaatgcagaaaagtcactaaatgatatgtttgtacggacctatggcatgctgtacatgcagaattcagaagtcttccaggacctcttcacagagctgaaaaggtactacactgggggtaatgtgaatctggaggaaatgctcaatgacttttgggctcggctcctggaacggatgtttcagctgataaaccctcagtatcacttcagtgaagactacctggaatgtgtgagcaaatacactgaccagctcaagccatttggagacgtgccccggaaactgaagattcaggttacccgcgccttcattgctgccaggacctttgtccaggggctgactgtgggcagagaagttgcaaaccgagtttccaaggtcagcccaaccccagggtgtatccgtgccctcatgaagatgctgtactgcccatactgtcgggggcttcccactgtgaggccctgcaacaactactgtctcaacgtcatgaagggctgcttggcaaatcaggctgacctcgacacagagtggaatctgtttatagatgcaatgctcttggtggcagagcgactggaggggccattcaacattgagtcggtcatggacccgatagatgtcaagatttctgaagccattatgaacatgcaagaaaacagcatgcaggtgtctgcaaaggtctttcagggatgtggtcagcccaaacctgctccagccctcagatctgcccgctcagctcctgaaaattttaatacacgtttcaggccctacaatcctgaggaaagaccaacaactgctgcaggcacaagcttggaccggctggtcacagacataaaagagaaattgaagctctctaaaaaggtctggtcagcattaccctacactatctgcaaggacgagagcgtgacagcgggcacgtccaacgaggaggaatgctggaacgggcacagcaaagccagatacttgcctgagatcatgaatgatgggctcaccaaccagatcaacaatcccgaggtggatgtggacatcactcggcctgacactttcatcagacagcagattatggctctccgtgtgatgaccaacaaactaaaaaacgcctacaatggcaatgatgtcaatttccaggacacaagtgatgaatccagtggctcagggagtggcagtgggtgcatggatgacgtgtgtcccacggagtttgagtttgtcaccacagaggcccccgcagtggatcccgaccggagagaggtggactcttctgcagcccagcgtggccactccctgctctcctggtctctcacctgcattgtcctggcactgcagagactgtgcagataatcttgggtttttggtcagatgaaactgcattttagctatctgaatggccaactcacttcttttcttacactcttggacaatggaccatgccacaaaaacttaccgttttctatgagaagagagcagtaatgcaatctgcctccctttttgttttcccaaagagtaccgggtgccagactgaactgcttcctctttccttcagctatctgtggggaccttgtttattctagagagaattcttactcaaatttttcgtaccaggagattttcttaccttcatttgcttttatgctgcagaagtaaaggaatctcacgttgtgagggttttttttttctcatttaaaataaaaaaggaagaaagaaaataattttccttgtaaaatcgggccaaaccccaagacagctacattttcaacaaaaaagcaaacagagaaaaataaatgaactttaacactgtaagttcagcattgacagccaacttccagtgtaagcttttttgtgacaaatccgggtttaaaaatgcttatggggagaaagcttaaagtttgttctaaatgtagtgaaaatgcactgttgtcttggaggtatcatcttgcactctaaccaaacaacaccaaattaatctggaggtactgatactaaatttggaatcccgtctttaatatgagaacacaaattactacaactcagtacctctgtcttactctgcccaatttcaatttagtaatggcaccattattcttaattcccttaatgtctgtccgctgtatccaattggcacagattttccccttcatcttcaattactagtagctacccccatcaattcaccttcctcaagagtctcaattgaaaataatctttgatgatacaatctctgcttttgccacaggtttgacattaactagacgtttctgcccctgtgctcattaccctcccaaaacaatagtttttttaatgaattgaaacacaattagatccattcctgagttttcatttttaactatttactttgtgtcagttggtttctgcatcacaagggcattctcttacaaaacaactcacaacagaaaaaaaaagtcaagacaaaaaatatatatatatagtattgacatggagatttctttcacttttttagtcttagtatgatcatctatttttatatctatgtatatataaatcacagattttaacttcttaattccaagctcagggttgacacacctttgtaagaaaatgttttgtcaaccagctcttcttgttttgtgctgctcaaagaagggattcctcagtgatcggtgagcaccaagaatcaagaaagagaactttttatgtatctaactgtccatttattaaaaatttgccagggcacacccttctgcatgagtgtgcttcagcctgggtgctccagactacaccaaactcatgggatgagccattggtgtgcagggctttaccggtgatggaaactgtatgtgtaaagaatgttattcatgaaaaaccattgctttcatgtaaaacaccttcggcctaggattcctgcctggcacttggatacattacctaactcaataggccagtttagagccacagcctaacctgttcaccaagtaggccaaagccaggcctttcgctccccctgacagagagaagcaaaataaacccaactgggggctttatgaatacagttggctatccatatgtttcttagtttttatgatgcatctggagtagggaaaagtaatgtttcaagacaccatagtaggccagttacattttaattaactcatcgacagtattgacacgtaaatggtatttttcaatctgttctcatcaaaattaaaattagttattgatttagtcatcacatttaagtagaacacatgtggcacaatagtattaagtatatttgagcacttttgcaagacagaaagtatttacaagcatctattgctactttatgcctaatgaaatataaaatgtaggatgatgagagactttgtggcattctttcatttaaacctttatgaaattaaccatctagttcatcattacatactcctagaaaaccatccatttcactgcccacattttggcttcctaccacaaattccacataagacttctctatgaaggaccagtcatttacattgctcatttcattctgtgttcagaagtcagtattgtctttctccaataattaaggtgcaatacaaattaaatcaaccttgattttccagactatttgaataataacttgcttttatggctttaaactccaggtctttcctttttaaaatatttctgcattctcttttatgaactagatcaggatgccttgtttttcctgtgctttcacccccaaaaggttttgtgcatgtgtatgaatacacataatattagtgaatgtgaacccatgttctatacgcactaaacacacagttaatatataaacgcctgcttcatttgtttcaacaccttcattatcaatatgattcatattgatgagatatagtgatgcataatgagccaggcagagagctgaaatgatatcagttaatgatgtcacagtgttagcaccctgcatggatgtggtcaaaatatcattcaagttgtacttcctagtttttatcatcatactactatgtcatatgattttcagactaatttaacatgagaaatgttttggccctaaaggatttcacttaacctagttaccctatttcagtaagtattttggaattcaaccctcgaattattttttctcatttcagcatagtgataggggatgcaatgaggcttcattattttttatgacctgcccctcatttgctctgatgttccctaaattctgtaatcatatcataacttttgttatgaatagagaggaatgggctcactgaaacctgacactagaaattggtgggtgatgctcataactgcaaacacttagcttattgaagtgcctctatttacatgttctttagttataatatgtatttttctaacagaaatacacgtctgtaattggtatatattatactttgtatgtgtcacaacaaaagctaaacagaggctaaagtctttagcagagaagaatgaattacaaatttaccaataagagctctgtttatggttctgtattgaaggacaaccatgacaaccttctgtcattttcacgaaggccaagttggtactttgattatagccatcgtagaacattagcactagaaatctgtctcccttacaatgacttacctagctagcatcaagtaacttgtatcacctgctttaaatgtaagggatagaaaatactattttgtctacactgaaaaacattattattcattgataagtagtaataattataaaagtaacattctttaaagcaaacacattgaaaatattattacaggcagaaccctgatttttaatttatattccctgctgcagacattagccttctttaattcttttgccattacatacatgtttcggctacagactgaacacgaactaaagtccctaaggaggaaaaaaccttaacatattcctgagatgtgattcttttattacttctttttgcaaagctaattatcaaatgatttgattaaacctagacgcattaggaaatgcaagttttacctaaaacttgcagaaatttaaacacatttccatttacttactaacgaacagacctgatttttatttaaaaacacaatttagctttgccaacagaagagtaaaggaaaccataacttataaatttgtaatgtgttcctccttgttggagacattagccagtgtttagttttagaccaacttatacaaagagagtattgatttgtacacattctggagacttgctatatcatggtttgctatggcacagactcagcttagcatggggacattttgaacttcattcaaagttgagtagttactggaacctttgacattgccttgtaatgaggtacttccaaaaaaagacccctaacaatggcataatagtgaggtctctctgtgcatatacataatatatatgcaggataaatgtgtgcaccaatcaaatctaaaattttatgtgactgtcaaatgaatattatttgggttaagatttttcatttctgatttggatagaaaattgctattaatcttgtattaaaatagtttttaaaaatct

SEQ ID NO: 9568 - protein, 555 aa, Homo sapiens; identical to SEQ ID NO: 1490

SEQ ID NO: 9569 - DNA, 7117 bp, Homo sapiens
ctttctccttccctcttgcctccagtgactgtctccaggatttctctcttcctatttcaggaggactctcacaggctcccacagcctgtgttaagctgaggtttcccctagatctcgtatatccccaacacatacctccacgcacacacatccccaagaacctcgagctcacaccaacagacacacgcgcgcatacacactcgctctcgcttgtccatctccctcccgggggagccggcgcgcgctcccacctttgccgcacactccggcgagccgagcccgcagcgctccaggattctgcggctcggaactcggattgcagctctgaacccccatggtggttttttaaacacttcttttccttctcttcctcgttttgattgcaccgtttccatctgggggctagaggagcaaggcagcagccttcccagccagcccttgttggcttgccatcgtccatctggcttataaaagtttgctgagcgcagtccagagggctgcgctgctcgtcccctcggctggcagaagggggtgacgctgggcagcggcgaggagcgcgccgctgcctctggcgggctttcggcttgaggggcaaggtgaagagcgcaccggccgtggggtttaccgagctggatttgtatgttgcaccatgccttcttggatcggggctgtgattcttcccctcttggggctgctgctctccctccccgccggggcggatgtgaaggctcggagctgcggagaggtccgccaggcgtacggtgccaagggattcagcctggcggacatcccctaccaggagatcgcaggggaacacttaagaatctgtcctcaggaatatacatgctgcaccacagaaatggaagacaagttaagccaacaaagcaaactcgaatttgaaaaccttgtggaagagacaagccattttgtgcgcaccacttttgtgtccaggcataagaaatttgacgaatttttccgagagctcctggagaatgcagaaaagtcactaaatgatatgtttgtacggacctatggcatgctgtacatgcagaattcagaagtcttccaggacctcttcacagagctgaaaaggtactacactgggggtaatgtgaatctggaggaaatgctcaatgacttttgggctcggctcctggaacggatgtttcagctgataaaccctcagtatcacttcagtgaagactacctggaatgtgtgagcaaatacactgaccagctcaagccatttggagacgtgccccggaaactgaagattcaggttacccgcgccttcattgctgccaggacctttgtccaggggctgactgtgggcagagaagttgcaaaccgagtttccaaggtcagcccaaccccagggtgtatccgtgccctcatgaagatgctgtactgcccatactgtcgggggcttcccactgtgaggccctgcaacaactactgtctcaacgtcatgaagggctgcttggcaaatcaggctgacctcgacacagagtggaatctgtttatagatgcaatgctcttggtggcagagcgactggaggggccattcaacattgagtcggtcatggacccgatagatgtcaagatttctgaagccattatgaacatgcaagaaaacagcatgcaggtgtctgcaaaggtctttcagggatgtggtcagcccaaacctgctccagccctcagatctgcccgctcagctcctgaaaattttaatacacgtttcaggccctacaatcctgaggaaagaccaacaactgctgcaggcacaagcttggaccggctggtcacagacataaaagagaaattgaagctctctaaaaaggtctggtcagcattaccctacactatctgcaaggacgagagcgtgacagcgggcacgtccaacgaggaggaatgctggaacgggcacagcaaagccagatacttgcctgagatcatgaatgatgggctcaccaaccagatcaacaatcccgaggtggatgtggacatcactcggcctgacactttcatcagacagcagattatggctctccgtgtgatgaccaacaaactaaaaaacgcctacaatggcaatgatgtcaatttccaggacacaagtgatgaatccagtggctcagggagtggcagtgggtgcatggatgacgtgtgtcccacggagtttgagtttgtcaccacagaggcccccgcagtggatcccgaccggagagaggtggactcttctgcagcccagcgtggccactccctgctctcctggtctctcacctgcattgtcctggcactgcagagactgtgcagataatcttgggtttttggtcagatgaaactgcattttagctatctgaatggccaactcacttcttttcttacactcttggacaatggaccatgccacaaaaacttaccgttttctatgagaagagagcagtaatgcaatctgcctccctttttgttttcccaaagagtaccgggtgccagactgaactgcttcctctttccttcagctatctgtggggaccttgtttattctagagagaattcttactcaaatttttcgtaccaggagattttcttaccttcatttgcttttatgctgcagaagtaaaggaatctcacgttgtgagggttttttttttctcatttaaaataaaaaaggaagaaagaaaataattttccttgtaaaatcgggccaaaccccaagacagctacattttcaacaaaaaagcaaacagagaaaaataaatgaactttaacactgtaagttcagcattgacagccaacttccagtgtaagcttttttgtgacaaatccgggtttaaaaatgcttatggggagaaagcttaaagtttgttctaaatgtagtgaaaatgcactgttgtcttggaggtatcatcttgcactctaaccaaacaacaccaaattaatctggaggtactgatactaaatttggaatcccgtctttaatatgagaacacaaattactacaactcagtacctctgtcttactctgcccaatttcaatttagtaatggcaccattattcttaattcccttaatgtctgtccgctgtatccaattggcacagattttccccttcatcttcaattactagtagctacccccatcaattcaccttcctcaagagtctcaattgaaaataatctttgatgatacaatctctgcttttgccacaggtttgacattaactagacgtttctgcccctgtgctcattaccctcccaaaacaatagtttttttaatgaattgaaacacaattagatccattcctgagttttcatttttaactatttactttgtgtcagttggtttctgcatcacaagggcattctcttacaaaacaactcacaacagaaaaaaaaagtcaagacaaaaaatatatatatatagtattgacatggagatttctttcacttttttagtcttagtatgatcatctatttttatatctatgtatatataaatcacagattttaacttcttaattccaagctcagggttgacacacctttgtaagaaaatgttttgtcaaccagctcttcttgttttgtgctgctcaaagaagggattcctcagtgatcggtgagcaccaagaatcaagaaagagaactttttatgtatctaactgtccatttattaaaaatttgccagggcacacccttctgcatgagtgtgcttcagcctgggtgctccagactacaccaaactcatgggatgagccattggtgtgcagggctttaccggtgatggaaactgtatgtgtaaagaatgttattcatgaaaaaccattgctttcatgtaaaacaccttcggcctaggattcctgcctggcacttggatacattacctaactcaataggccagtttagagccacagcctaacctgttcaccaagtaggccaaagccaggcctttcgctccccctgacagagagaagcaaaataaacccaactgggggctttatgaatacagttggctatccatatgtttcttagtttttatgatgcatctggagtagggaaaagtaatgtttcaagacaccatagtaggccagttacattttaattaactcatcgacagtattgacacgtaaatggtatttttcaatctgttctcatcaaaattaaaattagttattgatttagtcatcacatttaagtagaacacatgtggcacaatagtattaagtatatttgagcacttttgcaagacagaaagtatttacaagcatctattgctactttatgcctaatgaaatataaaatgtaggatgatgagagactttgtggcattctttcatttaaacctttatgaaattaaccatctagttcatcattacatactcctagaaaaccatccatttcactgcccacattttggcttcctaccacaaattccacataagacttctctatgaaggaccagtcatttacattgctcatttcattctgtgttcagaagtcagtattgtctttctccaataattaaggtgcaatacaaattaaatcaaccttgattttccagactatttgaataataacttgcttttatggctttaaactccaggtctttcctttttaaaatatttctgcattctcttttatgaactagatcaggatgccttgtttttcctgtgctttcacccccaaaaggttttgtgcatgtgtatgaatacacataatattagtgaatgtgaacccatgttctatacgcactaaacacacagttaatatataaacgcctgcttcatttgtttcaacaccttcattatcaatatgattcatattgatgagatatagtgatgcataatgagccaggcagagagctgaaatgatatcagttaatgatgtcacagtgttagcaccctgcatggatgtggtcaaaatatcattcaagttgtacttcctagtttttatcatcatactactatgtcatatgattttcagactaatttaacatgagaaatgttttggccctaaaggatttcacttaacctagttaccctatttcagtaagtattttggaattcaaccctcgaattattttttctcatttcagcatagtgataggggatgcaatgaggcttcattattttttatgacctgcccctcatttgctctgatgttccctaaattctgtaatcatatcataacttttgttatgaatagagaggaatgggctcactgaaacctgacactagaaattggtgggtgatgctcataactgcaaacacttagcttattgaagtgcctctatttacatgttctttagttataatatgtatttttctaacagaaatacacgtctgtaattggtatatattatactttgtatgtgtcacaacaaaagctaaacagaggctaaagtctttagcagagaagaatgaattacaaatttaccaataagagctctgtttatggttctgtattgaaggacaaccatgacaaccttctgtcattttcacgaaggccaagttggtactttgattatagccatcgtagaacattagcactagaaatctgtctcccttacaatgacttacctagctagcatcaagtaacttgtatcacctgctttaaatgtaagggatagaaaatactattttgtctacactgaaaaacattattattcattgataagtagtaataattataaaagtaacattctttaaagcaaacacattgaaaatattattacaggcagaaccctgatttttaatttatattccctgctgcagacattagccttctttaattcttttgccattacatacatgtttcggctacagactgaacacgaactaaagtccctaaggaggaaaaaaccttaacatattcctgagatgtgattcttttattacttctttttgcaaagctaattatcaaatgatttgattaaacctagacgcattaggaaatgcaagttttacctaaaacttgcagaaatttaaacacatttccatttacttactaacgaacagacctgatttttatttaaaaacacaatttagctttgccaacagaagagtaaaggaaaccataacttataaatttgtaatgtgttcctccttgttggagacattagccagtgtttagttttagaccaacttatacaaagagagtattgatttgtacacattctggagacttgctatatcatggtttgctatggcacagactcagcttagcatggggacattttgaacttcattcaaagttgagtagttactggaacctttgacattgccttgtaatgaggtacttccaaaaaaagacccctaacaatggcataatagtgaggtctctctgtgcatatacataatatatatgcaggataaatgtgtgcaccaatcaaatctaaaattttatgtgactgtcaaatgaatattatttgggttaagatttttcatttctgatttggatagaaaattgctattaatcttgtattaaaatagtttttaaaaatctaccagtgccctttctgcattttcttaattattgtcatagtctaaatttcagagccatggaattttttgtgtttgagacatttttagaagcttcaatattaaaaaacaacaacaaacctcgtatattaaaacagtgccactctcctaagtacactcagcatctgaaatcaggaactatttgaactttagaacatttagagcttcccaaatgtgtatggaaaatactgtagcgctgttcttttgtactgatttcttctcagaggataaatttagtgacttgaaaactgatgtcaatactttataaatgaggtcagaaaataagatcaaatgtgaaaagactaataatttcccaatttagccaattgcattgatttttatacttctgaaatgtttccatcctctcaggcatgctaaatattgtataacctgctaaagatttatttcacaaatgcttattgaactcttattctctataaaccctgctctaggggatttatcactggctgtgaaaaaccaccagttgaaaattattcattccttaatgcagctaatcataattattacagataaataatgtatttcaagaatgatcttataaataaaggaacccatacaaac

SEQ ID NO: 9570 - protein, 555 aa, Homo sapiens; identical to SEQ ID NO: 1490

SEQ ID NO: 9571 - DNA, 967 bp, Homo sapiens
caggggaacacttaagaatctgtcctcaggaatatacatgctgcaccacagaaatggaagacaagttaagccaacaaagcaaactcgaatttgaaaaccttgtggaagagacaagccattttgtgcgcaccacttttgtgtccaggcataagaaatttgacgaatttttccgagagctcctggagaatgcagaaaagtcactaaatgatatgtttgtacggacctatggcatgctgtacatgcagaattcagaagtcttccaggacctcttcacagagctgaaaaggtactacactgggggtaatgtgaatctggaggaaatgctcaatgacttttgggctcggctcctggaacggatgtttcagctgataaaccctcagtatcacttcagtgaagactacctggaatgtgtgagcaaatacactgaccagctcaagccatttggagacgtgccccggaaactgaagattcaggttacccgcgccttcattgctgccaggacctttgtccaggggctgactgtgggcagagaagttgcaaaccgagtttccaaggtaattgaaaacgtgctttctttctcattggtgttccttgtttattctgtttttaaaaccaatgtttaaaaaaaaaaaaaaaaaaaaaaaaaaccaaggtaaaaattcttaattggtggtccttgctcttaatcagttaaatatcaaagcataattctggctttcttttccttgcattgtgtgagagagaacaggattttaagccattctatgtggtttgaaaattaatgttaatacttatcagcagtatagcagagaagcttttagtaccaatggtgcaaaagcaggcacgttgcaactatgatcatttgatatttctgatcagggttttaaggatgataaatactcatgaaagaatccattcagaggttataatcctctagggagtcaagatgacagtcttcatggacctg

SEQ ID NO: 9572 - protein, 189 aa, Homo sapiens
MEDKLSQQSKLEFENLVEETSHFVRTTFVSRHKKFDEFFRELLENAEKSLNDMFVRTYGMLYMQNSEVFQDLFTELKRYYTGGNVNLEEMLNDFWARLLERMFQLINPQYHFSEDYLECVSKYTDQLKPFGDVPRKLKIQVTRAFIAARTFVQGLTVGREVANRVSKVIENVLSFSLVFLVYSVFKTNV

SEQ ID NO: 9573 - DNA, 625 bp, Homo sapiens
tataggaaatgttgaataagaatctacaacaagaaataggcaccagacagtggcaatgagaaaagtgaggatccatgccttctggacctctcagtacactctgcctaccacagcacctgaaacaaggcacacattaatgcaaagctgtttagttgggaatgaaccacttaagaggctcttcgagcaaaaacatcagtctatgtagcagacgtaggtccatgaagactgtcatcttgactccctagaggattataacctctgaatggattctttcatgagtatttatcatccttaaaaccctgatcagaaatatcaaatgatcatagttgcaacgtgcctgcttttgcaccattgacagccagtattcgcatcttgagaagagagagtttcattgatgaaagagtatcaacagtatgtgaggaacactagcagtgcttctgaggacaagactgtgctggacaatgggcttgtcccacgatgcgggaaggatgggtataccatgggaagaggaaagaacagggcttgatactcctccagctaattaatgaccaggggaaaaggaatgccagtcacggcccacctagggtgcatttaagcacataacatagacaacaaaaactgaagg

SEQ ID NO: 9574 - protein, 49 aa, Homo sapiens
MRKVRIHAFWTSQYTLPTTAPETRHTLMQSCLVGNEPLKRLFEQKHQSM

SEQ ID NO: 9575 - DNA, 762 bp, Homo sapiens
aggtccatgaagactgtcatcttgactccctagaggattataacctctgaatggattctttcatgagtatttatcatccttaaaaccctgatcagaaatatcaaatgatcatagttgcaacgtgcctgcttttgcaccattgaataaacaaggaacaccaatgagaaagaaagcacgttttcaattaccttggaaactcggtttgcaacttctctgcccacagtcagcccctggacaaaggtcctggcagcaatgaaggcgcgggtaacctgaatcttcagtttccggggcacgtctccaaatggcttgagctggtcagtgtatttgctcacacattccaggtagtcttcactgaagtgatactgagggtttatcagctgaaacatccgttccaggagccgagcccaaaagtcattgagcatttcctccagattcacattacccccagtgtagtaccttttcagctctgtgaagaggtcctggaagacttctgaattctgcatgtacagcatgccataggtccgtacaaacatatcatttagtgacttttctgcattctccaggagctctcggaaaaattctgcagataaaacagaaagaagtcataaattaatgaaatctagaaagcccaaggcacccacttaccttaagtacaactgcttttaattgacattttcatggaaaaacatatcctgtgattaaggtgttaatggacagataaaaaacatattttaaatgggatttgacctacatctatgacct

SEQ ID NO: 9576 - protein, 31 aa, Homo sapiens
MRKKARFQLPWKLGLQLLCPQSAPGQRSWQQ

SEQ ID NO: 9577 - DNA, 1389 bp, Homo sapiens
ggcctcagaggcggcgggtccggcgcgggcgcagcggtgcgggcgctcggctggggcgcggggcggggacgcggccgctgcccgctttgcgccgctcctccctgcgcgagtagcgctggccccggcgtcgaggcggccatggcgacccggagcccgctccccacccaccccgcctgctccgccctcccctccgccccgcgccacctttgatggctcggacctcagccggccaccgccagccctgctcgcgcgcccgcgccgccgccgcccgcgggtattaatagccggcgccgccgcgccctcggccgccgggggcttgggagccgccgatcccggagcccgagccgggagagggagccgccgcagccgccggcgctgtggagatattctctaagccgctttcatcatgggagaaatagagcagaggccgaccccaggatcacgactgggggccccggaaaattcggggatcagtaccttggaacgtggacagaagccgcccccaacaccttcaggaaaactcgtgtccatcaaaatccagatgctggatgacacccaggaggcatttgaagttccaatggtgtcctcatcctccttcctcaaagccaccggctcctcctggacgggttgggtactgagatgctccatgaagcccaagcaccattcacatctaattgagaagtttggagaggacagaattctcactcatcttacaggctctatttcttacacaaactgggctggaagtagaagcttagcggtcacagtcactgaagagcttcttaatcttttttgagtcaggacttgaagtcctgtttcattatttcattcaaagaaattgattggcaatggccagagttaaattcaaaggtgacattaacacatttcagtgcccaataagtgatttttctgctgggtaggagtagatacagatgtgatctcagatacgtgaagctgcatacagaggggcccatccactcctaaacgggtctccaggaggcttggtttgatctactagatttggtgcctcttaaagggaagcaatacagcttttctgctgtgggttgtttgccactaggggaagattcatttctattccagccataaattagaccaaagagagggatttggtttattgctagtgcagaagttaaaaaccatcttcctttcctgagtggtctcttaattagattctttagtttttaaatgttaactggaattgctgaagtttaattcctgaaagggtttagtttttaaaaggagtacctcatttaccatattactgtgttctgagaaatctacagtaatttttgtgtaacttttttattcaaagaatggattgttaattgtaaagccatttagaaaggcgaataaagtcagatctacttt

SEQ ID NO: 9578 - protein, 129 aa, Homo sapiens
MGEIEQRPTPGSRLGAPENSGISTLERGQKPPPTPSGKLVSIKIQMLDDTQEAFEVPMVSSSSFLKATGSSWTGWVLRCSMKPKHHSHLIEKFGEDRILTHLTGSISYTNWAGSRSLAVTVTEELLNLF

SEQ ID NO: 9579 - DNA, 420 bp, Homo sapiens
gcggccgctgcccgctttgcgccgctcctccctgcgcgagtagcgctggccccggcgtcgaggcggccatggcgacccggagcccgctccccacccaccccgcctgctccgccctcccctccgccccgcgccacctttgatggctcggacctcagccggccaccgccagccctgctcgcgcgcccgcgccgccgccgcccgcgggtattaatagccggcgccgccgcgccctcggccgccgggggcttgggagccgccgatcccggagcccgagccgggagagggagccgccgcagccgccggcgctgtggagatggagtcttgctcttgttgcccaggctggagtgcaatggcgtgatctcagctcaccgcaacctccacctcccaggttcaagcgattctcctgtctcgacttcccag

SEQ ID NO: 9580 - protein, 139 aa, Homo sapiens
AAAARFAPLLPARVALAPASRRPWRPGARSPPTPPAPPSPPPRATFDGSDLSRPPPALLARPRRRRPRVLIAGAAAPSAAGGLGAADPGARAGRGSRRSRRRCGDGVLLLLPRLECNGVISAHRNLHLPGSSDSPVSTS

SEQ ID NO: 9581 - DNA, 1380 bp, Homo sapiens
gccacggccgttgggagcctgagactcaaacatggcagcgccaccttctccaggaaggacggccgaccaagcagaccaggtatgcaccttcctcttcaaaaagcctggacggaaaggggctgcaggcctcagaaagcgcccggcctgcgaccccgagcacggagagagcagcagcagcggggacgagggcgacacagtggctcagcccccgcgggtggcaccgaggccccggggcctccacagctggcagaaggcggctcacggcgacaggaggggcgaggaggcggcgcctgagagcctcgacgtggtgtacaggtccacccgctcggcgaagcctgtggggccagaggacatgggggccaccgctgacttcgagcaggacaccgagaaggagcaccatacgccgaccatcctcaagtgcagccagcgggtccaggaggcactgcggggtcgggagcacgaccacatctaccggggaatccacagctacctgaggtacctgaagcccaaggacacgtccatgggcaactcctcctcggggatggcgaggaagggccccatacgtgcgccagggcatctgcgcgccactgtgcgctgggattaccagcctgacatctgcaaggactacaaggagactggcttctgtggcttcggggacagctgcaaattcctccacgaccgttccgattacaagctcgggtgggagattgaacgggagcttgaagagggtcgctactgtatctgcgaggacgaaaaccatgaagtgggaagcgaggaagaggaaataccattcaggtgtttcatatgtcgccaggccttccaaaacccagtcgtcaccaagtgcaggcattatttctgcgagagctgcgcgctggagcacttccgggccaccccgcgctgctacatctgtgaccagccaaccggcggcatctttaaccccgccaaagaactgatggcgaaactgcaaaagcttcaggctgcagaaggaaaaaagagataagaaagactcaagtctgtatgtacactggggagaagcagcctgttgagtaagatgagagagatgacagtcttcctgcaatcccatgcctgagtatgtaaccaaaagaattgaaatccggatctcaaagaggtatgtgcactcccatgttcactgcagaattatttgcaaaagccaagaggtgtaaacaacccaagtgtccatggatggatgaatggacaaacaaaatgcgatacacacacacaatggaatgctattaagccttaacgggaaggaaatccttttaaagatttaaactgatccttttaaggatcacatgctacaactagaatgaaccttgaagacgacactgctaagtgaaataaactagtcacaaaatgacc

SEQ ID NO: 9582 - protein, 322 aa, Homo sapiens; identical to SEQ ID NO: 1498

SEQ ID NO: 9583 - DNA, 1799 bp, Homo sapiens
ttgaatcaaacttttaaaacagagatacagaaaactcttcatgaaaagatttttttgtcttcctttctttgtatgtttgatatacagataactgttaacagtattctgatttccattattcacatttctgtagtgacaaggatcaagtatctgcaggcatttctttgtcccgggaaaagcagattttttcaaggaaatgatgtgttgatatataatagaacatacataaatacttttgctagctgtgcagttagttagaaagtgttgatgttttgacattgggtggctgttggtcactgcagatggaattgctgaaagaaatttacataacctgttaagagaccaatcattgttgcactagattaggtactcaagttagtttacagaattttgattatttttggttggcttggtatgagattggctttcgattatatgcttcaattgggtctaatgactcttccctgtcattgtaaatggaatcagtggagataggtcaatgacaaggttgattatagaccagggcttacagaagctaatcatctgcagtcttcatttacatacatgcttctgctgttggcttccagccaaggctggtgtagtatagtacatgaattttggagtcattattgatcatatatttccaacaagtgtgatgaggtggagttggcttaagttgaaatgtttagtggaaaacattggttcgttaaaagtagcagtggatctacagctcttttttgagaatgaattgctattatgtttgctgtctacactgaggtgtggcatgaagcctttctctcgtctcctttataccttggtggatctgtgtttccggacacttttccttttgaaagttgagatcccgttcagaggctgacagacttgtccctagaagaaagggtggcttctgtcaacagacgctggactgtgcagggcagctgcagtggttctggctggttgctgtggtcagtgggagtcgtggcatgttcctgggggcagtcacatctctgaacatttcctttatgacagttagtgcagttttaaaaaaggaaaaatcttcaatgttaaccttttttctgtctcttatttctaccctttaagattatctttatgacttctaaggatattttaagctcacagtcacacttggaagcagtgcccttgtaaggctctgcctagtgtggctgtattagaaaggtcattcctggttcttacatgtgcttctcctttccacgtctcccactggcgtgctgactttccaaggggaacgtgaagctgtccgcagtccttgcccttgccctttcttttggagactgtgtgaatgagcagcagccactttaatgtgaggcagccatataaacaatgaactttcacttgctgccaggaggtcataaactcaaggtcaccaaatgaattctagcttcagctcttggtttagtaatgtaccaagtttggtattactttttgtttgttttaatcaggtttctgccctcatcttctatttgggaaattaaaactggtctgttggcatggctggtgactgagcggcaggcacattcttagtctctgactttctgcagccatctttgagtgcatataagtgttgggtaacagtctactgaatgtgctacaagtgtgcggagttgtgttcatctttaacttgttttttttaaaaaacactctcttggtaaattgggatctcctgttgaaaactgtatttgtttggcagttgagtttatgcctggagcccctagagcacatttaactggttggtggtcagttgtaccatactgaaaaaa

SEQ ID NO: 9584 - protein, 88 aa, Homo sapiens [sequence omitted]

SEQ ID NO: 9585 - DNA, 1515 bp, Homo sapiens
gtaaccgcgagttccacttgcagtggctttgcccggagcccccgtgcacctgcggaccgggggaaagtgcgagttgcaaaccttctggaaggaggaatccctcggacagccgcgcaccagggtcccgggcccggccccgggaccctggactttcactttgagacttggttgcatttacaggaattcttcgcccagtaaacctctctttcgaacctaaaggcagacccagaagagctttttacaaaactagagaaaattgggaagggctcctttggagaggtgttcaaaggcattgacaatcggactcagaaagtggttgccataaagatcattgatctggaagaagctgaagatgagatagaggacattcaacaagaaatcacagtgctgagtcagtgtgacagtccatatgtaaccaaatattatggatcctatctgaagtctgtgaacaggagctcttgtgagtctcaccagcgctagtcacattcctcaagcttgaccatccctttgagaactgatgaaacagctttgaaattggcaaagctgaagaatggacttcaaagcagagaaggtgtgaattgttttaagtgggagcttcatgggaataaaatatgaggcgtggccctgaagggaccttggggccagcttgcggtaagaacttgcctttagaagatcctttggttcccatcagtgtctccctctcctcaaagggatggcagcccagtggacagtgggcacatgaccctgacatcgacagactcccacggaggtaagctgctctgtcagcgtcgcccagacagacgtgcaccttcctcatcagcccgaacctgcctccatccacaccttgtgcacatgtggatggagtactggaggctgttgtttctctgcttccagccaagggtagggatcagcgacctcaggtgaaaaatagcccttcctctcctgggcttagaaatgaatggagagaaagcaagctctagcagcttcctcctggttgaggacagggagttcccctgagatagtgctgtgtagatagtcaccgacgactccacagctttgtgtctgcccctcaccacacagtaggcttcattctcaccatgaaccactgttgtcatttggggacaagttgaaagagtctatttcccttcttgcattaaaggagaaactgtcagcgggattgctgttaaccactgtggtggtcaccacgacctgagtctcgtgctagtgtttgagagactaagctctgacttttctagaaggtattattccagatcctgacccagggaagaggcatggtggaccagaaatctgcattttcccagagcaaagctacagactggaaaatggattgcaaccttgcacaggcttgactgttgttgacagaagctctactttctcctgctctgttctcttattattaaagggatggatatatcagaacaagtgtgtgtttgttgttttaaagtttgttttttttttgtcttcagttaagttaggctgcagggttgagagaag

SEQ ID NO: 9586 - protein, 53 aa, Homo sapiens
MRRGPEGTLGPACGKNLPLEDPLVPISVSLSSKGWQPSGQWAHDPDIDRLPRR

SEQ ID NO: 9587 - DNA, 2846 bp, Homo sapiens
ctcgcaagacctggttgtttaaaagtgggcggcaccttccccttcgctcttcctcctgctcctgccctgatgtgtctggatggtgacagatgggaatcttctccagtgaccagaatccatgccttaccttgggagcccaagctgacttctcaagctctggggatgcctcagtgatctctgatgtggaattagtggaggctggccgttgctcacctctacacagcctgctggtcgttagcgagcaggagttctgatgttcctctcatcttggatgtctttcctaggagaatatttctcacgtgtttgacagaaaacattatctgtccatcatttccatggattcctgggtctcacgggcagaaggacaaggcagatatgaggcggatctggtaaaaccataaacaccatgagatcagagcatccatctgtagactcacagagcaagaagcgtgactgccccaatcttgaatggatgagtaagatgaaaatcaatttataaacatcttgtgacaagctggaattcagttatagatcaattacagattgctcactggacaatcaaggacattattagaaaacggtttccaccactagaaattcatctacattgacatccacctaaatatccagaaggtcatccccactttcgtcgctctccacagtcagctgccgggtccaccacttcttaacttcagaaccgcaggaagccgcgtcagtcatggggttcattttgcacacgacagatttcatggttgtccttcctccaaaccgaggaacctagatcttctctgatctctgaaaaataagttcctggatatgaaaggggatactttccttggtggtagtcccagtgaagacccactgaacatcgtcagcctcaaaatgtaagctgtgctgtcatctgctttgtggaacacatatgctacacatcttctcctttcaattgggctgaagttggggcacagttaaagagcattataaagctcctgctttagcatgaacttagttatctatagaaaaaaacatgtacaaggacactgggctgtggggagcattgctctccctccattcctgagtgctcttaatgggattatcctggctttccaaaaccctatagagaagaagctcatagaagaaaattctcttactgaatcagtaaaatatggaaaataatgggactgtttattaaaggattgaatgagagaacacaagtaatgcacttagaagagtgactggcatacagtgagtactacgtgctggcttctcaaccatgatagcctgaaatgtacccggaaaatgggggctaatgtaagtcatatttagagaagttattttgggggacaatgtttttgacaagactacatttttcattatgttgctgtctgtaaacaactgtagatgcagacttgcattttgaaaggcaagacccaaaacacacaaacagagtaaatacctttaaaatgcctcgatcgctggagaaatgcctggatggacctacctgagggcagacgccactgcccaaatttcctctggggtttccctgcgtcggctgcatcttgccgacttcctcctcgatccgacagcgtggggctcaggagctgctgctggctgcttgtctgcatgggaggagaagcacacagttaccgtctttttaaccctgcgctctcctccttttactataagaaaggaaaacacatggcaggaggacaagtgggaagaacaacatggactcagagtgtccacaatggggaaaagtgaaaatgggtataaagggtcacagaagaaaaagagccaccactgcacgccctgctgaaggagacaccactcttcctgggacatcttgtcctgggtaacccccactgcttcgttcccctccatgcctgagaatgtcattgtttcccttcatatcttcgctggcaaaccagggggtaaggaaggggaactgcaggaaggaaggtggggcagtggggacgggctgggcgggggcagtctactgtcaccagcctggagatccacacttagagcttcagggaaagagttctctgcaggcaaagctgtatgatgggccctggtggaggatggagctgataacaatctaagctacagtgaaagaaagagagatgccaagacttcccacacatttcacctgttctcaggttcacctgtcacctctccctttcctaacaaaagccttggtcttcacatctctttagtatccttttttttttttttttgtcacctctttctttcttaggctttttcatctaaaaacagagggctctgaaatcatcactttccccaacctcattagccctgtctcactgtctgtcctgacttcagcctgcctccctctcccatgcgagacattgccaaccatcttcagggtgaccagtggcaaggccactgcagatgcctccccttgccccttggttgactaactccgcagaagtccctgcagtcggtggcagatgatttctaaaggctggggagcccaaaacatgagatctactgaaaactgagctatggcaccagtgggcctcctggagcaccctgctgggccgtggagccttaggcttccaaaggtactctggcccctggctgcgttgctgcacaccatggagcctggtgctgctgggggctctgcacagagcacgggatcagctccacgttgttaacctcaaatcgtaattgctgcctcataaaggggcaggtcctcccagccagctgcttctcacagcacaggactctccaggacgctgataactccttgtacttttttatatagacacatacatagagtttgaaaatgaaaatatgctgtgacttaataaatagaaactcctcaa

SEQ ID NO: 9588 - protein, 54 aa, Homo sapiens
MGIFSSDQNPCLTLGAQADFSSSGDASVISDVELVEAGRCSPLHSLLVVSEQEF

SEQ ID NO: 9589 - DNA, 6818 bp, Homo sapiens
ccgcccgcgggcaccatgacagctctgagcgctggggttacagactgtggttttgtgcttgctcaccaaagctaacctcagcatgctcaaaaggaagcagagttccagggtggaagcccagccagtcactgactttggtcctgatgagtctctgtcggataatgctgacatcctctggattaacaaaccatgggttcactctttgctgcgcatctgtgccatcatcagcgtcatttctgtttgtatgaatacgccaatgaccttcgagcactatcctccacttcagtatgtgaccttcactttggatacattattgatgtttctctacacggcagagatgatagcaaaaatgcacatccggggcattgtcaagggggatagttcctatgtgaaagatcgctggtgtgtttttgatggatttatggtcttttgcctttgggtttctttggtgctacaggtgtttgaaattgctgatatagttgatcagatgtcaccttggggcatgttgcggattccacggccactgattatgatccgagcattccggatttatttccgatttgaactgccaaggaccagaattacaaatattttaaagcgatcgggagaacaaatatggagtgtttccatttttctacttttctttctacttctttatggaattttaggagttcagatgtttggaacatttacttatcactgtgttgtaaatgacacaaagccagggaatgtaacctggaatagtttagctattccagacacacactgctcaccagagctagaagaaggctaccagtgcccacctggatttaaatgcatggaccttgaagatctgggacttagcaggcaagagctgggctacagtggctttaatgagataggaactagtatattcaccgtctatgaggccgcctcacaggaaggctgggtgttcctcatgtacagagcaattgacagctttccccgttggcgttcctacttctatttcatcactctcattttcttcctcgcctggcttgtgaagaacgtgtttattgctgttatcattgaaacatttgcagaaatcagagtacagtttcaacaaatgtggggatcgagaagcagcactacctcaacagccaccacccagatgtttcatgaagatgctgctggaggttggcagctggtagctgtggatgtcaacaagccccagggacgcgccccagcctgcctccagaaaatgatgcggtcatccgttttccacatgttcatcctgagcatggtgaccgtggacgtgatcgtggcggctagcaactactacaaaggagaaaacttcaggaggcagtacgacgagttctacctggcggaggtggcttttacagtactttttgatttggaagcacttctgaagatatggtgtttgggatttactggatatattagctcatctctccacaaattcgaactactactcgtaattggaactactcttcatgtatacccagatctttatcattcacaattcacgtactttcaggttctccgagtagttcggctgattaagatttcacctgcattagaagactttgtgtacaagatatttggtcctggaaaaaagcttgggagtttggttgtatttactgccagcctcttgattgttatgtcagcaattagtttgcagatgttctgctttgtcgaagaactggacagatttactacgtttccgagggcatttatgtccatgttccagatcctcacccaggaaggatgggtggacgtaatggaccaaactctaaatgctgtgggacatatgtgggcacccgtggttgccatctatttcattctctatcatctttttgccactctgatcctcctgagtttgtttgttgctgttattttggacaacttagaacttgatgaagacctaaagaagcttaaacaattaaagcaaagtgaagcaaatgcggacaccaaagaaaagctccctttacgcctgcgaatctttgaaaaatttccaaacagacctcaaatggtgaaaatctcaaagcttccttcagattttacagttcctaaaatcagggagagttttatgaagcagtttattgaccgccagcaacaggacacatgttgcctcctgagaagcctcccgaccacctcttcctcctcctgcgaccactccaaacgctcagcaattgaggacaacaaatacatcgaccaaaaacttcgcaagtctgttttcagcatcagggcaaggaaccttctggaaaaggagaccgcagtcactaaaatcttaagagcttgcacccgacagcgcatgctgagcggatcatttgaggggcagcccgcaaaggagaggtcaatcctcagcgtgcagcatcatatccgccaagagcgcaggtcactaagacatggatcaaacagccagaggatcagcaggggaaaatctcttgaaactttgactcaagatcattccaatacagtgagatatagaaatgcacaaagagaagacagtgaaataaagatgattcaggaaaaaaaggagcaagcagagatgaaaaggaaagtgcaagaagaggaactcagagagaaccacccatacttcgataagccactgttcattgtcgggcgagaacacaggttcagaaacttttgccgggtggtggtccgagcacgcttcaacgcatctaaaacagaccctgtcacaggagctgtgaaaaatacaaagtaccatcaactttatgatttgctgggattggtcacttacctggactgggtcatgatcatcgtaaccatctgctcttgcatttccatgatgtttgagtccccgtttcgaagagtcatgcatgcacctactttgcagattgctgagtatgtgtttgtgatattcatgagcattgagcttaatctgaagattatggcagatggcttatttttcactccaactgctgtcatcagggacttcggtggagtaatggacatatttatatatcttgtgagcttgatatttctttgttggatgcctcaaaatgtacctgctgaatcgggagctcagcttctaatggtccttcggtgcctgagacctctgcgcatattcaaactggtgccccagatgaggaaagttgttcgagaacttttcagcggcttcaaggaaatttttttggtctccattcttttgctgacattaatgctcgtttttgcaagctttggagttcagctttttgctggaaaactggccaagtgcaatgatcccaacattattagaagggaagattgcaatggcatattcagaattaatgtcagtgtgtcaaagaacttaaatttaaaattgaggcctggagagaaaaaacctggattttgggtgccccgtgtttgggcgaatcctcggaactttaatttcgacaatgtgggaaacgctatgctggcgttgtttgaagttctctccttgaaaggctgggtggaagtgagagatgttattattcatcgtgtggggccgatccatggaatctatattcatgtttttgtattcctgggttgcatgattggactgaccctttttgttggagtagttattgctaatttcaatgaaaacaaggggacggctttgctgaccgtcgatcagagaagatgggaagacctgaagagccgactgaagatcgcacagcctcttcatcttccgcctcgcccggataatgatggttttagagctaaaatgtatgacataacccagcatccattttttaagaggacaatcgcattactcgtcctggcccagtcggtgttgctctctgtcaagtgggacgtcgaggacccggtgaccgtacctttggcaacaatgtcagttgttttcaccttcatctttgttctggaggttaccatgaagatcatagcaatgtcgcctgctggcttctggcaaagcagaagaaaccgatacgatctcctggtgacgtcgcttggcgttgtatgggtggtgcttcactttgccctcctgaatgcatatacttacatgatgggcgcttgtgtgattgtatttaggtttttctccatctgtggaaaacatgtaacgctaaagatgctcctcttgacagtggtcgtcagcatgtacaagagcttctttatcatagtaggcatgtttctcttgctgctgtgttacgcttttgctggagttgttttatttggtactgtgaaatatggggagaatattaacaggcatgcaaatttttcttcggctggaaaagctattaccgtactgttccgaattgtcacaggtgaagactggaacaagattatgcatgactgtatggttcagcctccgttttgtactccagatgaatttacatactgggcaacagactgtggaaattatgctggggcacttatgtatttctgttcattttatgtcatcattgcctacatcatgctaaatctgcttgtagccataattgtggagaatttctccttgttttattccactgaggaggaccagcttttaagttacaatgatcttcgccactttcaaataatatggaacatggtggatgataaaagagagggggtgatccccacgttccgcgtcaagttcctgctgcggctactgcgtgggaggctggaggtggacctggacaaggacaagctcctgtttaagcacatgtgctacgaaatggagaggctccacaatggcggcgacgtcaccttccatgatgtcctgagcatgctttcataccggtccgtggacatccggaagagcttgcagctggaggaactcctggcgagggagcagctggagtacaccatagaggaggaggtggccaagcagaccatccgcatgtggctcaagaagtgcctgaagcgcatcagagctaaacagcagcagtcgtgcagtatcatccacagcctgagagagagtcagcagcaagagctgagccggtttctgaacccgcccagcatcgagaccacccagcccagtgaggacacgaatgccaacagtcaggacaacagcatgcaacctgagacaagcagccagcagcagctcctgagccccacgctgtcggatcgaggaggaagtcggcaagatgcagccgacgcagggaaaccccagaggaaatttgggcagtggcgtctgccctcagccccaaaaccaataagccattcagtgtcctcagtcaacttacggtttggaggaaggacaaccatgaaatctgtcgtgtgcaaaatgaaccccatgactgacgcggcttcctgcggttctgaagttaagaagtggtggacccggcagctgactgtggagagcgacgaaagtggggatgaccttctggatatttaggtggatgtcaatgtagatgaatttctagtggtggaaaccgttttctaataatgtccttgattgtccagtgagcaatctgtaattgatctataactgaattccagcttgtcacaagatgtttataaattgattttcatcctgccacagaaaggcataagctgcatgtatgatgggttactatcaatcattgctcaaaaaaatttttgtataatgacagtactgataatattagaaatgataccgcaagcaaatgtatatcacttaaaaatgtcatatattctgtctgcgtaaactaaggtatatattcatatgtgctctaatgcagtattatcaccgccccgcaaaagagtgctaagcccaaagtggctgatatttagggtacaggggttatagctttagttcacatctttcccatttccactagaaatatttctcttgagagaatttattatttatgattgatctgaaaaggtcagcactgaacttatgctaaaatgatagtagttttacaaactacagattctgaattttaaaaagtatcttctttttctcgtgttatatttttaaatatacacaagacatttggtgaccagaacaagttgatttctgtcctcagttatgttaatgaaactgttgcctccttctaagaaaattgtgtgtgcaagcaccaggcaaagaaatggactcaggatgcttagcggtttaaaacaaacctgtagataaatcacttgagtgacatagttgcgcaaagatgttaagtttcttaagaaaccttttaataactgagtttagcaaaaagaataaaactatatagctcaatttatttaaaaaaatctttgcatgtgtgatgttatcattggcttcatttcttacccaaggtatgtctgttttgccataaatcagcagagtcatttcattctgggtgatcctaacacaccattgctacgttagatttgaaatgacatctctgttaaaagaatcttctatggaaataatggtgccctgcaaaatcttcctttgaactcacaggttagggatcacacaacttacttaatcgttttttgtttttgttttttttccttatatgtcaatggcccatgtcctccgggaaaattagaaaagcaaaatgattacaaagtgctgttagatttcttgtgctgggccagccaagtagaagtggacttgacttggacctttaactattttattacagattggacatttgctgttcagatgttttttaacagagggattatctcagaatcctgtgacctccaggttgttttataatctatttttctctatttaacattcctcagatagataggcaaataggacattccttctgtgtcacagaagtatcgtggtagtggcagtctacagtttatatgattcattgtaactatgagataaagaacaaccagtcatgtggccaaaaggattagatttgatttgatgttcacttggagtttactttttgtacatacaagataaaataaatattggatttgtaaaataa

SEQ ID NO: 9590 - protein, 1738 aa, Homo sapiens; identical to SEQ ID NO: 1504

SEQ ID NO: 9591 - DNA, 1007 bp, Homo sapiens
acttcctgcagaaatcctccagccctgttagaaatgcctcagccagggggactcatctcctcaaacctgggggaccgagacctatgagaggtcacagcatgagccaggacatcggaggtacccagacattgttatgaaactccgcatgtgcccctggtggacgctgctggacccagcatgcacacttctcggctaagagtcaccctggatgaaccaccattgccagcggggagcatgttgcagctttcccacgcagtggatgagaacgaaggttacgaccattgtgtgggaggcgtctgtgtagcaattgctggaatcactaatgcagaggataaagcaagcaaacaaaaaaacttccagaagaatcacagagttttagacctagaaaaaaactgaaaaatcatccattccactctcctcattttacagatgagggcatcgagcctcagagaaatgaaacttgcccaagaccacacagcaagtgagtgggggactcatgacccaagacactttttccaggcttccttctaccacatcatgctgcagaaaacacagcagatgggaagagacgaggcatgtggttgccatttctgtattacatccaattcatatttcatttagaaaatgtatttctagaacttgttaaaaaacctgaatgattttgattgaagtttttcaaaactaggattactatgcttctaatggagatcaagttcaaatttttaacatattttgccttattttgccactcccctcaaaatatccatagtattgaatgcccaggtttcctgtttggaaaagcccgaggatctgtgcacactctgggctactcttgcccagctcctgactgaggcactggacctggcccgatgctgctctctgctgctgcccagctcttctgctccaccggcaacactgtacccagttaatcattagggcccttgtctctgtacaattgctctgtacaactcgataaaataatccatgctaacaaaagtctagaatgg

SEQ ID NO: 9592 - protein, 72 aa, Homo sapiens
MHTSRLRVTLDEPPLPAGSMLQLSHAVDENEGYDHCVGGVCVAIAGITNAEDKASKQKNFQKNHRVLDLEKN

SEQ ID NO: 9593 - DNA, 905 bp, Homo sapiens
gaaatcctccagccctgttagaaatgcctcagccagggggactcatctcctcaaacctgggggaccgagacctatgagaggtcacagcatgagccaggacatcggaggtacccagacattgttatgaaactccgcatgtgcccctggtggacgctgctggacccagcatgcacacttctcggctaagagtcaccctggatgaaccaccattgccagcggggagcatgttgcagctttcccacgcagtggatgagaacgaaggttacgaccattgtgtgggaggcgtctgtgtagcaattgctggaatcacttgtggcattgtagaaagactgagcgtgggaaagaagacgcattctgaagtcaccccgatttatgttaaattatcaccttgactactgctatagaacgaatgtttatgtcccccacccaaattcgtatgctaagacctaatagccaataagatagtattaatagatggggcctttgggaggtgagtggctcatgagggcagagtcctcaaaaccagataagtgcccgaataaaaggggccccagagagatcccttgcaccgtctaccatgtgaagtgtagaacacagcgagaaggccacctatgagccagaacgtgggccctcaccagaacccagttgtgctggcaccctgatcctggacttccagcctccaaaatgacgacaaagaagtttgtttttcctgagccatccacttcaaagtattctgtcatagctccccaaatagactaagacatctacttaaccttggtcaaacgtttaaccttggagtccacgcctctgaaatggtgacaataacactgtgtatttcctactttatgatcaggattaataaatgtaatttattaatcagaaattagtaatttctgattattaat

SEQ ID NO: 9594 - protein, 74 aa, Homo sapiens; identical to SEQ ID NO: 1506

SEQ ID NO: 9595 - DNA, 908 bp, Homo sapiens
ataacggagaggagtagggaaataaagacctgtctggtccttccccacttccctaatccatctgtctcccttgctatgtctctaaaccttctccagccaggacatcggaggtacccagacattgttatgaaactccgcatgtgcccctggtggacgctgctggacccagcatgcacacttctcggctaagagtcaccctggatgaaccaccattgccagcggggagcatgttgcagctttcccacgcagtggatgagaacgaaggttacgaccattgtgtgggaggcgtctgtgtagcaattgctggaatcacttgtggcattgtagaaagactgagcgtgggaaagaagacgcattctgaagtcaccccgatttatgttaaattatcaccttgactactgctatagaacgaatgtttatgtcccccacccaaattcgtatgctaagacctaatagccaataagatagtattaatagatggggcctttgggaggtgagtggctcatgagggcagagtcctcaaaaccagataagtgcccgaataaaaggggccccagagagatcccttgcaccgtctaccatgtgaagtgtagaacacagcgagaaggccacctatgagccagaacgtgggccctcaccagaacccagttgtgctggcaccctgatcctggacttccagcctccaaaatgacgacaaagaagtttgtttttcctgagccatccacttcaaagtattctgtcatagctccccaaatagactaagacatctacttaaccttggtcaaacgtttaaccttggagtccacgcctctgaaatggtgacaataacactgtgtatttcctactttatgatcaggattaataaatgtaatttattaatcagaaattagtaatttctgattattaat

SEQ ID NO: 9596 - protein, 74 aa, Homo sapiens; identical to SEQ ID NO: 1506

SEQ ID NO: 9597 - DNA, 771 bp, Homo sapiens
aggaagcctacgccgtccaccttgaaggcaggggagctgcgcacgcacgtcagccgctgccaagtctgtatgagaagaacataatgaagcctgactcagctaatgtcacaacatggtgctacttcttcttctttttgttaacagcaacgaaccctagaaatatatcctgtgtacctcactgtccaatatgaaaaccgtaaagtgccttataggaatttgcgtaactaacacaccctgcttcattgacctctacttgctgaaggagaaaaagacagcgataagctttcaatagtggcataccaaatggcacttttgatgaaataaaatatcaatattttctgcaatccaatgcactgatgtgtgaagtgagaactccatcagaaaaccaaagggtgctaggaggtgtgggtgccttccatactgtttgcccattttcattcttgtattataattaattttctacccccagagataaatgtttgtttatatcaagacctcagcagggcatcgcatggaccgcaggagggcagattcggaccactaggcctgaaatgacatttcactaaaagtctccaaaacatttctaagactactaaggccttttatgtaatttctttaaatgtgtatttcttaagaattcaaatttgtaataaaactatttgtataaaaattaagcttttattaatttgttgctagtattgccacagacgcattaaaagaaacttactgcacaagctgctaataaatttgtaagctttgcataccttagat

SEQ ID NO: 9598 - protein, 35 aa, Homo sapiens
MKPDSANVTTWCYFFFFLLTATNPRNISCVPHCPI

SEQ ID NO: 9599 - DNA, 6535 bp, Homo sapiens
gcttggagccgccgcacccgggacggtgcgtagcgctggaagtccggccttccgagagctagctgtccgccgcggcccccgcacgccgggcagccgtccctcgccgcctcgggcgcgccaccatggggccccggctcagcgtctggctgctgctgctgcccgccgcccttctgctccacgaggagcacagccgggccgctgcgaagggtggctgtgctggctctggctgtggcaaatgtgactgccatggagtgaagggacaaaagggtgaaagaggcctcccggggttacaaggtgtcattgggtttcctggaatgcaaggacctgaggggccacagggaccaccaggacaaaagggtgatactggagaaccaggactacctggaacaaaagggacaagaggacctccgggagcatctggctaccctggaaacccaggacttcccggaattcctggccaagacggcccgccaggccccccaggtattccaggatgcaatggcacaaagggggagagagggccgctcgggcctcctggcttgcctggtttcgctggaaatcccggaccaccaggcttaccagggatgaagggtgatccaggtgagatacttggccatgtgcccgggatgctgttgaaaggtgaaagaggatttcccggaatcccagggactccaggcccaccaggactgccagggcttcaaggtcctgttgggcctccaggatttaccggaccaccaggtcccccaggccctcccggccctccaggtgaaaagggacaaatgggcttaagttttcaaggaccaaaaggtgacaagggtgaccaaggggtcagtgggcctccaggagtaccaggacaagctcaagttcaagaaaaaggagacttcgccaccaagggagaaaagggccaaaaaggtgaacctggatttcaggggatgccaggggtcggagagaaaggtgaacccggaaaaccaggacccagaggcaaacccggaaaagatggtgacaaaggggaaaaagggagtcccggttttcctggtgaacccgggtacccaggactcataggccgccagggcccgcagggagaaaagggtgaagcaggtcctcctggcccacctggaattgttataggcacaggacctttgggagaaaaaggagagaggggctaccctggaactccggggccaagaggagagccaggcccaaaaggtttcccaggactaccaggccaacccggacctccaggcctccctgtacctgggcaggctggtgcccctggcttccctggtgaaagaggagaaaaaggtgaccgaggatttcctggtacatctctgccaggaccaagtggaagagatgggctcccgggtcctcctggttcccctgggccccctgggcagcctggctacacaaatggaattgtggaatgtcagcccggacctccaggtgaccagggtcctcctggaattccagggcagccaggatttataggcgaaattggagagaaaggtcaaaaaggagagagttgcctcatctgtgatatagacggatatcgggggcctcccgggccacagggacccccgggagaaataggtttcccagggcagccaggggccaagggcgacagaggtttgcctggcagagatggtgttgcaggagtgccaggccctcaaggtacaccagggctgataggccagccaggagccaagggggagcctggtgagttttatttcgacttgcggctcaaaggtgacaaaggagacccaggctttccaggacagcccggcatgacagggagagcgggttctcctggaagagatggccatccgggtcttcctggccccaagggctcgccgggttctgtaggattgaaaggagagcgtggcccccctggaggagttggattcccaggcagtcgtggtgacaccggcccccctgggcctccaggatatggtcctgctggtcccattggtgacaaaggacaagcaggctttcctggaggccctggatccccaggcctgccaggtccaaagggtgaaccaggaaaaattgttcctttaccaggcccccctggagcagaaggactgccggggtccccaggcttcccaggtccccaaggagaccgaggctttcccggaaccccaggaaggccaggcctgccaggagagaagggcgctgtgggccagccaggcattggatttccagggccccccggccccaaaggtgttgacggcttacctggagacatggggccaccggggactccaggtcgcccgggatttaatggcttacctgggaacccaggtgtgcagggccagaagggagagcctggagttggtctaccgggactcaaaggtttgccaggtcttcccggcattcctggcacacccggggagaaggggagcattggggtaccaggcgttcctggagaacatggagcgatcggaccccctgggcttcaggggatcagaggtgaaccgggacctcctggattgccaggctccgtggggtctccaggagttccaggaataggcccccctggagctaggggtccccctggaggacagggaccaccggggttgtcaggccctcctggaataaaaggagagaagggtttccccggattccctggactggacatgccgggccctaaaggagataaaggggctcaaggactccctggcataacgggacagtcggggctccctggccttcctggacagcagggggctcctgggattcctgggtttccaggttccaagggagaaatgggcgtcatggggacccccgggcagccgggctcaccaggaccagtgggtgctcctggattaccgggtgaaaaaggggaccatggctttccgggctcctcaggacccaggggagaccctggcttgaaaggtgataagggggatgtcggtctccctggcaagcctggctccatggataaggtggacatgggcagcatgaagggccagaaaggagaccaaggagagaaaggacaaattggaccaattggtgagaagggatcccgaggagaccctgggaccccaggagtgcctggaaaggacgggcaggcaggacagcctgggcagccaggacctaaaggtgatccaggtataagtggaaccccaggtgctccaggacttccgggaccaaaaggatctgttggtggaatgggcttgccaggaacacctggagagaaaggtgtgcctggcatccctggcccacaaggttcacctggcttacctggagacaaaggtgcaaaaggagagaaagggcaggcaggcccacctggcataggcatcccagggctgcgaggtgaaaagggagatcaagggatagcgggtttcccaggaagccctggagagaagggagaaaaaggaagcattgggatcccaggaatgccagggtccccaggccttaaagggtctcccgggagtgttggctatccaggaagtcctgggctacctggagaaaaaggtgacaaaggcctcccaggattggatggcatccctggtgtcaaaggagaagcaggtcttcctgggactcctggccccacaggcccagctggccagaaaggggagccaggcagtgatggaatcccggggtcagcaggagagaagggtgaaccaggtctaccaggaagaggattcccagggtttccaggggccaaaggagacaaaggttcaaagggtgaggtgggtttcccaggattagccgggagcccaggaattcctggatccaaaggagagcaaggattcatgggtcctccggggccccagggacagccggggttaccgggatccccaggccatgccacggaggggcccaaaggagaccgcggacctcagggccagcctggcctgccaggacttccgggacccatggggcctccagggcttcctgggattgatggagttaaaggtgacaaaggaaatccaggctggccaggagcacccggtgtcccagggcccaagggagaccctggattccagggcatgcctggtattggtggctctccaggaatcacaggctctaagggtgatatggggcctccaggagttccaggatttcaaggtccaaaaggtcttcctggcctccagggaattaaaggtgatcaaggcgatcaaggcgtcccgggagctaaaggtctcccgggtcctcctggccccccaggtccttacgacatcatcaaaggggagcccgggctccctggtcctgagggccccccagggctgaaagggcttcagggactgccaggcccgaaaggccagcaaggtgttacaggattggtgggtatacctggacctccaggtattcctgggtttgacggtgcccctggccagaaaggagagatgggacctgccgggcctactggtccaagaggatttccaggtccaccaggccccgatgggttgccaggatccatggggcccccaggcaccccatctgttgatcacggcttccttgtgaccaggcatagtcaaacaatagatgacccacagtgtccttctgggaccaaaattctttaccacgggtactctttgctctacgtgcaaggcaatgaacgggcccatggccaggacttgggcacggccggcagctgcctgcgcaagttcagcacaatgcccttcctgttctgcaatattaacaacgtgtgcaactttgcatcacgaaatgactactcgtactggctgtccacccctgagcccatgcccatgtcaatggcacccatcacgggggaaaacataagaccatttattagtaggtgtgctgtgtgtgaggcgcctgccatggtgatggccgtgcacagccagaccattcagatcccaccgtgccccagcgggtggtcctcgctgtggatcggctactcttttgtgatgcacaccagcgctggtgcagaaggctctggccaagccctggcgtcccccggctcctgcctggaggagtttagaagtgcgccattcatcgagtgtcacggccgtgggacctgcaattactacgcaaacgcttacagcttttggctcgccaccatagagaggagcgagatgttcaagaagcctacgccgtccaccttgaaggcaggggagctgcgcacgcacgtcagccgctgccaagtctgtatgagaagaacataatgaagcctgactcagctaatgtcacaacatggtgctacttcttcttctttttgttaacagcaacgaaccctagaaatatatcctgtgtacctcactgtccaatatgaaaaccgtaaagtgccttataggaatttgcgtaactaacacaccctgcttcattgacctctacttgctgaaggagaaaaagacagcgataagctttcaatagtggcataccaaatggcacttttgatgaaataaaatatcaatattttctgcaatccaatgcactgatgtgtgaagtgagaactccatcagaaaaccaaagggtgctaggaggtgtgggtgccttccatactgtttgcccattttcattcttgtattataattaattttctacccccagagataaatgtttgtttatatcactgtctagctgtttcaaaatttaggtcccttggtctgtacaaataatagcaatgtaaaaatggttttttgaacctccaaatggaattacagactcagtagccatatcttccaaccccccagtataaatttctgtctttctgctatgtgtggtactttgcagctgcttttgcagaaatcacaattttcctgtggaataaagatggtccaaaaatagtcaaaaattaaatatatatatatattagtaatttatatagatgtcagcaattaggcagatcaaggtttagtttaacttccactgttaaaataaagcttacatagttttcttcctttgaaagactgtgctgtcctttaacataggtttttaaagactaggatattgaatgtgaaacatccgttttcattgttcacttctaaaccaaaaattatgtgttgccaaaaccaaacccaggttcatgaatatggtgtctattatagtgaaacatgtactttgagcttattgtttttattctgtattaaatattttcagggttttaaacactaatcacaaactgaatgacttgacttcaaaagcaacaaccttaaaggccgtcatttcattagtattcctcattctgcatcctggcttgaaaaacagctctgttgaatcacagtatcagtattttcacacgtaagcacattcgggccatttccgtggtttctcatgagctgtgttcacagacctcagcagggcatcgcatggaccgcaggagggcagattcggaccactaggcctgaaatgacatttcactaaaagtctccaaaacatttctaagactactaaggccttttatgtaatttctttaaatgtgtatttcttaagaattcaaatttgtaataaaactatttgtataaaaattaagcttttattaatttgttgctagtattgccacagacgcattaaaagaaacttactgcacaagctgctaataaatttgtaagctttgcataccttagat

SEQ ID NO: 9600 - protein, 1669 aa, Homo sapiens
MGPRLSVWLLLLPAALLLHEEHSRAAAKGGCAGSGCGKCDCHGVKGQKGERGLPGLQGVIGFPGMQGPEGPQGPPGQKGDTGEPGLPGTKGTRGPPGASGYPGNPGLPGIPGQDGPPGPPGIPGCNGTKGERGPLGPPGLPGFAGNPGPPGLPGMKGDPGEILGHVPGMLLKGERGFPGIPGTPGPPGLPGLQGPVGPPGFTGPPGPPGPPGPPGEKGQMGLSFQGPKGDKGDQGVSGPPGVPGQAQVQEKGDFATKGEKGQKGEPGFQGMPGVGEKGEPGKPGPRGKPGKDGDKGEKGSPGFPGEPGYPGLIGRQGPQGEKGEAGPPGPPGIVIGTGPLGEKGERGYPGTPGPRGEPGPKGFPGLPGQPGPPGLPVPGQAGAPGFPGERGEKGDRGFPGTSLPGPSGRDGLPGPPGSPGPPGQPGYTNGIVECQPGPPGDQGPPGIPGQPGFIGEIGEKGQKGESCLICDIDGYRGPPGPQGPPGEIGFPGQPGAKGDRGLPGRDGVAGVPGPQGTPGLIGQPGAKGEPGEFYFDLRLKGDKGDPGFPGQPGMTGRAGSPGRDGHPGLPGPKGSPGSVGLKGERGPPGGVGFPGSRGDTGPPGPPGYGPAGPIGDKGQAGFPGGPGSPGLPGPKGEPGKIVPLPGPPGAEGLPGSPGFPGPQGDRGFPGTPGRPGLPGEKGAVGQPGIGFPGPPGPKGVDGLPGDMGPPGTPGRPGFNGLPGNPGVQGQKGEPGVGLPGLKGLPGLPGIPGTPGEKGSIGVPGVPGEHGAIGPPGLQGIRGEPGPPGLPGSVGSPGVPGIGPPGARGPPGGQGPPGLSGPPGIKGEKGFPGFPGLDMPGPKGDKGAQGLPGITGQSGLPGLPGQQGAPGIPGFPGSKGEMGVMGTPGQPGSPGPVGAPGLPGEKGDHGFPGSSGPRGDPGLKGDKGDVGLPGKPGSMDKVDMGSMKGQKGDQGEKGQIGPIGEKGSRGDPGTPGVPGKDGQAGQPGQPGPKGDPGISGTPGAPGLPGPKGSVGGMGLPGTPGEKGVPGIPGPQGSPGLPGDKGAKGEKGQAGPPGIGIPGLRGEKGDQGIAGFPGSPGEKGEKGSIGIPGMPGSPGLKGSPGSVGYPGSPGLPGEKGDKGLPGLDGIPGVKGEAGLPGTPGPTGPAGQKGEPGSDGIPGSAGEKGEPGLPGRGFPGFPGAKGDKGSKGEVGFPGLAGSPGIPGSKGEQGFMGPPGPQGQPGLPGSPGHATEGPKGDRGPQGQPGLPGLPGPMGPPGLPGIDGVKGDKGNPGWPGAPGVPGPKGDPGFQGMPGIGGSPGITGSKGDMGPPGVPGFQGPKGLPGLQGIKGDQGDQGVPGAKGLPGPPGPPGPYDIIKGEPGLPGPEGPPGLKGLQGLPGPKGQQGVTGLVGIPGPPGIPGFDGAPGQKGEMGPAGPTGPRGFPGPPGPDGLPGSMGPPGTPSVDHGFLVTRHSQTIDDPQCPSGTKILYHGYSLLYVQGNERAHGQDLGTAGSCLRKFSTMPFLFCNINNVCNFASRNDYSYWLSTPEPMPMSMAPITGENIRPFISRCAVCEAPAMVMAVHSQTIQIPPCPSGWSSLWIGYSFVMHTSAGAEGSGQALASPGSCLEEFRSAPFIECHGRGTCNYYANAYSFWLATIERSEMFKKPTPSTLKAGELRTHVSRCQVCMRRT

SEQ ID NO: 9601 - DNA, 6269 bp, Homo sapiens
gagtgtggctgcagtgcgccgggacaccagggctccgcgctccgcactcaagaggctcccgcgtcccaacccctcgcgcccgcgcgttcgcggatccaggccgaggaccgaaaggggccgcccgagcccccggggccggcgcccagagagcccagcaaggccggccgccctgccggtgtgccgccggcgggtgcttctggaagggccaatgcgttcgggcagcagcccctgaagccgagcccgaggctaagtgggactgaccggggcccagagtggacgaaccgccagcatggggagagaccagcgcgcggtggccggccctgccctacggcggtggctgctgctggggacagtgaccgtggggttcctcgcccagagcgtcttggcgggtgtgaagaagtttgatgtgccgtgtggaggaagagattgcagtgggggctgccagtgctaccctgagaaaggtggacgtggtcagcctgggccagtgggcccccaggggtacaatgggccaccaggattacaaggattcccgggactgcagggacgtaaaggagacaagggtgaaaggggagcccccggagtaacgggacccaagggcgacgtgggagcaagaggcgtttctggattccctggtgccgatggaattcctggacacccggggcaaggtgggcccaggggaaggccgggctacgatggctgcaacggaacccagggagactcaggtccacaggggccccccggctctgaggggttcaccgggcctcccgggccccaaggaccaaaagggcagaaaggtgagccttatgcactgcctaaagaggagcgcgacagatatcggggtgaacctggagagcctggattggtcggtttccagggacctcccggccgccctgggcatgtgggacagatgggtccagttggagctccagggagaccaggaccacctggaccccctggaccaaaaggacagcaaggcaacagaggacttggtttctacggagttaagggtgaaaagggtgacgtagggcagccgggacccaacgggattccatcagacaccctccaccccatcatcgcgcccacaggagtcaccttccacccagatcagtacaagggtgaaaaaggcagtgagggggaaccaggaataagaggcatttccttgaagggagaagaaggaatcatgggctttcctggactgaggggttaccctggcttgagtggtgaaaaaggatcaccaggacagaagggaagccgaggcctggatggctatcaagggcctgatggaccccggggacccaagggagaagccggagacccagggccccctggactacctgcctactcccctcacccttccctagcaaaaggtgccagaggtgacccgggattcccaggggcccaaggggagccaggaagccagggtgagccaggagacccgggcctcccaggtccccctggcctctccatcggagatggagatcagaggagaggcctgccgggtgagatgggacccaagggcttcatcggagaccccggcatccctgcgctctacgggggcccacctggacctgatggaaagcgagggcctccaggaccccccgggctccctggaccacctggacctgatggcttcctgtttgggctgaaaggagcaaaaggaagagcaggcttccctgggcttcccggctcccctggagcccgcggaccaaaggggtggaaaggtgacgctggggaatgcagatgtacagaaggcgacgaagctatcaaaggtcttccgggactgccaggacccaagggcttcgcaggcatcaacggggagccggggaggaaaggggacagaggagaccccggccaacacggcctccctgggttcccagggctcaagggagtgcctggcaacattggtgctcccggacccaaaggagcaaaaggagattccagaacaatcacaaccaaaggtgagcggggacagcccggcgtcccaggtgtgcccgggatgaaaggtgacgatggcagcccaggccgcgatgggctcgatggattccccggcctcccaggccctcccggtgatggcatcaagggccctccaggggacccaggctatccaggaatacctggaacgaagggtactccaggagaaatgggccccccaggactgggccttcccggcctcaaaggccaacgtggtttccctggagacgccggcttacctggaccaccaggcttcctgggccctcctggccccgcagggaccccaggacaaatagattgtgacacagatgtgaaaagggccgttggaggtgacagacaggaggccatccagccaggttgcataggagggcccaagggattgccaggcctgccaggacccccaggccccacaggtgccaaaggcctccgaggaatcccaggcttcgcaggagctgatggaggaccagggcccaggggcttgccaggagacgcaggtcgtgaagggttcccaggacccccagggttcataggaccccgaggatccaaaggtgcagtgggcctccctggcccagatggatccccaggtcccatcggcctgccagggccagatgggccccctggggaaaggggcctccctggagaagtcctgggagctcagcccgggccacggggagatgctggtgtgcctggacagcctgggcttaaaggccttcccggagacagaggcccccctggattcagaggaagccaagggatgcctgggatgccagggctgaagggccagccaggcctcccaggaccttccggccagccaggcctgtatgggcctccaggactgcatggattcccaggagctcctggccaagaggggcccttggggctgccaggaatcccaggccgtgaaggtctgcctggtgatagaggggaccctggggacacaggcgctcctggccctgtgggcatgaaaggtctctctggtgacagaggagatgctggcttcacaggggagcaaggccatccaggaagccctggatttaaaggaattgatggaatgcctgggacccccgggctaaaaggagatagaggctcacctgggatggatggtttccaaggcatgcctggactcaaagggagacccgggtttccagggagcaaaggcgaggctggatttttcggaatacccggtctgaagggtctggctggtgagccaggttttaaaggcagccgaggggaccctgggcccccaggaccacctcctgtcatcctgccaggaatgaaagacattaaaggagagaaaggagatgaagggcctatggggctgaaaggatacctgggcgcaaaaggtatccaaggaatgccaggcatcccagggctgtcaggaatccctgggctgcctgggaggcccggccacatcaaaggagtcaagggagacatcggagtccccggcatccccggtttgccaggattccctggggtggctggcccccctggaattacgggattcccaggattcataggaagccggggtgacaaaggtgccccagggagagcaggcctgtatggcgagattggcgcgactggtgatttcggtgacatcggggacactataaatttaccaggaagaccaggcctgaagggggagcggggcaccactggaataccaggtctgaagggattctttggagagaagggaacagaaggtgacatcggcttccctgggataacaggcgtgactggagtccaaggccctcctggacttaaaggacaaacaggctttccagggctgactgggcctccagggtcgcagggagagctggggcggattggactgcctggtggcaaaggagatgatggctggccgggagctccgggcttaccaggttttccgggactccgtgggatccgcggcttacacggcttgccaggcaccaagggctttccaggatccccaggttctgacatccacggagacccaggcttcccaggccctcctggggaaagaggtgacccaggagaggccaacacccttccaggccctgtgggagtcccaggacagaaaggagaccaaggagctccaggggaacgaggcccacctgggagcccaggacttcaggggttccctggtatcacacccccttccaacatctctggggcacctggtgacaaaggggcgccagggatatttggcctgaaaggttatcggggcccaccagggccaccaggttctgctgctcttcctggaagcaaaggtgacacagggaacccaggagctccaggaaccccagggaccaaaggatgggccggggactccgggccccagggcaggcctggtgtgtttggtctcccaggagaaaaagggcccaggggtgaacaaggcttcatggggaacactggacccactggggcggtgggcgacagaggccccaagggacccaagggagacccaggattccctggtgcccccgggactgtgggagcccccgggattgcaggaatcccccagaagattgccgtccaaccagggacagtgggtccccaggggaggcgaggcccccctggggcaccgggggagatggggccccagggcccccccggagaaccaggtttccgtggggctccagggaaagctgggccccaaggaagaggtggtgtgtctgctgttcccggcttccggggagatgaaggacccataggccaccaggggccgattggccaagaaggtgcaccaggccgtccagggagcccgggcctgccgggtatgccaggccgcagcgtcagcatcggctacctcctggtgaagcacagccagacggaccaggagcccatgtgcccagtgggcatgaacaaactctggagtggatacagcctgctgtacttcgagggccaggagaaggcgcacaaccaggacctggggctggcgggctcctgcctggcgcggttcagcaccatgcccttcctgtactgcaaccctggtgatgtctgctactatgccagccggaacgacaagtcctactggctctctaccactgcgccgctgcccatgatgcccgtggccgaggacgagatcaagccctacatcagccgctgttctgtgtgtgaggccccggccatcgccatcgcggtccacagtcaggatgtctccatcccacactgcccagctgggtggcggagtttgtggatcggatattccttcctcatgcacacggcggcgggagacgaaggcggtggccaatcactggtgtcaccgggcagctgtctagaggacttccgcgccacaccattcatcgaatgcaatggaggccgcggcacctgccactactacgccaacaagtacagcttctggctgaccaccattcccgagcagagcttccagggctcgccctccgccgacacgctcaaggccggcctcatccgcacacacatcagccgctgccaggtgtgcatgaagaacctgtgagccggcgcgtgccaggaagggccattttggtgcttattcttaacttattacctcaggtgccaacccaaaaattggttttatttttttcttaaaaaaaaaaaagtctaccaaaggaatttgcatccagcagcagcacttagacctgccagccactgtcaccgagcgggtgcaagcactcggggtccctggagggcaagccctgcccacagaaagccaggagcagccctggcccccatcagccctgctagacgcaccgcctgaaggcacagctaaccacttcgcacacacccatgtaaccactgcactttccaatgccacagacaactcacattgttcaactcccttctcggggtgggacagacgagacaacagcacacaggcagccagccgtggccagaggctcgaggggctcagggcctcaggcacccgtccccacacgagggccccgtgggtgggcctggccctgctttctacgccaatgttatgccagctccatgttctcccaaataccgttgatgtgaattattttaaaggcaaaaccgtgctctttattttaaaaaacactgataatcacactgcggtaggtcattcttttgccacatccctatagaccactgggtttggcaaaactcaggcagaagtggagacctttctagacatcattgtcagccttgctacttgaaggtacaccccatagggtcggaggtgctgtccccactgccccacgttgtccctgagatttaacccctccactgctgggggtgagctgtactcttctgactgccccctcctgtgtaacgactacaaaataaaacttggttctgaatatttttaaaccccg

SEQ ID NO: 9602 - protein, 1712 aa, Homo sapiens; identical to SEQ ID NO: 1512

SEQ ID NO: 9603 - DNA, 901 bp, Homo sapiens
aagttcctcttcttccaaataaggttttacttagagactttcagtcccacttaaaacttcaaagcaataagcttcatttcacagcttcactaaatgaaacctaatggtagacatgcctttgactagacataaagtaagcattctttctagagaaaataaatagaaagagaggtttctttctatttccttatcagcttcacctctttcttagaaatgattgctcgtctggacagcatttgtcatgagtttgttttcactttaaagcatgaaggggagagatgaccagggagtgatacccatctgctcatcttcaaggattgcgtaggagttgagctgtagaggtttcactgcagaaagccagtattgtcaagaagcatcctgagaacatgtaattaatctctacaaatggtagaatagttacattagtgccataatttgttatatttaagctatttttctaattcacaatcaactaaggccaaactccccattgcacagatgagccttctctcccatcatccacccaccagccccctgtccagccccactttcttcaattcattgatcgcagcacagcatagggaagaacatgatttattgaatcttttccatcctaaagtattaattatcaatagctgcaatataccctgacttcataggaaaacctgcacctcattctaatcaccttgttctgagcgtctcactttccttcttaggtcttgaccttaagatttcaactttactttctagccgctgcctgatcaacgtggagtgaagtgaaatgatttccccctgtatttggaagctgtacttctaaaactctgtcctagaatcacatcactctcttttaccaaccagattattgcattgcattggctcactagtaatgtatttctaccaa

SEQ ID NO: 9604 - protein, 50 aa, Homo sapiens
MSLLSHHPPTSPLSSPTFFNSLIAAQHREEHDLLNLFHPKVLIINSCNIP

SEQ ID NO: 9605 - DNA, 554 bp, Homo sapiens
ggttcaccctgaagaagctggttcagcgactgcacatccacaagcctgcccagcacgttcaagccctgctgggttacagatacccctccaacctacagctcttttctcgaagtcgccttcctgggccttgggattctagcagagctgggaagaggatgaagctgtctaggccagagacctgggagcgggagctgagcctacgggggaacaaagcgtcggtctgggaggaactcattggtagagtgaccttgaccatcacattccctccttctcttccccatttatgcctccacattttagatcctcactagaagatttctgtggaatgatgaagttattactttgcctggttgttgtatttgatttataaggtctgccattgactacaccaaagtaaacagtggtacctgctttgagtaatgttggcatcatagatcattataccagatgtagttaggtgatgtacaagtttttatcaacatatgacaaaagtaccttctctctcattgtactcatatcgatatctctgtaactcattccaaaaaaggtaggac

SEQ ID NO: 9606 - protein, 51 aa, Homo sapiens
MKLSRPETWERELSLRGNKASVWEELIGRVTLTITFPPSLPHLCLHILDPH

SEQ ID NO: 9607 - DNA, 480 bp, Homo sapiens
gccccatgctcccaggttgtgacgccaatgaagagatgaaagcaggggcagatcatgaagcatgtgggcgaaggctctgaaggttgagtagagcaaggtggtgtgtgagagcagtaagtcagacaggacacatcagtgctggtgtgtgaagggagagaacattagaggtgctattaatggagatgtagacttttcccgtggcctggtgctgccttcagatccatctggctttgaggggctgtggatacctgctgtgattcataactgccactactaccccagggtcgttggtttgattcagaagagaagaaaggggcagagacccaaatgccttcttatagtctgagcttgggagaggaggaggaggtggaggatctggccgtgaagctcacctctggagactctgaatctcatccagagcctactgaccatgtccttcaggaaaagaagatggctctactgagcttgctgtgctctact

SEQ ID NO: 9608 - protein, 50 aa, Homo sapiens
MPSYSLSLGEEEEVEDLAVKLTSGDSESHPEPTDHVLQEKKMALLSLLCS

SEQ ID NO: 9609 - DNA, 1908 bp, Homo sapiens
atggagacaactctgaaagtaggagggggtgctgtgcaggcccagcggctgcgggagcagagactgttgctggacgaagaggtgtcagtcgcggggcgggtatacggggtgcatcgggtgatcctggccgcaatcagcagcctcttccgagacaggctgctgggcggcggaggtccgcggccccccttcagcctcgaggtgtccccagggggctgggaggccgtgctgacctttgcctatgagggggtgctgggccccgcctcgcagggggatgtgctggccgcagcagaggcgctgggagcgccccgggtgaaggctgctgcccagcagacatgcgagagggctggaaatgccagggaagatgtaaagaagcccagccaggcagaggagctgagggagaacctgcgcggaatcgagctcctctaccgagagggcgtcgggtgtgacttgaagctggaggcaggcggctgccagctgtcgggtgagggcctgtggggcattaaattactgcaggtgcatatgctaacggaatgtaacaaggaatctccagccagctggctagagctaagggtacaatccatggcagtagaacaagcagaaagtggattgactcaagcagaaattaacaaaaggcccttcttggcatcctccattcaggacacaggaaagccaggggaacatggtggaaaactcaatgtgtgctttcaccttgtgcaccgagccgccctggcctgtggcagtgagttctttggggccatgctcctgagcgggatgagggaatcccagggcacagaggtatctctgcggacgatctccacccaggacctgcgactcctcgtctcttttgcttactccggagttgtgcgggcaaggtggccagggctactgagagctgcccaggctgctctgcagtaccagagctcttcctgcttggatttgtgtcagaaaggcttggcacggggcctcagccctgcccgttgcctggccctgttccccatggcggaagcccctgggttggagaggctctggagcaaagcccgtcactacctcctcacccacctgcctgctgtagccttgtgtcctgctttcccttctttaccagctgcctgcttggctgagctcctggatagtgatgagctccatgtgcaggaggagtttgaggcctttgtggctgcacggtgttggctggctgccaaccccgagacccaggagtcagaggccaaggccctgctgcgatgtgtccgctttggccgcatgtccaccagggagttgcggagggtgcgggcagccgggctacttccacccctgaccccagatctgttgcaccagctgatggtagaggctgatgttccaggccaagagagacggagggagcctgaccgggcactggtagtgattggcggggatgggctcagaccagacatggccctaagacaaccatcccgagcagtgtggtgggcccgggccttccgctgtggcgtgggactggtacgaactgttgagtgggggcagctgcctgccctgcctgcccccggacgcttccggcatggggctgcaagcctggcaggaagtgaactctatgtgtgtgggggacaagatttctacagtcactccaacaccctggcttcaactctcaggtgggagcccagtcaagaggactgggaggagatggctcctttgtcccaggctcgaagccttttctccttggtggcactggatggaaaactttatgccctgggtggaagacacaatgatgttgccctggactctgtggagacctacaaccctgagctcaatgtctggagcaaagaggaagtgggtattccagaggcttttcagataattctgctgctcttgccacctactctcttctctggagccttcctgaggataatggctttcacttaa

SEQ ID NO: 9610 - protein, 635 aa, Homo sapiens
METTLKVGGGAVQAQRLREQRLLLDEEVSVAGRVYGVHRVILAAISSLFRDRLLGGGGPRPPFSLEVSPGGWEAVLTFAYEGVLGPASQGDVLAAAEALGAPRVKAAAQQTCERAGNAREDVKKPSQAEELRENLRGIELLYREGVGCDLKLEAGGCQLSGEGLWGIKLLQVHMLTECNKESPASWLELRVQSMAVEQAESGLTQAEINKRPFLASSIQDTGKPGEHGGKLNVCFHLVHRAALACGSEFFGAMLLSGMRESQGTEVSLRTISTQDLRLLVSFAYSGVVRARWPGLLRAAQAALQYQSSSCLDLCQKGLARGLSPARCLALFPMAEAPGLERLWSKARHYLLTHLPAVALCPAFPSLPAACLAELLDSDELHVQEEFEAFVAARCWLAANPETQESEAKALLRCVRFGRMSTRELRRVRAAGLLPPLTPDLLHQLMVEADVPGQERRREPDRALVVIGGDGLRPDMALRQPSRAVWWARAFRCGVGLVRTVEWGQLPALPAPGRFRHGAASLAGSELYVCGGQDFYSHSNTLASTLRWEPSQEDWEEMAPLSQARSLFSLVALDGKLYALGGRHNDVALDSVETYNPELNVWSKEEVGIPEAFQIILLLLPPTLFSGAFLRIMAFT

SEQ ID NO: 9611 - DNA, 3267 bp, Homo sapiens
cacctgcctcggcctccctaagtgctgggattacaggcgtgagccaccatgcccggccagaaggtattttaaatttataggtgaagctaaagttgtttgggttaccttatatgacctttttaaggttgggattggattcttttccaacagaacacttgattatcattagaaatagttcagcattgtccccagctcatgaaagggttgtgtcgagaagatgaggcacatgtttcccatgaaaatgatgcagaaacttcagcaggtagagggcaagtagttggttgaggcctgaaggatgacatacaaggtcagagacttgggttgtggaaagtataatggaggctacaagagttgatgaaaggagcagtgacggttttgtcttcctcttctcttttaatgtttgcttaggtgtaagaaacagggagggtgattaggtggagaggagtggatagcagaagcagaaaggcaggatttttccttcgcctttgttactgtctttttgacagcagattaagatctgtatcagaaagggaagaaatccctaacagcactgggaagggaaagggacttcttaaggttcgtaggaagccctcggtgttataagtctgcagaatatgtgtcagtaagggacagatattctctgtgctaaaagttggtcacatatgaagaacggccttaatacaaaaaagtggtggtgggtgcctgtaattccagctgcttgggaggctgaggcaggagaattgcttgaacctgggaggcagaggttgcagtgagctgagatcacgccattgcactccagcctaggcgacagaacaagactctgtctcagaaaaaaaaaaaaaagaaaagaaaaatggccttaagtgaattgccattgctgacttggctgggccattagtctgactccatatgagatttttgagttcttcagctctgcttcttggttctaaataccactgcccagctgcatacggtggttcacacctataatcccagcactttgagaggctgaggcaggtagattgcttgagaccaggagtttgagaccaggctgggcaacatagtgagacccccatctctacaaaaatataaaaataagccacacatggtagcccagctactcaggaagctgaggtgggaggatcctttgagcctaggaggtggaggctacagtgagctatgatcacaccactccactccagcctgggagacagagcgagaccctgtctcaaaaaaaaattaccactgccactgtgtcataatttagaaggattcatgttctctgcctccaagcagaaaagccggttacctactatcaagactgcatttaagggatatattaggaacttctaagccggaaaaccaatgtatttgaaatgacaatttatttctgcctgaacctacactgtctaggaatctgttcctggaatcctcagggtatacagatttcttctcaaatcagagctgtaaaaactacccattcaccatttgggaaacacctttcttccacttcttattggaagccctggtggtcatgttgatcctctgctatgtttttctcccaaagccaaataatcctctttacagacttggggtttcatggacttcctcatcacccttaggtgattgcatactcggaacatcgttaccgtatctttggggaaaccatcgatattgcagtgggtaattgtctggatcgttttgctcgagtgctgaaggtaagccagtggggctgcagagaacataaaatgtgggtgaatttttgggaagccatggaggtggagggaggaaatagtaaatgagcttcttatgcttcctgcatatctgatttcatcctcttccattccctccttccttatttttttcttctgctagatttctaacgacccaagtccaggatacaacattgaacagatggcaaagcggtaaggggacataaggtggaagcaggctggctgctggggcttcagggatttccccatatacgaggcaagaagctagttgagctgccatacactgtaaaggggatggacgtctcattctcagggatcctgtctttcattgaggatgtagcccatcggatgctggccacaggcgagtgtactcctgaggatctgtgtttctccctgcaggaaactgtgtttgcaatgctggtagagatcacagagcgagccatggcacattgtggctcccaggaggccctcattgtgggaggagtggggtgtaatgtgaggctacaggagatgatggcaacaatgtgccaggaacgtggagcccggctttttgctacagatgagagattctgtattgacaatggagcgatgatagcccaggctggctgggagatgtttcgggctggacacaggaccccactcagtgattctggggttacacagaggtatcggacagatgaagtagaggtgacctggagggactaataagatcaacagaatcagagtagatagttccttaatcggaacccaaaggaccccgtgcctcaatctctatcctgatgtcatgggagtcctagcaaagctatagactccaagcaaggcttggggtcctttatggaaccccaggatgactcagcaataaaatatttttggttttttggttttgtatgttggtgattggattgtgttgttcaggaccaatgtagatttggtgctggataaattcttgttggagcttgctgctgtggaaccaagaatgaggtatctttttttttttttttaagaaacggaatcttgctgtgtttcccaggctggtctcgaactgggctcaagcagtcttaccacctcagcctcctgagtaaggatgccattgtgcctggcaacaatagtagtatcataactattattatagcatcgggtcccgtgctaactgctttacattcattctctcatttaaattctttgaagtaggtgtgcaagacttctctcaaaatagcctggaggctcacacctgttatcccagtgctgtgggaggccaagtcaggaggatcccttgagcccaggagtttgagcccagcctgggcaaatagcaagacaccatctatttgaaaaatgtaaaaattatctgggcatggtggcgcacatctgtagtcccagctccaagggaggctgaggcgggaagatagcttgagcccaggagtttgaggttgcagtgagctgtgattgagccactgcattccagcctgagtgacagaacaaaaccttgtctcttaaaaacaaacaaacaaacagcctggagattggtctaacttgt

SEQ ID NO: 9612 - protein, 136 aa, Homo sapiens [sequence omitted]

SEQ ID NO: 9613 - DNA, 1692 bp, Homo sapiens
taatcccagcactttgagaggctgaggcaggtagattgcttgagaccaggagtttgagaccaggctgggcaacatagtgagacccccatctctacaaaaatataaaaataagccacacatggtagcccagctactcaggaagctgaggtgggaggatcctttgagcctaggaggtggaggctacagtgagctatgatcacaccactccactccagcctgggagacagagcgagaccctgtctcaaaaaaaaattaccactgccactgtgtcataatttagaaggattcatgttctctgcctccaagcagaaaagccggttacctactatcaagactgcatttaagggatatattaggaacttctaagccggaaaaccaatgtatttgaaatgacaatttatttctgcctgaacctacactgtctaggaatctgttcctggaatcctcagggtatacagatttcttctcaaatcagagctgtaaaaactacccattcaccatttgggaaacacctttcttccacttcttattggaagccctggtggtcatgttgatcctctgctatgtttttctcccaaagccaaataatcctctttacagacttggggtttcatggacttcctcatcacccttaggtgattgcatactcggaacatcgttaccgtatctttggggaaaccatcgatattgcagtgggtaattgtctggatcgttttgctcgagtgctgaaggtaagccagtggggctgcagagaacataaaatgtgggtgaatttttgggaagccatggaggtggagggaggaaatagtaaatgagcttcttatgcttcctgcatatctgatttcatcctcttccattccctccttccttatttttttcttctgctagatttctaacgacccaagtccaggatacaacattgaacagatggcaaagcgaggcaagaagctagttgagctgccatacactgtaaaggggatggacgtctcattctcagggatcctgtctttcattgaggatgtagcccatcggatgctggccacaggcgagtgtactcctgaggatctgtgtttctccctgcaggaaactgtgtttgcaatgctggtagagatcacagagcgagccatggcacattgtggctcccaggaggccctcattgtgggaggagtggggtgtaatgtgaggctacaggagatgatggcaacaatgtgccaggaacgtggagcccggctttttgctacagatgagagattctgtattgacaatggagcgatgatagcccaggctggctgggagatgtttcgggctggacacaggaccccactcagtgattctggggttacacagaggtatcggacagatgaagtagaggtgacctggagggactaataagatcaacagaatcagagtagatagttccttaatcggaacccaaaggaccccgtgcctcaatctctatcctgatgtcatgggagtcctagcaaagctatagactccaagcaaggcttggggtcctttatggaaccccaggatgactcagcaataaaatatttttggttttttggttttgtatgttggtgattggattgtgttgttcaggaccaatgtagatttggtgctggataaattcttgttggagcttgctgctgtggaaccaagaatgaggtatctttttttttttttttaagaaac

SEQ ID NO: 9614 - protein, 153 aa, Homo sapiens
MAKRGKKLVELPYTVKGMDVSFSGILSFIEDVAHRMLATGECTPEDLCFSLQETVFAMLVEITERAMAHCGSQEALIVGGVGCNVRLQEMMATMCQERGARLFATDERFCIDNGAMIAQAGWEMFRAGHRTPLSDSGVTQRYRTDEVEVTWRD

SEQ ID NO: 9615 - DNA, 1692 bp, Homo sapiens
aaccctccctcgggctgtttatcgttgtgccagatgcacagcacattgtgtgacactgacttaagattctaactatgtgcaagagggaaaaaaacagtggagaaggctgggctggaccacgggaaagagataggaaaacggatacgaatgtaaggcacagagttggctcggcgtccctggcagttaggaagacaggtccctggaggggccttggcgggtctccgctcgcgggagttccgcggtgtctttcccagtgctatctgcaggctggccagcttcctctgcgctccggaaagctgcggcccagcgcggactagtgaggacctccacagctcctgacattgccaggagtcctgtcggcgttttctcccagcctccgccatgccggcggtgctgggttttgaaggcagcgccaataagattggcgtgggcgtggtgcgggatggcaaggtgctggcgaacccgcggcggacttacgtcacgcctcctggcacaggattccttccaggtgatacagccaggcatcaccgagctgttatcctagacctgctgcaggaggcactaacagagtctggattaacctcccaggatatcgactgcattgcatacaccaagggccctggcatgggtgccccactggtttctgtggctgttgtggcccgtactgtggcccaactgtggaataagccattggtgggtgtgaaccactgtataggccacattgagatgggccgcctcatcactggagccaccagcccaaccgtgttgtatgtgagtggaggaaatacgcaggtgattgcatactcggaacatcgttaccgtatctttggggaaaccatcgatattgcagtgggtaattgtctggatcgttttgctcgagtgctgaagatttctaacgacccaagtccaggatacaacattgaacagatggcaaagcgaggcaagaagctagttgagctgccatacactgtaaaggggatggacgtctcattctcagggatcctgtctttcattgaggatgtagcccatcggatgctggccacaggcgagtgtactcctgaggatctgtgtttctccctgcaggaaactgtgtttgcaatgctggtagagatcacagagcgagccatggcacattgtggctcccaggaggccctcattgtgggaggagtggggtgtaatgtgaggctacaggagatgatggcaacaatgtgccaggaacgtggagcccggctttttgctacagatgagagattctgtattgacaatggagcgatgatagcccaggctggctgggagatgtttcgggctggacacaggaccccactcagtgattctggggttacacagaggtatcggacagatgaagtagaggtgacctggagggactaataagatcaacagaatcagagtagatagttccttaatcggaacccaaaggaccccgtgcctcaatctctatcctgatgtcatgggagtcctagcaaagctatagactccaagcaaggcttggggtcctttatggaaccccaggatgactcagcaataaaatatttttggttttttggttttgtatgttggtgattggattgtgttgttcaggaccaatgtagatttggtgctggataaattcttgttggagcttgctgctgtggaaccaagaatgaggtatctttttttttttttttaagaaac

SEQ ID NO: 9616 - protein, 335 aa, Homo sapiens; identical to SEQ ID NO: 1520

SEQ ID NO: 9617 - DNA, 1580 bp, Homo sapiens
aaccctccctcgggctgtttatcgttgtgccagatgcacagcacattgtgtgacactgacttaagattctaactatgtgcaagagggaaaaaaacagtggagaaggctgggctggaccacgggaaagagataggaaaacggatacgaatgtaaggcacagagttggctcggcgtccctggcagttaggaagacaggtccctggaggggccttggcgggtctccgctcgcgggagttccgcggtgtctttcccagtgctatctgcaggctggccagcttcctctgcgctccggaaagctgcggcccagcgcggactagtgaggacctccacagctcctgacattgccaggagtcctgtcggcgttttctcccagcctccgccatgccggcggtgctgggttttgaaggcagcgccaataagattggcgtgggcgtggtgcgggatggcaaggtgctggcgaacccgcggcggacttacgtcacgcctcctggcacaggattccttccaggtgatacagccaggcatcaccgagctgttatcctagacctgctgcaggaggcactaacagagtctggattaacctcccaggatatcgactgcattgcatacaccaagggccctggcatgggtgccccactggtttctgtggctgttgtggcccgtactgtggcccaactgtggaataagccattggtgggtgtgaaccactgtataggccacattgagatgggccgcctcatcactggagccaccagcccaaccgtgttgtatgtgagtggaggaaatacgcaggtgattgcatactcggaacatcgttaccgtatctttggggaaaccatcgatattgcagtgggtaattgtctggatcgttttgctcgagtgctgaagatttctaacgacccaagtccaggatacaacattgaacagatggcaaagcgaggcaagaagctagttgagctgccatacactgtaaaggggatggacgtctcattctcagggatcctgtctttcattgaggatgtagcccatcggatgctggccacaggcgagtgtactcctgaggatctgtgtttctccctgcaggaaactgtgtttgcaatgctggtagagatcacagagcgagccatggcacattgtggctcccaggaggccctcattgtgggaggagtggggtgtaatgtgaggctacaggagatgatggcaacaatgtgccaggaacgtggagcccggctttttgctacagatgagagattctgtattgacaatggagcgatgatagcccaggctggctgggagatgtttcgggctggacacaggaccccactcagtgattctggggttacacagaggtatcggacagatgaagtagaggtgacctggagggactaataagatcaacagaatcagagtagatagttccttaatcggaacccaaaggaccccgtgcctcaatctctatcctgatgtcatgggagtcctagcaaagctatagactccaagcaaggcttggggtcctttatggaaccccaggatgactcagcaataaaatatttttggttttttggttttgtatgttggtg

SEQ ID NO: 9618 - protein, 335 aa, Homo sapiens; identical to SEQ ID NO: 1520

SEQ ID NO: 9619 - DNA, 1572 bp, Homo sapiens
taatcccagcactttgagaggctgaggcaggtagattgcttgagaccaggagtttgagaccaggctgggcaacatagtgagacccccatctctacaaaaatataaaaataagccacacatggtagcccagctactcaggaagctgaggtgggaggatcctttgagcctaggaggtggaggctacagtgagctatgatcacaccactccactccagcctgggagacagagcgagaccctgtctcaaaaaaaaattaccactgccactgtgtcataatttagaaggattcatgttctctgcctccaagcagaaaagccggttacctactatcaagactgcatttaagggatatattaggaacttctaagccggaaaaccaatgtatttgaaatgacaatttatttctgcctgaacctacactgtctaggaatctgttcctggaatcctcagggtatacagatttcttctcaaatcagagctgtaaaaactacccattcaccatttgggaaacacctttcttccacttcttattggaagccctggtggtcatgttgatcctctgctatgtttttctcccaaagccaaataatcctctttacagacttggggtttcatggacttcctcatcacccttaggtgattgcatactcggaacatcgttaccgtatctttggggaaaccatcgatattgcagtgggtaattgtctggatcgttttgctcgagtgctgaaggtaagccagtggggctgcagagaacataaaatgtgggtgaatttttgggaagccatggaggtggagggaggaaatagtaaatgagcttcttatgcttcctgcatatctgatttcatcctcttccattccctccttccttatttttttcttctgctagatttctaacgacccaagtccaggatacaacattgaacagatggcaaagcgaggcaagaagctagttgagctgccatacactgtaaaggggatggacgtctcattctcagggatcctgtctttcattgaggatgtagcccatcggatgctggccacaggcgagtgtactcctgaggatctgtgtttctccctgcaggaaactgtgtttgcaatgctggtagagatcacagagcgagccatggcacattgtggctcccaggaggccctcattgtgggaggagtggggtgtaatgtgaggctacaggagatgatggcaacaatgtgccaggaacgtggagcccggctttttgctacagatgagagattctgtattgacaatggagcgatgatagcccaggctggctgggagatgtttcgggctggacacaggaccccactcagtgattctggggttacacagaggtatcggacagatgaagtagaggtgacctggagggactaataagatcaacagaatcagagtagatagttccttaatcggaacccaaaggaccccgtgcctcaatctctatcctgatgtcatgggagtcctagcaaagctatagactccaagcaaggcttggggtcctttatggaaccccaggatgactcagcaataaaatatttttggttttttggttttgta

SEQ ID NO: 9620 - protein, 153 aa, Homo sapiens; identical to SEQ ID NO: 9614

SEQ ID NO: 9621 - DNA, 2621 bp, Homo sapiens
cacctgcctcggcctccctaagtgctgggattacaggcgtgagccaccatgcccggccagaaggtattttaaatttataggtgaagctaaagttgtttgggttaccttatatgacctttttaaggttgggattggattcttttccaacagaacacttgattatcattagaaatagttcagcattgtccccagctcatgaaagggttgtgtcgagaagatgaggcacatgtttcccatgaaaatgatgcagaaacttcagcaggtagagggcaagtagttggttgaggcctgaaggatgacatacaaggtcagagacttgggttgtggaaagtataatggaggctacaagagttgatgaaaggagcagtgacggttttgtcttcctcttctcttttaatgtttgcttaggtgtaagaaacagggagggtgattaggtggagaggagtggatagcagaagcagaaaggcaggatttttccttcgcctttgttactgtctttttgacagcagattaagatctgtatcagaaagggaagaaatccctaacagcactgggaagggaaagggacttcttaaggttcgtaggaagccctcggtgttataagtctgcagaatatgtgtcagtaagggacagatattctctgtgctaaaagttggtcacatatgaagaacggccttaatacaaaaaagtggtggtgggtgcctgtaattccagctgcttgggaggctgaggcaggagaattgcttgaacctgggaggcagaggttgcagtgagctgagatcacgccattgcactccagcctaggcgacagaacaagactctgtctcagaaaaaaaaaaaaaagaaaagaaaaatggccttaagtgaattgccattgctgacttggctgggccattagtctgactccatatgagatttttgagttcttcagctctgcttcttggttctaaataccactgcccagctgcatacggtggttcacacctataatcccagcactttgagaggctgaggcaggtagattgcttgagaccaggagtttgagaccaggctgggcaacatagtgagacccccatctctacaaaaatataaaaataagccacacatggtagcccagctactcaggaagctgaggtgggaggatcctttgagcctaggaggtggaggctacagtgagctatgatcacaccactccactccagcctgggagacagagcgagaccctgtctcaaaaaaaaattaccactgccactgtgtcataatttagaaggattcatgttctctgcctccaagcagaaaagccggttacctactatcaagactgcatttaagggatatattaggaacttctaagccggaaaaccaatgtatttgaaatgacaatttatttctgcctgaacctacactgtctaggaatctgttcctggaatcctcagggtatacagatttcttctcaaatcagagctgtaaaaactacccattcaccatttgggaaacacctttcttccacttcttattggaagccctggtggtcatgttgatcctctgctatgtttttctcccaaagccaaataatcctctttacagacttggggtttcatggacttcctcatcacccttaggtgattgcatactcggaacatcgttaccgtatctttggggaaaccatcgatattgcagtgggtaattgtctggatcgttttgctcgagtgctgaaggtaagccagtggggctgcagagaacataaaatgtgggtgaatttttgggaagccatggaggtggagggaggaaatagtaaatgagcttcttatgcttcctgcatatctgatttcatcctcttccattccctccttccttatttttttcttctgctagatttctaacgacccaagtccaggatacaacattgaacagatggcaaagcggtaaggggacataaggtggaagcaggctggctgctggggcttcagggatttccccatatacgaggcaagaagctagttgagctgccatacactgtaaaggggatggacgtctcattctcagggatcctgtctttcattgaggatgtagcccatcggatgctggccacaggcgagtgtactcctgaggatctgtgtttctccctgcaggaaactgtgtttgcaatgctggtagagatcacagagcgagccatggcacattgtggctcccaggaggccctcattgtgggaggagtggggtgtaatgtgaggctacaggagatgatggcaacaatgtgccaggaacgtggagcccggctttttgctacagatgagagattctgtattgacaatggagcgatgatagcccaggctggctgggagatgtttcgggctggacacaggaccccactcagtgattctggggttacacagaggtatcggacagatgaagtagaggtgacctggagggactaataagatcaacagaatcagagtagatagttccttaatcggaacccaaaggaccccgtgcctcaatctctatcctgatgtcatgggagtcctagcaaagctatagactccaagcaaggcttggggtcctttatggaaccccaggatgactcagcaataaaatatttttggttttttggttttgta

SEQ ID NO: 9622 - protein, 136 aa, Homo sapiens [sequence omitted]

SEQ ID NO: 9623 - DNA, 1308 bp, Homo sapiens
agcagaaaggcaggatttttccttcgcctttgttactgtctttttgacagcagattaagatctgtatcagaaagggaagaaatccctaacagcactgggaagggaaagggacttcttaaggttcgtaggaagccctcggtgttataagtctgcagaatatgtgtcagtaagggacagatattctctgtgctaaaagttggtcacatatgaagaacggccttaatacaaaaaagtggtggtgggtgcctgtaattccagctgcttgggaggctgaggcaggagaattgcttgaacctgggaggcagaggttgcagtgagctgagatcacgccattgcactccagcctaggcgacagaacaagactctgtctcagaaaaaaaaaaaaaagaaaagaaaaatggccttaagtgaattgccattgctgacttggctgggccattagtctgactccatatgagatttttgagttcttcagctctgcttcttggttctaaataccactgcccagctgcatacggtggttcacacctataatcccagcactttgagaggctgaggcaggtagattgcttgagaccaggagtttgagaccaggctgggcaacatagtgagacccccatctctacaaaaatataaaaataagccacacatggtagcccagctactcaggaagctgaggtgggaggatcctttgagcctaggaggtggaggctacagtgagctatgatcacaccactccactccagcctgggagacagagcgagaccctgtctcaaaaaaaaattaccactgccactgtgtcataatttagaaggattcatgttctctgcctccaagcagaaaagccggttacctactatcaagactgcatttaagggatatattaggaacttctaagccggaaaaccaatgtatttgaaatgacaatttatttctgcctgaacctacactgtctaggaatctgttcctggaatcctcagggtatacagatttcttctcaaatcagagctgtaaaaactacccattcaccatttgggaaacacctttcttccacttcttattggaagccctggtggttacacagaggtatcggacagatgaagtagaggtgacctggagggactaataagatcaacagaatcagagtagatagttccttaatcggaacccaaaggaccccgtgcctcaatctctatcctgatgtcatgggagtcctagcaaagctatagactccaagcaaggcttggggtcctttatggaaccccaggatgactcagcaataaaatatttttggttttttggttttgt

SEQ ID NO: 9624 - protein, 61 aa, Homo sapiens
MTIYFCLNLHCLGICSWNPQGIQISSQIRAVKTTHSPFGKHLSSTSYWKPWWLHRGIGQMK

SEQ ID NO: 9625 - DNA, 622 bp, Homo sapiens
cccagtgctatctgcaggctggccagcttcctctgcgctccggaaagctgcggcccagcgcggactagtgaggacctccacagctcctgacattgccaggagtcctgtcggcgttttctcccagcctccgccatgccggcggtgctgggttttgaaggcagcgccaataagattggcgtgggcgtggtgcgggatggcaaggtgctggcgaacccgcggcggacttacgtcacgcctcctggcacaggattccttccaggtgatacagccaggcatcaccgagctgttatcctagacctgctgcaggaggcactaacagagtctggattaacctcccaggatatcgactgcattgcatacaccaagggaccccactcagtgattctggggttacacagaggtatcggacagatgaagtagaggtgacctggagggactaataagatcaacagaatcagagtagatagttccttaatcggaacccaaaggaccccgtgcctcaatctctatcctgatgtcatgggagtcctagcaaagctatagactccaagcaaggcttggggtcctttatggaaccccaggatgactcagcaataaaatatttttggttttttggttttgt

SEQ ID NO: 9626 - protein, 95 aa, Homo sapiens
MPAVLGFEGSANKIGVGVVRDGKVLANPRRTYVTPPGTGFLPGDTARHHRAVILDLLQEALTESGLTSQDIDCIAYTKGPHSVILGLHRGIGQMK

SEQ ID NO: 9627 - DNA, 1497 bp, Homo sapiens
cgagaccctgtctcaaaaaaaaattaccactgccactgtgtcataatttagaaggattcatgttctctgcctccaagcagaaaagccggttacctactatcaagactgcatttaagggatatattaggaacttctaagccggaaaaccaatgtatttgaaatgacaatttatttctgcctgaacctacactgtctaggaatctgttcctggaatcctcagggtatacagatttcttctcaaatcagagctgtaaaaactacccattcaccatttgggaaacacctttcttccacttcttattggaagccctggtggtcatgttgatcctctgctatgtttttctcccaaagccaaataatcctctttacagacttggggtttcatggacttcctcatcacccttaggtgattgcatactcggaacatcgttaccgtatctttggggaaaccatcgatattgcagtgggtaattgtctggatcgttttgctcgagtgctgaaggtaagccagtggggctgcagagaacataaaatgtgggtgaatttttgggaagccatggaggtggagggaggaaatagtaaatgagcttcttatgcttcctgcatatctgatttcatcctcttccattccctccttccttatttttttcttctgctagatttctaacgacccaagtccaggatacaacattgaacagatggcaaagcggtaaggggacataaggtggaagcaggctggctgctggggcttcagggatttccccatatacggtatatattaacaaaatttgggacgggctttggagggtgagaagccagctgactgtaggcttagtgcctcgtacgcttattcccacatagaggcaagaagctagttgagctgccatacactgtaaaggggatggacgtctcattctcagggatcctgtctttcattgaggatgtagcccatcggatgctggccacaggcgagtgtactcctgaggatctgtgtttctccctgcaggtaatgcagtaaaaaactgggacagaaagttggggctgaaggttttatattgtagagcagaactaatctgggatgcccctctaatattttctccttatctgtccctgacaggaaactgtgtttgcaatgctggtagagatcacagagcgagccatggcacattgtggctcccaggaggccctcattgtgggaggagtggggtgtatgtattattgaaaagtgttcctctttcctattcttaacactatgcgtcttcctcctggtactctaaatcattaagcgtttggagtaggcttcccaatccttgcccctaatcccctatgtcattgttctaagtgagtgcacatgacgtgttctgctggaccatgaagagatggctaaaactaagctaatcctgttccctgcctctttgtaggtaatgtgaggctacaggagatgatggcaacaatgtgccaggaacgtggagcccggctttttgctacagatgagag

SEQ ID NO: 9628 - protein, 38 aa, Homo sapiens
MDVSFSGILSFIEDVAHRMLATGECTPEDLCFSLQVMQ

SEQ ID NO: 9629 - DNA, 2793 bp, Homo sapiens
gaaagtgaaaggactcttactacatcactaaaactcctgttgctttctttaacttcctacctacctttgctacagaaaatccctgtgatctctgacctatgttcattttctaggattccttccaggtgatacagccaggcatcaccgagctgttatcctagacctgctgcaggaggcactaacagagtctggattaacctcccaggatatcgactgcattgcatacaccaagggtatggctgggagagtggtcaacgatggaggaatatacctgcaacctggctaggtcaaaatagccaacaccttacctctgccaccatcactacccctaccccacctcacatcccttatgtcccccactattgtttttttccaatctctaggattataacttccatttctatctccctaggccctggcatgggtgccccactggtttctgtggctgttgtggcccgtactgtggcccaactgtggaataagccattggtgggtgtgaaccactgtataggccacattgagatgggccgcctcatcactggagccaccagcccaaccgtgttgtatgtgagtggaggaaatacgcaggtatttagagggctctacccactccatctcaatttctgaggcactgaaccagtattttctttgttctatctgagtcatgggaatgtcaggaacaaagatggacttatctgaacctaaaatactgtagaccagaaaacccccaacagagtttgtaacattgcaaattttggcagcatgatcagaacattagatggcttatcattatcagactttatatctgattataaagattaggaatttctacttcaggaaaggaatgaatgggattgaaaaggattgaaatcttcaaaataatgaatatctgaaagctcttgcattattttgaagcttattttttctataaatcttagcaattgaaactaacagtttgctgggattacaggcgtgagccaccatgcccggccagaaggtattttaaatttataggtgaagctaaagttgtttgggttaccttatatgacctttttaaggttgggattggattcttttccaacagaacacttgattatcattagaaatagttcagcattgtccccagctcatgaaagggttgtgtcgagaagatgaggcacatgtttcccatgaaaatgatgcagaaacttcagcaggtagagggcaagtagttggttgaggcctgaaggatgacatacaaggtcagagacttgggttgtggaaagtataatggaggctacaagagttgatgaaaggagcagtgacggttttgtcttcctcttctcttttaatgtttgcttaggtgtaagaaacagggagggtgattaggtggagaggagtggatagcagaagcagaaaggcaggatttttccttcgcctttgttactgtctttttgacagcagattaagatctgtatcagaaagggaagaaatccctaacagcactgggaagggaaagggacttcttaaggttcgtaggaagccctcggtgttataagtctgcagaatatgtgtcagtaagggacagatattctctgtgctaaaagttggtcacatatgaagaacggccttaatacaaaaaagtggtggtgggtgcctgtaattccagctgcttgggaggctgaggcaggagaattgcttgaacctgggaggcagaggttgcagtgagctgagatcacgccattgcactccagcctaggcgacagaacaagactctgtctcagaaaaaaaaaaaaaagaaaagaaaaatggccttaagtgaattgccattgctgacttggctgggccattagtctgactccatatgagatttttgagttcttcagctctgcttcttggttctaaataccactgcccagctgcatacggtggttcacacctataatcccagcactttgagaggctgaggcaggtagattgcttgagaccaggagtttgagaccaggctgggcaacatagtgagacccccatctctacaaaaatataaaaataagccacacatggtagcccagctactcaggaagctgaggtgggaggatcctttgagcctaggaggtggaggctacagtgagctatgatcacaccactccactccagcctgggagacagagcgagaccctgtctcaaaaaaaaattaccactgccactgtgtcataatttagaaggattcatgttctctgcctccaagcagaaaagccggttacctactatcaagactgcatttaagggatatattaggaacttctaagccggaaaaccaatgtatttgaaatgacaatttatttctgcctgaacctacactgtctaggaatctgttcctggaatcctcagggtatacagatttcttctcaaatcagagctgtaaaaactacccattcaccatttgggaaacacctttcttccacttcttattggaagccctggtggtcatgttgatcctctgctatgtttttctcccaaagccaaataatcctctttacagacttggggtttcatggacttcctcatcacccttaggtgattgcatactcggaacatcgttaccgtatctttggggaaaccatcgatattgcagtgggtaattgtctggatcgttttgctcgagtgctgaaggtaagccagtggggctgcagagaacataaaatgtgggtgaatttttgggaagccatggaggtggagggaggaaatagtaaatgagcttcttatgcttcctgcatatctgatttcatcctcttccattccctccttccttat

SEQ ID NO: 9630 - protein, 68 aa, Homo sapiens [sequence omitted]

SEQ ID NO: 9631 - DNA, 1121 bp, Homo sapiens
gaaagtgaaaggactcttactacatcactaaaactcctgttgctttctttaacttcctacctacctttgctacagaaaatccctgtgatctctgacctatgttcattttctaggattccttccaggtgatacagccaggcatcaccgagctgttatcctagacctgctgcaggaggcactaacagagtctggattaacctcccaggatatcgactgcattgcatacaccaagggtatggctgggagagtggtcaacgatggaggaatatacctgcaacctggctaggtcaaaatagccaacaccttacctctgccaccatcactacccctaccccacctcacatcccttatgtcccccactattgtttttttccaatctctaggattataacttccatttctatctccctaggccctggcatgggtgccccactggtttctgtggctgttgtggcccgtactgtggcccaactgtggaataagccattggtgggtgtgaaccactgtataggccacattgagatgggccgcctcatcactggagccaccagcccaaccgtgttgtatgtgagtggaggaaatacgcaggtatttagagggctctacccactccatctcaatttctgaggcactgaaccagtattttctttgttctatctgagtcatgggaatgtcaggaacaaagatggacttatctgaacctaaaatactgtagaccagaaaacccccaacagagtttgtaacattgcaaattttggcagcatgatcagaacattagatggcttatcattatcagactttatatctgattataaagattaggaatttctacttcaggaaaggaatgaatgggattgaaaaggattgaaatcttcaaaataatgaatatctgaaagctcttgcattattttgaagcttattttttctataaatcttagcaattgaaactaacagttgctgggtatggcaactcatgcctgtaatcctagcaactccggaggctgggcaggagaatcacttgaacccaggaggcggaagttgcggtgaaccgagatcgcaccattgcattccagcctgggcaacaagagcaaaactccgtctcaaacaaacaaacaaacaaa

SEQ ID NO: 9632 - protein, 48 aa, Homo sapiens
MPVILATPEAGQENHLNPGGGSCGEPRSHHCIPAWATRAKLRLKQTNK

SEQ ID NO: 9633 - DNA, 1651 bp, Homo sapiens
cttaggtccccaaccctccctcgggctgtttatcgttgtgccagatgcacagcacattgtgtgacactgacttaagattctaactatgtgcaagagggaaaaaaacagtggagaaggctgggctggaccacgggaaagagataggaaaacggatacgaatgtaaggcacagagttggctcggcgtccctggcagttaggaagacaggtccctggaggggccttggcgggtctccgctcgcgggagttccgcggtgtctttcccagtgctatctgcaggctggccagcttcctctgcgctccggaaagctgcggcccagcgcggactagtgaggacctccacagctcctgacattgccaggagtcctgtcggcgttttctcccagcctccgccatgccggcggtgctgggttttgaaggcagcgccaataagattggcgtgggcgtggtgcgggatggcaaggtgctggcgaacccgcggcggacttacgtcacgcctcctggcacaggattccttccaggtgatacagccaggcatcaccgagctgttatcctagacctgctgcaggaggcactaacagagtctggattaacctcccaggatatcgactgcattgcatacaccaagggtatggctgggagagtggtcaacgatggaggaatatacctgcaacctggctaggtcaaaatagccaacaccttacctctgccaccatcactacccctaccccacctcacatcccttatgtcccccactattgtttttttccaatctctaggattataacttccatttctatctccctaggccctggcatgggtgccccactggtttctgtggctgttgtggcccgtactgtggcccaactgtggaataagccattggtgggtgtgaaccactgtataggccacattgagatgggccgcctcatcactggagccaccagcccaaccgtgttgtatgtgagtggaggaaatacgcaggtatttagagggctctacccactccatctcaatttctgaggcactgaaccagtattttctttgttctatctgagtcatgggaatgtcaggaacaaagatggacttatctgaacctaaaatactgtagaccagaaaacccccaacagagtttgtaacattgcaaattttggcagcatgatcagaacattagatggcttatcattatcagactttatatctgattataaagattaggaatttctacttcaggaaaggaatgaatgggattgaaaaggattgaaatcttcaaaataatgaatatctgaaagctcttgcattattttgaagcttattttttctataaatcttagcaattgaaactaacagttgctgggtatggcaactcatgcctgtaattccagcactttgggaggtcgaggcgggtggatcatctgaggtcaggagtttgagcccagcctggccaacgtggcaaaaccccatctgtactaaaaataacaaaaattaatttgatgtggtggcaggtgcctgtaatcctagcaactccggaggctgggcaggagaatcacttgaacccaggaggcggaagttgcggtgaaccgagatcgcaccattgcattccagcctgggcaacaagagcaaaactccgtctcaaacaaacaaacaaacaaa

SEQ ID NO: 9634 - protein, 95 aa, Homo sapiens [sequence omitted]

SEQ ID NO: 9635 - DNA, 403 bp, Homo sapiens
cccagtgctatctgcaggctggccagcttcctctgcgctccggaaagctgcggcccagcgcggactagtgaggacctccacagctcctgacattgccaggagtcctgtcggcgttttctcccagcctccgccatgccggcggtgctgggttttgaaggcagcgccaataagattggcgtgggcgtggtgcgggatggcaaggtgctggcgaacccgcggcggacttacgtcacgcctcctggcacaggattccttccaggtgatacagccaggcatcaccgagctgttatcctagacctgctgcaggaggcactaacagagtctggattaacctcccaggatatcgactgcattgcatacaccagcccaaccgtgttgtatgtgagtggaggaaatacgcagg

SEQ ID NO: 9636 - protein, 89 aa, Homo sapiens
MPAVLGFEGSANKIGVGVVRDGKVLANPRRTYVTPPGTGFLPGDTARHHRAVILDLLQEALTESGLTSQDIDCIAYTSPTVLYVSGGNT

SEQ ID NO: 9637 - DNA, 1499 bp, Homo sapiens
cagacagaccaatcacgcgcattcttcggccacgacaagcgcgcctctgatcacgtgaccaggtccgctacccacgtgggggctcagcgtgcacccttctttgtgctcgggttaggaggagctaggctgccatcgggccggtgcagatacggggttgctcttttgctcataagaggggcttcgctggcagtctgaacggcaagcttgagcaacgcggtaaaaatattgcttcggtgggtgacgcggtacagctgcccaagggcgttcgtaacgggaatgccgaagcgtgggaaaaagggagcggtggcggaagacggggatgagctcaggacagagccagaggccaagaagagtaagacggccgcaaagaaaaatgacaaagaggcagcaggagagggcccagccctgtatgaggaccccccagatcagaaaacctcacccagtggcaaacctgccacactcaagatctgctcttggaatgtggatgggcttcgagcctggattaagaagaaaggattagattgggtaaaggaagaagccccagatatactgtgccttcaagagaccaaatgttcagagaacaaactaccagctgaacttcaggagctgcctggactctctcatcaatactggtcagctccttcggacaaggaagggtacagtggcgtgggcctgctttcccgccagtgcccactcaaagtttcttacggcataggcgatgaggagcatgatcaggaaggccgggtgattgtggctgaatttgactcgtttgtgctggtaacagcatatgtacctaatgcaggccgaggtctggtacgactggagtaccggcagcgctgggatgaagcctttcgcaagttcctgaagggcctggcttcccgaaagccccttgtgctgtgtggagacctcaatgtggcacatgaagaaattgaccttcgcaaccccaaggggaacaaaaagaatgctggcttcacgccacaagagcgccaaggcttcggggaattactgcaggctgtgccactggctgacagctttaggcacctctaccccaacacaccctatgcctacaccttttggacttatatgatgaatgctcgatccaagaatgttggttggcgccttgattactttttgttgtcccactctctgttacctgcattgtgtgacagcaagatccgttccaaggccctcggcagtgatcactgtcctatcaccctatacctagcactgtgacaccacccctaaatcactttgagcctgggaaataagccccctcaactaccattccttctttaaacactcttcagagaaatctgcattctatttctcatgtataaaactaggaatcctccaaccaggctcctgtgatagagttcttttaagcccaagattttttatttgagggttttttgttttttaaaaaaaaattgaacaaagactactaatgactttgtttgaattatccacatgaaaataaagagccatagtttcagccttgc

SEQ ID NO: 9638 - protein, 318 aa, Homo sapiens; identical to SEQ ID NO: 1522

SEQ ID NO: 9639 - DNA, 1555 bp, Homo sapiens
cagacagaccaatcacgcgcattcttcggccacgacaagcgcgcctctgatcacgtgaccaggtccgctacccacgtgggggctcagcgtgcacccttctttgtgctcgggttaggaggagctaggctgccatcgggccggtgcagatacggggttgctcttttgctcataagaggggcttcgctggcagtctgaacggcaagcttgagtcaggacccttaattaagatcctcaattggctggagggcagatctcgcgagtagggcaacgcggtaaaaatattgcttcggtgggtgacgcggtacagctgcccaagggcgttcgtaacgggaatgccgaagcgtgggaaaaagggagcggtggcggaagacggggatgagctcaggacagagccagaggccaagaagagtaagacggccgcaaagaaaaatgacaaagaggcagcaggagagggcccagccctgtatgaggaccccccagatcagaaaacctcacccagtggcaaacctgccacactcaagatctgctcttggaatgtggatgggcttcgagcctggattaagaagaaaggattagattgggtaaaggaagaagccccagatatactgtgccttcaagagaccaaatgttcagagaacaaactaccagctgaacttcaggagctgcctggactctctcatcaatactggtcagctccttcggacaaggaagggtacagtggcgtgggcctgctttcccgccagtgcccactcaaagtttcttacggcataggcgatgaggagcatgatcaggaaggccgggtgattgtggctgaatttgactcgtttgtgctggtaacagcatatgtacctaatgcaggccgaggtctggtacgactggagtaccggcagcgctgggatgaagcctttcgcaagttcctgaagggcctggcttcccgaaagccccttgtgctgtgtggagacctcaatgtggcacatgaagaaattgaccttcgcaaccccaaggggaacaaaaagaatgctggcttcacgccacaagagcgccaaggcttcggggaattactgcaggctgtgccactggctgacagctttaggcacctctaccccaacacaccctatgcctacaccttttggacttatatgatgaatgctcgatccaagaatgttggttggcgccttgattactttttgttgtcccactctctgttacctgcattgtgtgacagcaagatccgttccaaggccctcggcagtgatcactgtcctatcaccctatacctagcactgtgacaccacccctaaatcactttgagcctgggaaataagccccctcaactaccattccttctttaaacactcttcagagaaatctgcattctatttctcatgtataaaactaggaatcctccaaccaggctcctgtgatagagttcttttaagcccaagattttttatttgagggttttttgttttttaaaaaaaaattgaacaaagactactaatgactttgtttgaattatccacatgaaaataaagagccatagtttcagccttgc

SEQ ID NO: 9640 - protein, 318 aa, Homo sapiens; identical to SEQ ID NO: 1522

SEQ ID NO: 9641 - DNA, 2477 bp, Homo sapiens
aggtccgctacccacgtgggggctcagcgtgcacccttctttgtgctcgggttaggaggagctaggctgccatcgggccggtgcagatacggggttgctcttttgctcataagaggggcttcgctggcagtctgaacggcaagcttgagcaacgcggtaaaaatattgcttcggtgggtgacgcggtacagctgcccaagggcgttcgtaacgggaatgccgaagcgtgggaaaaagggagcggtggcggaagacggggatgagctcaggacagagccagaggccaagaagagtaagacggccgcaaagaaaaatgacaaagaggcagcaggagagggcccagccctgtatgaggaccccccagatcagaaaacctcacccagtggcaaacctgccacactcaagatctgctcttggaatgtggatgggcttcgagcctggattaagaagaaaggattagattgggtaaaggaagaagccccagatatactgtgccttcaagagaccaaatgttcagagaacaaactaccagctgaacttcaggagctgcctggactctctcatcaatactggtcagctccttcggacaaggaagggtacagtggcgtgggcctgctttcccgccagtgcccactcaaagtttcttacggcataggcgatgaggagcatgatcaggaaggccgggtgattgtggctgaatttgactcgtttgtgctggtaacagcatatgtacctaatgcaggccgaggtctggtacgactggagtaccggcagcgctgggatgaagcctttcgcaagttcctgaagggcctggcttcccgaaagccccttgtgctgtgtggagacctcaatgtggcacatgaagaaattgaccttcgcaaccccaaggggaacaaaaagaatgctggcttcacgccacaagagcgccaaggcttcggggaattactgcaggctgtgccactggctgacagctttaggcacctctaccccaacacaccctatgcctacaccttttggacttatatgatgaatgctcgatccaagaatgttggttggcgccttgattactttttgttgtcccactctctgttacctgcattgtgtgacagcaagatccgttccaaggccctcggcagtgatcactgtcctatcaccctatacctagcactgtgacaccacccctaaatcactttgagcctgggaaataagccccctcaactaccattccttctttaaacactcttcagagaaatctgcattctatttctcatgtataaaactaggaatcctccaaccaggctcctgtgatagagttcttttaagcccaagattttttatttgagggttttttgttttttaaaaaaaaattgaacaaagactactaatgactttgtttgaattatccacatgaaaataaagagccatagtttcagccttgctgtcttcgtgtcttaccccttcgtggggctacacattctcttcctcatattttcatgcacacaagttaacaactgaaaaagcgtagagtcatgaccttatttatttacaagcacaggataagtccctaacctcccccaaagactgagcaaccctacccagcccagttaaatactgcaactgggggggtaaaaaaggtcgggaggaggaattaagggaaatacaggaataggggaacatatcccacattaaatagttatatacacatcagttcctgtggttctgtacagagcagcggctgaccccacccccacaggacacaatgtggggagaggagactgagggtactgaggccagagccaacctctggtgaagtgcaatagcagcagcaaagtcctaatggtgcacaagagggaggggaacccccagggctacccacccccaccctgccctggaatgtgtaagggacaggaatggctctcagggagcacacaggaaggacaaggctggaaccgtcttcagggcccagttttaagggcaacgttttgcctacttcaccctagacacagcaacccttggaggaaagcagatggtcagcagtgctcttatctgcccctccaaacctaagtgagggcctggttccttcctacctctccccagggaaaaggaaggcagctgcttggcttccttctagaagccccgggagcctttaactaccccagctcccttcgtagtgtcactgtccccaccagggaggggccaggcacagtctgtgggtcatcaggctcaggagaagttctggacagggtggctgaccttcatacaggcccaataaagagcccggcccaaacacagcacagccaacaggatgacaaatgcccaggctgcatagatgcctccatatcgccgtgcatgcttccatgtgccaaactgatgaagataaggagggagaagaaaagaaagatggggttaatgttggtctccactacctcctattagttctaagaacagtaataactcacgcttcagtccttgttcct

SEQ ID NO: 9642 - protein, 318 aa, Homo sapiens; identical to SEQ ID NO: 1522

SEQ ID NO: 9643 - DNA, 1404 bp, Homo sapiens
ccgctacccacgtgggggctcagcgtgcacccttctttgtgctcgggttaggaggagctaggctgccatcgggccggtgcagatacggggttgctcttttgctcataagaggggcttcgctggcagtctgaacggcaagcttgagtcaggacccttaattaagatcctcaattggctggagggcagatctcgcgagtagggcaacgcggtaaaaatattgcttcggtgggtgacgcggtacagctgcccaagggcgttcgtaacgggaatgccgaagcgtgggaaaaagggagcggtggcggaagacggggatgagctcaggacagagccagaggccaagaagagtaagacggccgcaaagaaaaatgacaaagaggcagcaggagagggcccagccctgtatgaggaccccccagatcagaaaacctcacccagtggcaaacctgccacactcaagatctgctcttggaatgtggatgggcttcgagcctggattaagaagaaaggattagattgggtaaaggaagaagccccagatatactgtgccttcaagagaccaaatgttcagagaacaaactaccagctgaacttcaggagctgcctggactctctcatcaatactggtcagctccttcggacaaggaagggtacagtggcgtgggcctgctttcccgccagtgcccactcaaagtttcttacggcataggccgaggtctggtacgactggagtaccggcagcgctgggatgaagcctttcgcaagttcctgaagggcctggcttcccgaaagccccttgtgctgtgtggagacctcaatgtggcacatgaagaaattgaccttcgcaaccccaaggggaacaaaaagaatgctggcttcacgccacaagagcgccaaggcttcggggaattactgcaggctgtgccactggctgacagctttaggcacctctaccccaacacaccctatgcctacaccttttggacttatatgatgaatgctcgatccaagaatgttggttggcgccttgattactttttgttgtcccactctctgttacctgcattgtgtgacagcaagatccgttccaaggccctcggcagtgatcactgtcctatcaccctatacctagcactgtgacaccacccctaaatcactttgagcctgggaaataagccccctcaactaccattccttctttaaacactcttcagagaaatctgcattctatttctcatgtataaaactaggaatcctccaaccaggctcctgtgatagagttcttttaagcccaagattttttatttgagggttttttgttttttaaaaaaaaattgaacaaagactactaatgactttgtttgaattatccacatgaaaataaagagccatagtttcagccttgc

SEQ ID NO: 9644 - protein, 289 aa, Homo sapiens
MPKRGKKGAVAEDGDELRTEPEAKKSKTAAKKNDKEAAGEGPALYEDPPDQKTSPSGKPATLKICSWNVDGLRAWIKKKGLDWVKEEAPDILCLQETKCSENKLPAELQELPGLSHQYWSAPSDKEGYSGVGLLSRQCPLKVSYGIGRGLVRLEYRQRWDEAFRKFLKGLASRKPLVLCGDLNVAHEEIDLRNPKGNKKNAGFTPQERQGFGELLQAVPLADSFRHLYPNTPYAYTFWTYMMNARSKNVGWRLDYFLLSHSLLPALCDSKIRSKALGSDHCPITLYLAL

SEQ ID NO: 9645 - DNA, 2529 bp, Homo sapiens
ccgctacccacgtgggggctcagcgtgcacccttctttgtgctcgggttaggaggagctaggctgccatcgggccggtgcagatacggggttgctcttttgctcataagaggggcttcgctggcagtctgaacggcaagcttgagtcaggacccttaattaagatcctcaattggctggagggcagatctcgcgagtagggcaacgcggtaaaaatattgcttcggtgggtgacgcggtacagctgcccaagggcgttcgtaacgggaatgccgaagcgtgggaaaaagggagcggtggcggaagacggggatgagctcaggacagagccagaggccaagaagagtaagacggccgcaaagaaaaatgacaaagaggcagcaggagagggcccagccctgtatgaggaccccccagatcagaaaacctcacccagtggcaaacctgccacactcaagatctgctcttggaatgtggatgggcttcgagcctggattaagaagaaaggattagattgggtaaaggaagaagccccagatatactgtgccttcaagagaccaaatgttcagagaacaaactaccagctgaacttcaggagctgcctggactctctcatcaatactggtcagctccttcggacaaggaagggtacagtggcgtgggcctgctttcccgccagtgcccactcaaagtttcttacggcataggcgatgaggagcatgatcaggaaggccgggtgattgtggctgaatttgactcgtttgtgctggtaacagcatatgtacctaatgcaggccgaggtctggtacgactggagtaccggcagcgctgggatgaagcctttcgcaagttcctgaagggcctggcttcccgaaagccccttgtgctgtgtggagacctcaatgtggcacatgaagaaattgaccttcgcaaccccaaggggaacaaaaagaatgctggcttcacgccacaagagcgccaaggcttcggggaattactgcaggctgtgccactggctgacagctttaggcacctctaccccaacacaccctatgcctacaccttttggacttatatgatgaatgctcgatccaagaatgttggttggcgccttgattactttttgttgtcccactctctgttacctgcattgtgtgacagcaagatccgttccaaggccctcggcagtgatcactgtcctatcaccctatacctagcactgtgacaccacccctaaatcactttgagcctgggaaataagccccctcaactaccattccttctttaaacactcttcagagaaatctgcattctatttctcatgtataaaactaggaatcctccaaccaggctcctgtgatagagttcttttaagcccaagattttttatttgagggttttttgttttttaaaaaaaaattgaacaaagactactaatgactttgtttgaattatccacatgaaaataaagagccatagtttcagccttgctgtcttcgtgtcttaccccttcgtggggctacacattctcttcctcatattttcatgcacacaagttaacaactgaaaaagcgtagagtcatgaccttatttatttacaagcacaggataagtccctaacctcccccaaagactgagcaaccctacccagcccagttaaatactgcaactgggggggtaaaaaaggtcgggaggaggaattaagggaaatacaggaataggggaacatatcccacattaaatagttatatacacatcagttcctgtggttctgtacagagcagcggctgaccccacccccacaggacacaatgtggggagaggagactgagggtactgaggccagagccaacctctggtgaagtgcaatagcagcagcaaagtcctaatggtgcacaagagggaggggaacccccagggctacccacccccaccctgccctggaatgtgtaagggacaggaatggctctcagggagcacacaggaaggacaaggctggaaccgtcttcagggcccagttttaagggcaacgttttgcctacttcaccctagacacagcaacccttggaggaaagcagatggtcagcagtgctcttatctgcccctccaaacctaagtgagggcctggttccttcctacctctccccagggaaaaggaaggcagctgcttggcttccttctagaagccccgggagcctttaactaccccagctcccttcgtagtgtcactgtccccaccagggaggggccaggcacagtctgtgggtcatcaggctcaggagaagttctggacagggtggctgaccttcatacaggcccaataaagagcccggcccaaacacagcacagccaacaggatgacaaatgcccaggctgcatagatgcctccatatcgccgtgcatgcttccatgtgccaaactgatgaagataaggagggagaagaaaagaaagatggggttaatgttggtctccactacctcctattagttctaagaacagtaataactcacgcttcagtccttgttcct

SEQ ID NO: 9646 - protein, 318 aa, Homo sapiens; identical to SEQ ID NO: 1522

SEQ ID NO: 9647 - DNA, 2442 bp, Homo sapiens
ccgctacccacgtgggggctcagcgtgcacccttctttgtgctcgggttaggaggagctaggctgccatcgggccggtgcagatacggggttgctcttttgctcataagaggggcttcgctggcagtctgaacggcaagcttgagtcaggacccttaattaagatcctcaattggctggagggcagatctcgcgagtagggcaacgcggtaaaaatattgcttcggtgggtgacgcggtacagctgcccaagggcgttcgtaacgggaatgccgaagcgtgggaaaaagggagcggtggcggaagacggggatgagctcaggacagagccagaggccaagaagagtaagacggccgcaaagaaaaatgacaaagaggcagcaggagagggcccagccctgtatgaggaccccccagatcagaaaacctcacccagtggcaaacctgccacactcaagatctgctcttggaatgtggatgggcttcgagcctggattaagaagaaaggattagattgggtaaaggaagaagccccagatatactgtgccttcaagagaccaaatgttcagagaacaaactaccagctgaacttcaggagctgcctggactctctcatcaatactggtcagctccttcggacaaggaagggtacagtggcgtgggcctgctttcccgccagtgcccactcaaagtttcttacggcataggccgaggtctggtacgactggagtaccggcagcgctgggatgaagcctttcgcaagttcctgaagggcctggcttcccgaaagccccttgtgctgtgtggagacctcaatgtggcacatgaagaaattgaccttcgcaaccccaaggggaacaaaaagaatgctggcttcacgccacaagagcgccaaggcttcggggaattactgcaggctgtgccactggctgacagctttaggcacctctaccccaacacaccctatgcctacaccttttggacttatatgatgaatgctcgatccaagaatgttggttggcgccttgattactttttgttgtcccactctctgttacctgcattgtgtgacagcaagatccgttccaaggccctcggcagtgatcactgtcctatcaccctatacctagcactgtgacaccacccctaaatcactttgagcctgggaaataagccccctcaactaccattccttctttaaacactcttcagagaaatctgcattctatttctcatgtataaaactaggaatcctccaaccaggctcctgtgatagagttcttttaagcccaagattttttatttgagggttttttgttttttaaaaaaaaattgaacaaagactactaatgactttgtttgaattatccacatgaaaataaagagccatagtttcagccttgctgtcttcgtgtcttaccccttcgtggggctacacattctcttcctcatattttcatgcacacaagttaacaactgaaaaagcgtagagtcatgaccttatttatttacaagcacaggataagtccctaacctcccccaaagactgagcaaccctacccagcccagttaaatactgcaactgggggggtaaaaaaggtcgggaggaggaattaagggaaatacaggaataggggaacatatcccacattaaatagttatatacacatcagttcctgtggttctgtacagagcagcggctgaccccacccccacaggacacaatgtggggagaggagactgagggtactgaggccagagccaacctctggtgaagtgcaatagcagcagcaaagtcctaatggtgcacaagagggaggggaacccccagggctacccacccccaccctgccctggaatgtgtaagggacaggaatggctctcagggagcacacaggaaggacaaggctggaaccgtcttcagggcccagttttaagggcaacgttttgcctacttcaccctagacacagcaacccttggaggaaagcagatggtcagcagtgctcttatctgcccctccaaacctaagtgagggcctggttccttcctacctctccccagggaaaaggaaggcagctgcttggcttccttctagaagccccgggagcctttaactaccccagctcccttcgtagtgtcactgtccccaccagggaggggccaggcacagtctgtgggtcatcaggctcaggagaagttctggacagggtggctgaccttcatacaggcccaataaagagcccggcccaaacacagcacagccaacaggatgacaaatgcccaggctgcatagatgcctccatatcgccgtgcatgcttccatgtgccaaactgatgaagataaggagggagaagaaaagaaagatggggttaatgttggtctccactacctcctattagttctaagaacagtaataactcacgcttcagtccttgttcct

SEQ ID NO: 9648 - protein, 289 aa, Homo sapiens; identical to SEQ ID NO: 9644

SEQ ID NO: 9649 - DNA, 1331 bp, Homo sapiens
cccacgtgggggctcagcgtgcacccttctttgtgctcgggcaacgcggtaaaaatattgcttcggtgggtgacgcggtacagctgcccaagggcgttcgtaacgggaatgccgaagcgtgggaaaaagggagcggtggcggaagacggggatgagctcaggacagagccagaggccaagaagagtaagacggccgcaaagaaaaatgacaaagaggcagcaggagagggcccagccctgtatgaggaccccccagatcagaaaacctcacccagtggcaaacctgccacactcaagatctgctcttggaatgtggatgggcttcgagcctggattaagaagaaaggattagattgggtaaaggaagaagccccagatatactgtgccttcaagagaccaaatgttcagagaacaaactaccagctgaacttcaggagctgcctggactctctcatcaatactggtcagctccttcggacaaggaagggtacagtggcgtgggcctgctttcccgccagtgcccactcaaagtttcttacggcataggcgatgaggagcatgatcaggaaggccgggtgattgtggctgaatttgactcgtttgtgctggtaacagcatatgtacctaatgcaggccgaggtctggtacgactggagtaccggcagcgctgggatgaagcctttcgcaagttcctgaagggcctggcttcccgaaagccccttgtgctgtgtggagacctcaatgtggcacatgaagaaattgaccttcgcaaccccaaggggaacaaaaagaatgctggcttcacgccacaagagcgccaaggcttcggggaattactgcaggctgtgccactggctgacagctttaggcacctctaccccaacacaccctatgcctacaccttttggacttatatgatgaatgctcgatccaagaatgttggttggcgccttgattactttttgttgtcccactctctgttacctgcattgtgtgacagcaagatccgttccaaggccctcggcagtgatcactgtcctatcaccctatacctagcactgtgacaccacccctaaatcactttgagcctgggaaataagccccctcaactaccattccttctttaaacactcttcagagaaatctgcattctatttctcatgtataaaactaggaatcctccaaccaggctcctgtgatagagttcttttaagcccaagattttttatttgagggttttttgttttttaaaaaaaaattgaacaaagactactaatgactttgtttgaattatccacatgaaaataaagagccatagtttcagccttgc

SEQ ID NO: 9650 - protein, 318 aa, Homo sapiens; identical to SEQ ID NO: 1522

SEQ ID NO: 9651 - DNA, 2369 bp, Homo sapiens
cccacgtgggggctcagcgtgcacccttctttgtgctcgggcaacgcggtaaaaatattgcttcggtgggtgacgcggtacagctgcccaagggcgttcgtaacgggaatgccgaagcgtgggaaaaagggagcggtggcggaagacggggatgagctcaggacagagccagaggccaagaagagtaagacggccgcaaagaaaaatgacaaagaggcagcaggagagggcccagccctgtatgaggaccccccagatcagaaaacctcacccagtggcaaacctgccacactcaagatctgctcttggaatgtggatgggcttcgagcctggattaagaagaaaggattagattgggtaaaggaagaagccccagatatactgtgccttcaagagaccaaatgttcagagaacaaactaccagctgaacttcaggagctgcctggactctctcatcaatactggtcagctccttcggacaaggaagggtacagtggcgtgggcctgctttcccgccagtgcccactcaaagtttcttacggcataggcgatgaggagcatgatcaggaaggccgggtgattgtggctgaatttgactcgtttgtgctggtaacagcatatgtacctaatgcaggccgaggtctggtacgactggagtaccggcagcgctgggatgaagcctttcgcaagttcctgaagggcctggcttcccgaaagccccttgtgctgtgtggagacctcaatgtggcacatgaagaaattgaccttcgcaaccccaaggggaacaaaaagaatgctggcttcacgccacaagagcgccaaggcttcggggaattactgcaggctgtgccactggctgacagctttaggcacctctaccccaacacaccctatgcctacaccttttggacttatatgatgaatgctcgatccaagaatgttggttggcgccttgattactttttgttgtcccactctctgttacctgcattgtgtgacagcaagatccgttccaaggccctcggcagtgatcactgtcctatcaccctatacctagcactgtgacaccacccctaaatcactttgagcctgggaaataagccccctcaactaccattccttctttaaacactcttcagagaaatctgcattctatttctcatgtataaaactaggaatcctccaaccaggctcctgtgatagagttcttttaagcccaagattttttatttgagggttttttgttttttaaaaaaaaattgaacaaagactactaatgactttgtttgaattatccacatgaaaataaagagccatagtttcagccttgctgtcttcgtgtcttaccccttcgtggggctacacattctcttcctcatattttcatgcacacaagttaacaactgaaaaagcgtagagtcatgaccttatttatttacaagcacaggataagtccctaacctcccccaaagactgagcaaccctacccagcccagttaaatactgcaactgggggggtaaaaaaggtcgggaggaggaattaagggaaatacaggaataggggaacatatcccacattaaatagttatatacacatcagttcctgtggttctgtacagagcagcggctgaccccacccccacaggacacaatgtggggagaggagactgagggtactgaggccagagccaacctctggtgaagtgcaatagcagcagcaaagtcctaatggtgcacaagagggaggggaacccccagggctacccacccccaccctgccctggaatgtgtaagggacaggaatggctctcagggagcacacaggaaggacaaggctggaaccgtcttcagggcccagttttaagggcaacgttttgcctacttcaccctagacacagcaacccttggaggaaagcagatggtcagcagtgctcttatctgcccctccaaacctaagtgagggcctggttccttcctacctctccccagggaaaaggaaggcagctgcttggcttccttctagaagccccgggagcctttaactaccccagctcccttcgtagtgtcactgtccccaccagggaggggccaggcacagtctgtgggtcatcaggctcaggagaagttctggacagggtggctgaccttcatacaggcccaataaagagcccggcccaaacacagcacagccaacaggatgacaaatgcccaggctgcatagatgcctccatatcgccgtgcatgcttccatgtgccaaactgatgaagataaggagggagaagaaaagaaagatggggttaatgttggtctccactacctcctattagttctaagaacagtaataactcacgcttcagtccttgttcct

SEQ ID NO: 9652 - protein, 318 aa, Homo sapiens; identical to SEQ ID NO: 1522

SEQ ID NO: 9653 - DNA, 1289 bp, Homo sapiens
cagcgtgcacccttctttgtgctcgggttaggaggagctaggctgccatcgggccggtgcagatacggggttgctcttttgctcataagaggggcttcgctggcagtctgaacggcaagcttgaagccagaggccaagaagagtaagacggccgcaaagaaaaatgacaaagaggcagcaggagagggcccagccctgtatgaggaccccccagatcagaaaacctcacccagtggcaaacctgccacactcaagatctgctcttggaatgtggatgggcttcgagcctggattaagaagaaaggattagattgggtaaaggaagaagccccagatatactgtgccttcaagagaccaaatgttcagagaacaaactaccagctgaacttcaggagctgcctggactctctcatcaatactggtcagctccttcggacaaggaagggtacagtggcgtgggcctgctttcccgccagtgcccactcaaagtttcttacggcataggcgatgaggagcatgatcaggaaggccgggtgattgtggctgaatttgactcgtttgtgctggtaacagcatatgtacctaatgcaggccgaggtctggtacgactggagtaccggcagcgctgggatgaagcctttcgcaagttcctgaagggcctggcttcccgaaagccccttgtgctgtgtggagacctcaatgtggcacatgaagaaattgaccttcgcaaccccaaggggaacaaaaagaatgctggcttcacgccacaagagcgccaaggcttcggggaattactgcaggctgtgccactggctgacagctttaggcacctctaccccaacacaccctatgcctacaccttttggacttatatgatgaatgctcgatccaagaatgttggttggcgccttgattactttttgttgtcccactctctgttacctgcattgtgtgacagcaagatccgttccaaggccctcggcagtgatcactgtcctatcaccctatacctagcactgtgacaccacccctaaatcactttgagcctgggaaataagccccctcaactaccattccttctttaaacactcttcagagaaatctgcattctatttctcatgtataaaactaggaatcctccaaccaggctcctgtgatagagttcttttaagcccaagattttttatttgagggttttttgttttttaaaaaaaaattgaacaaagactactaatgactttgtttgaattatccacatgaaaataaagagccatagtttcagccttgc

SEQ ID NO: 9654 - protein, 58 aa, Homo sapiens
MWHMKKLTFATPRGTKRMLASRHKSAKASGNYCRLCHWLTALGTSTPTHPMPTPFGLI

SEQ ID NO: 9655 - DNA, 2327 bp, Homo sapiens
cagcgtgcacccttctttgtgctcgggttaggaggagctaggctgccatcgggccggtgcagatacggggttgctcttttgctcataagaggggcttcgctggcagtctgaacggcaagcttgaagccagaggccaagaagagtaagacggccgcaaagaaaaatgacaaagaggcagcaggagagggcccagccctgtatgaggaccccccagatcagaaaacctcacccagtggcaaacctgccacactcaagatctgctcttggaatgtggatgggcttcgagcctggattaagaagaaaggattagattgggtaaaggaagaagccccagatatactgtgccttcaagagaccaaatgttcagagaacaaactaccagctgaacttcaggagctgcctggactctctcatcaatactggtcagctccttcggacaaggaagggtacagtggcgtgggcctgctttcccgccagtgcccactcaaagtttcttacggcataggcgatgaggagcatgatcaggaaggccgggtgattgtggctgaatttgactcgtttgtgctggtaacagcatatgtacctaatgcaggccgaggtctggtacgactggagtaccggcagcgctgggatgaagcctttcgcaagttcctgaagggcctggcttcccgaaagccccttgtgctgtgtggagacctcaatgtggcacatgaagaaattgaccttcgcaaccccaaggggaacaaaaagaatgctggcttcacgccacaagagcgccaaggcttcggggaattactgcaggctgtgccactggctgacagctttaggcacctctaccccaacacaccctatgcctacaccttttggacttatatgatgaatgctcgatccaagaatgttggttggcgccttgattactttttgttgtcccactctctgttacctgcattgtgtgacagcaagatccgttccaaggccctcggcagtgatcactgtcctatcaccctatacctagcactgtgacaccacccctaaatcactttgagcctgggaaataagccccctcaactaccattccttctttaaacactcttcagagaaatctgcattctatttctcatgtataaaactaggaatcctccaaccaggctcctgtgatagagttcttttaagcccaagattttttatttgagggttttttgttttttaaaaaaaaattgaacaaagactactaatgactttgtttgaattatccacatgaaaataaagagccatagtttcagccttgctgtcttcgtgtcttaccccttcgtggggctacacattctcttcctcatattttcatgcacacaagttaacaactgaaaaagcgtagagtcatgaccttatttatttacaagcacaggataagtccctaacctcccccaaagactgagcaaccctacccagcccagttaaatactgcaactgggggggtaaaaaaggtcgggaggaggaattaagggaaatacaggaataggggaacatatcccacattaaatagttatatacacatcagttcctgtggttctgtacagagcagcggctgaccccacccccacaggacacaatgtggggagaggagactgagggtactgaggccagagccaacctctggtgaagtgcaatagcagcagcaaagtcctaatggtgcacaagagggaggggaacccccagggctacccacccccaccctgccctggaatgtgtaagggacaggaatggctctcagggagcacacaggaaggacaaggctggaaccgtcttcagggcccagttttaagggcaacgttttgcctacttcaccctagacacagcaacccttggaggaaagcagatggtcagcagtgctcttatctgcccctccaaacctaagtgagggcctggttccttcctacctctccccagggaaaaggaaggcagctgcttggcttccttctagaagccccgggagcctttaactaccccagctcccttcgtagtgtcactgtccccaccagggaggggccaggcacagtctgtgggtcatcaggctcaggagaagttctggacagggtggctgaccttcatacaggcccaataaagagcccggcccaaacacagcacagccaacaggatgacaaatgcccaggctgcatagatgcctccatatcgccgtgcatgcttccatgtgccaaactgatgaagataaggagggagaagaaaagaaagatggggttaatgttggtctccactacctcctattagttctaagaacagtaataactcacgcttcagtccttgttcct

SEQ ID NO: 9656 - protein, 75 aa, Homo sapiens
MVHKREGNPQGYPPPPCPGMCKGQEWLSGSTQEGQGWNRLQGPVLRATFCLLHPRHSNPWRKADGQQCSYLPLQT

SEQ ID NO: 9657 - DNA, 593 bp, Homo sapiens
gtgcacccttctttgtgctcgggttaggaggagctaggctgccatcgggccggtgcagatacggggttgctcttttgctcataagaggggcttcgctggcagtctgaacggcaagcttgagtcaggacccttaattaagatcctcaattggctggagggcagatctcgcgagtagggcaacgcggtaaaaatattgcttcggtgggtgacgcggtacagctgcccaagggcgttcgtaacgggaatgccgaagcgtgggaaaaagggagcggtgccctgtatgaggaccccccagatcagaaaacctcacccaacctagcactgtgacaccacccctaaatcactttgagcctgggaaataagccccctcaactaccattccttctttaaacactcttcagagaaatctgcattctatttctcatgtataaaactaggaatcctccaaccaggctcctgtgatagagttcttttaagcccaagattttttatttgagggttttttgttttttaaaaaaaaattgaacaaagactactaatgactttgtttgaattatccacatgaaaataaagagccatagtttcagccttgc

SEQ ID NO: 9658 - protein, 62 aa, Homo sapiens
DPQLAGGQISRVGQRGKNIASVGDAVQLPKGVRNGNAEAWEKGSGALYEDPPDQKTSPNLAL

SEQ ID NO: 9659 - DNA, 923 bp, Homo sapiens
gtgcacccttctttgtgctcgggttaggaggagctaggctgccatcgggccggtgcagatacggggttgctcttttgctcataagaggggcttcgctggcagtctgaacggcaagcttgagtcaggacccttaattaagatcctcaattggctggagggcagatctcgcgagtagggcaacgcggtaaaaatattgcttcggtgggtgacgcggtacagctgcccaagggcgttcgtaacgggaatgccgaagcgtgggaaaaagggagcgcctttcgcaagttcctgaagggcctggcttcccgaaagccccttgtgctgtgtggagacctcaatgtggcacatgaagaaattgaccttcgcaaccccaaggggaacaaaaagaatgctggcttcacgccacaagagcgccaaggcttcggggaattactgcaggctgtgccactggctgacagctttaggcacctctaccccaacacaccctatgcctacaccttttggacttatatgatgaatgctcgatccaagaatgttggttggcgccttgattactttttgttgtcccactctctgttacctgcattgtgtgacagcaagatccgttccaaggccctcggcagtgatcactgtcctatcaccctatacctagcactgtgacaccacccctaaatcactttgagcctgggaaataagccccctcaactaccattccttctttaaacactcttcagagaaatctgcattctatttctcatgtataaaactaggaatcctccaaccaggctcctgtgatagagttcttttaagcccaagattttttatttgagggttttttgttttttaaaaaaaaattgaacaaagactactaatgactttgtttgaattatccacatgaaaataaagagccatagtttcagccttgc

SEQ ID NO: 9660 - protein, 58 aa, Homo sapiens; identical to SEQ ID NO: 9654

SEQ ID NO: 9661 - DNA, 1650 bp, Homo sapiens
gtgcacccttctttgtgctcgggttaggaggagctaggctgccatcgggccggtgcagatacggggttgctcttttgctcataagaggggcttcgctggcagtctgaacggcaagcttgagtcaggacccttaattaagatcctcaattggctggagggcagatctcgcgagtagggtacaaggcactatgaaatgatctagtttcgtgggtgaggggctgaagggcctatgatgcacggaggcggggaaaggatttagagataacgtggtttgaaaggcgggacctggtgcggggacgctcttgggaggagtcttctccccagccttagctggtttcatgatttctttgcgtctgtaggcaacgcggtaaaaatattgcttcggtgggtgacgcggtacagctgcccaagggcgttcgtaacgggaatgccgaagcgtgggaaaaagggagcggtggcggaagacggggatgagctcaggacagagccagaggccaagaagagtaagacggccgcaaagaaaaatgacaaagaggcagcaggagagggcccagccctgtatgaggaccccccagatcagaaaacctcacccagtggcaaacctgccacactcaagatctgctcttggaatgtggatgggcttcgagcctggattaagaagaaaggattagattgggtaaaggaagaagccccagatatactgtgccttcaagagaccaaatgttcagagaacaaactaccagctgaacttcaggagctgcctggactctctcatcaatactggtcagctccttcggacaaggaagggtacagtggcgtgggcctgctttcccgccagtgcccactcaaagtttcttacggcataggcgatgaggagcatgatcaggaaggccgggtgattgtggctgaatttgactcgtttgtgctggtaacagcatatgtacctaatgcaggccgaggtctggtacgactggagtaccggcagcgctgggatgaagcctttcgcaagttcctgaagggcctggcttcccgaaagccccttgtgctgtgtggagacctcaatgtggcacatgaagaaattgaccttcgcaaccccaaggggaacaaaaagaatgctggcttcacgccacaagagcgccaaggcttcggggaattactgcaggctgtgccactggctgacagctttaggcacctctaccccaacacaccctatgcctacaccttttggacttatatgatgaatgctcgatccaagaatgttggttggcgccttgattactttttgttgtcccactctctgttacctgcattgtgtgacagcaagatccgttccaaggccctcggcagtgatcactgtcctatcaccctatacctagcactgtgacaccacccctaaatcactttgagcctgggaaataagccccctcaactaccattccttctttaaacactcttcagagaaatctgcattctatttctcatgtataaaactaggaatcctccaaccaggctcctgtgatagagttcttttaagcccaagattttttatttgagggttttttgttttttaaaaaaaaattgaacaaagactactaatgactttgtttgaattatccacatgaaaataaagagccatagtttcagccttgc

SEQ ID NO: 9662 - protein, 318 aa, Homo sapiens; identical to SEQ ID NO: 1522

SEQ ID NO: 9663 - DNA, 1961 bp, Homo sapiens
gtgcacccttctttgtgctcgggttaggaggagctaggctgccatcgggccggtgcagatacggggttgctcttttgctcataagaggggcttcgctggcagtctgaacggcaagcttgagtcaggacccttaattaagatcctcaattggctggagggcagatctcgcgagtagggcaacgcggtaaaaatattgcttcggtgggtgacgcggtacagctgcccaagggcgttcgtaacgggaatgccgaagcgtgggaaaaagggagcgcctttcgcaagttcctgaagggcctggcttcccgaaagccccttgtgctgtgtggagacctcaatgtggcacatgaagaaattgaccttcgcaaccccaaggggaacaaaaagaatgctggcttcacgccacaagagcgccaaggcttcggggaattactgcaggctgtgccactggctgacagctttaggcacctctaccccaacacaccctatgcctacaccttttggacttatatgatgaatgctcgatccaagaatgttggttggcgccttgattactttttgttgtcccactctctgttacctgcattgtgtgacagcaagatccgttccaaggccctcggcagtgatcactgtcctatcaccctatacctagcactgtgacaccacccctaaatcactttgagcctgggaaataagccccctcaactaccattccttctttaaacactcttcagagaaatctgcattctatttctcatgtataaaactaggaatcctccaaccaggctcctgtgatagagttcttttaagcccaagattttttatttgagggttttttgttttttaaaaaaaaattgaacaaagactactaatgactttgtttgaattatccacatgaaaataaagagccatagtttcagccttgctgtcttcgtgtcttaccccttcgtggggctacacattctcttcctcatattttcatgcacacaagttaacaactgaaaaagcgtagagtcatgaccttatttatttacaagcacaggataagtccctaacctcccccaaagactgagcaaccctacccagcccagttaaatactgcaactgggggggtaaaaaaggtcgggaggaggaattaagggaaatacaggaataggggaacatatcccacattaaatagttatatacacatcagttcctgtggttctgtacagagcagcggctgaccccacccccacaggacacaatgtggggagaggagactgagggtactgaggccagagccaacctctggtgaagtgcaatagcagcagcaaagtcctaatggtgcacaagagggaggggaacccccagggctacccacccccaccctgccctggaatgtgtaagggacaggaatggctctcagggagcacacaggaaggacaaggctggaaccgtcttcagggcccagttttaagggcaacgttttgcctacttcaccctagacacagcaacccttggaggaaagcagatggtcagcagtgctcttatctgcccctccaaacctaagtgagggcctggttccttcctacctctccccagggaaaaggaaggcagctgcttggcttccttctagaagccccgggagcctttaactaccccagctcccttcgtagtgtcactgtccccaccagggaggggccaggcacagtctgtgggtcatcaggctcaggagaagttctggacagggtggctgaccttcatacaggcccaataaagagcccggcccaaacacagcacagccaacaggatgacaaatgcccaggctgcatagatgcctccatatcgccgtgcatgcttccatgtgccaaactgatgaagataaggagggagaagaaaagaaagatggggttaatgttggtctccactacctcctattagttctaagaacagtaataactcacgcttcagtccttgttcct

SEQ ID NO: 9664 - protein, 75 aa, Homo sapiens; identical to SEQ ID NO: 9656

SEQ ID NO: 9665 - DNA, 2688 bp, Homo sapiens
gtgcacccttctttgtgctcgggttaggaggagctaggctgccatcgggccggtgcagatacggggttgctcttttgctcataagaggggcttcgctggcagtctgaacggcaagcttgagtcaggacccttaattaagatcctcaattggctggagggcagatctcgcgagtagggtacaaggcactatgaaatgatctagtttcgtgggtgaggggctgaagggcctatgatgcacggaggcggggaaaggatttagagataacgtggtttgaaaggcgggacctggtgcggggacgctcttgggaggagtcttctccccagccttagctggtttcatgatttctttgcgtctgtaggcaacgcggtaaaaatattgcttcggtgggtgacgcggtacagctgcccaagggcgttcgtaacgggaatgccgaagcgtgggaaaaagggagcggtggcggaagacggggatgagctcaggacagagccagaggccaagaagagtaagacggccgcaaagaaaaatgacaaagaggcagcaggagagggcccagccctgtatgaggaccccccagatcagaaaacctcacccagtggcaaacctgccacactcaagatctgctcttggaatgtggatgggcttcgagcctggattaagaagaaaggattagattgggtaaaggaagaagccccagatatactgtgccttcaagagaccaaatgttcagagaacaaactaccagctgaacttcaggagctgcctggactctctcatcaatactggtcagctccttcggacaaggaagggtacagtggcgtgggcctgctttcccgccagtgcccactcaaagtttcttacggcataggcgatgaggagcatgatcaggaaggccgggtgattgtggctgaatttgactcgtttgtgctggtaacagcatatgtacctaatgcaggccgaggtctggtacgactggagtaccggcagcgctgggatgaagcctttcgcaagttcctgaagggcctggcttcccgaaagccccttgtgctgtgtggagacctcaatgtggcacatgaagaaattgaccttcgcaaccccaaggggaacaaaaagaatgctggcttcacgccacaagagcgccaaggcttcggggaattactgcaggctgtgccactggctgacagctttaggcacctctaccccaacacaccctatgcctacaccttttggacttatatgatgaatgctcgatccaagaatgttggttggcgccttgattactttttgttgtcccactctctgttacctgcattgtgtgacagcaagatccgttccaaggccctcggcagtgatcactgtcctatcaccctatacctagcactgtgacaccacccctaaatcactttgagcctgggaaataagccccctcaactaccattccttctttaaacactcttcagagaaatctgcattctatttctcatgtataaaactaggaatcctccaaccaggctcctgtgatagagttcttttaagcccaagattttttatttgagggttttttgttttttaaaaaaaaattgaacaaagactactaatgactttgtttgaattatccacatgaaaataaagagccatagtttcagccttgctgtcttcgtgtcttaccccttcgtggggctacacattctcttcctcatattttcatgcacacaagttaacaactgaaaaagcgtagagtcatgaccttatttatttacaagcacaggataagtccctaacctcccccaaagactgagcaaccctacccagcccagttaaatactgcaactgggggggtaaaaaaggtcgggaggaggaattaagggaaatacaggaataggggaacatatcccacattaaatagttatatacacatcagttcctgtggttctgtacagagcagcggctgaccccacccccacaggacacaatgtggggagaggagactgagggtactgaggccagagccaacctctggtgaagtgcaatagcagcagcaaagtcctaatggtgcacaagagggaggggaacccccagggctacccacccccaccctgccctggaatgtgtaagggacaggaatggctctcagggagcacacaggaaggacaaggctggaaccgtcttcagggcccagttttaagggcaacgttttgcctacttcaccctagacacagcaacccttggaggaaagcagatggtcagcagtgctcttatctgcccctccaaacctaagtgagggcctggttccttcctacctctccccagggaaaaggaaggcagctgcttggcttccttctagaagccccgggagcctttaactaccccagctcccttcgtagtgtcactgtccccaccagggaggggccaggcacagtctgtgggtcatcaggctcaggagaagttctggacagggtggctgaccttcatacaggcccaataaagagcccggcccaaacacagcacagccaacaggatgacaaatgcccaggctgcatagatgcctccatatcgccgtgcatgcttccatgtgccaaactgatgaagataaggagggagaagaaaagaaagatggggttaatgttggtctccactacctcctattagttctaagaacagtaataactcacgcttcagtccttgttcct

SEQ ID NO: 9666 - protein, 318 aa, Homo sapiens; identical to SEQ ID NO: 1522

SEQ ID NO: 9667 - DNA, 1317 bp, Homo sapiens
cttctttgtgctcgggttaggaggagctaggctgccatcgggccggtgcagatacggggttgctcttttgctcataagaggggcttcgctggcagtctgaacggcaagcttgaaagctgcggcgggggtgtttgtcattcccttgatgtacgagccagaggccaagaagagtaagacggccgcaaagaaaaatgacaaagaggcagcaggagagggcccagccctgtatgaggaccccccagatcagaaaacctcacccagtggcaaacctgccacactcaagatctgctcttggaatgtggatgggcttcgagcctggattaagaagaaaggattagattgggtaaaggaagaagccccagatatactgtgccttcaagagaccaaatgttcagagaacaaactaccagctgaacttcaggagctgcctggactctctcatcaatactggtcagctccttcggacaaggaagggtacagtggcgtgggcctgctttcccgccagtgcccactcaaagtttcttacggcataggcgatgaggagcatgatcaggaaggccgggtgattgtggctgaatttgactcgtttgtgctggtaacagcatatgtacctaatgcaggccgaggtctggtacgactggagtaccggcagcgctgggatgaagcctttcgcaagttcctgaagggcctggcttcccgaaagccccttgtgctgtgtggagacctcaatgtggcacatgaagaaattgaccttcgcaaccccaaggggaacaaaaagaatgctggcttcacgccacaagagcgccaaggcttcggggaattactgcaggctgtgccactggctgacagctttaggcacctctaccccaacacaccctatgcctacaccttttggacttatatgatgaatgctcgatccaagaatgttggttggcgccttgattactttttgttgtcccactctctgttacctgcattgtgtgacagcaagatccgttccaaggccctcggcagtgatcactgtcctatcaccctatacctagcactgtgacaccacccctaaatcactttgagcctgggaaataagccccctcaactaccattccttctttaaacactcttcagagaaatctgcattctatttctcatgtataaaactaggaatcctccaaccaggctcctgtgatagagttcttttaagcccaagattttttatttgagggttttttgttttttaaaaaaaaattgaacaaagactactaatgactttgtttgaattatccacatgaaaataaagagccatagtttcagccttgc

SEQ ID NO: 9668 - protein, 301 aa, Homo sapiens [sequence omitted]

SEQ ID NO: 9669 - DNA, 1516 bp, Homo sapiens
cttctttgtgctcgggttaggaggagctaggctgccatcgggccggtgcagatacggggttgctcttttgctcataagaggggcttcgctggcagtctgaacggcaagcttgagcaacgcggtaaaaatattgcttcggtgggtgacgcggtacagctgcccaagggcgttcgtaacgggaatgccgaagcgtgggaaaaagggagcggtggcggaagacggggatgagctcaggacaggggtttgtgaagaagtcgcaggaaccgtaggctttcgttgggtctatagttaacgccggatcgcagttggaaaccaccagctttttgtcagtatatattactcattttatagagccagaggccaagaagagtaagacggccgcaaagaaaaatgacaaagaggcagcaggagagggcccagccctgtatgaggaccccccagatcagaaaacctcacccagtggcaaacctgccacactcaagatctgctcttggaatgtggatgggcttcgagcctggattaagaagaaaggattagattgggtaaaggaagaagccccagatatactgtgccttcaagagaccaaatgttcagagaacaaactaccagctgaacttcaggagctgcctggactctctcatcaatactggtcagctccttcggacaaggaagggtacagtggcgtgggcctgctttcccgccagtgcccactcaaagtttcttacggcataggcgatgaggagcatgatcaggaaggccgggtgattgtggctgaatttgactcgtttgtgctggtaacagcatatgtacctaatgcaggccgaggtctggtacgactggagtaccggcagcgctgggatgaagcctttcgcaagttcctgaagggcctggcttcccgaaagccccttgtgctgtgtggagacctcaatgtggcacatgaagaaattgaccttcgcaaccccaaggggaacaaaaagaatgctggcttcacgccacaagagcgccaaggcttcggggaattactgcaggctgtgccactggctgacagctttaggcacctctaccccaacacaccctatgcctacaccttttggacttatatgatgaatgctcgatccaagaatgttggttggcgccttgattactttttgttgtcccactctctgttacctgcattgtgtgacagcaagatccgttccaaggccctcggcagtgatcactgtcctatcaccctatacctagcactgtgacaccacccctaaatcactttgagcctgggaaataagccccctcaactaccattccttctttaaacactcttcagagaaatctgcattctatttctcatgtataaaactaggaatcctccaaccaggctcctgtgatagagttcttttaagcccaagattttttatttgagggttttttgttttttaaaaaaaaattgaacaaagactactaatgactttgtttgaattatccacatgaaaataaagagccatagtttcagccttgc

SEQ ID NO: 9670 - protein, 36 aa, Homo sapiens
MPKRGKKGAVAEDGDELRTGVCEEVAGTVGFRWVYS

SEQ ID NO: 9671 - DNA, 2554 bp, Homo sapiens
cttctttgtgctcgggttaggaggagctaggctgccatcgggccggtgcagatacggggttgctcttttgctcataagaggggcttcgctggcagtctgaacggcaagcttgagcaacgcggtaaaaatattgcttcggtgggtgacgcggtacagctgcccaagggcgttcgtaacgggaatgccgaagcgtgggaaaaagggagcggtggcggaagacggggatgagctcaggacaggggtttgtgaagaagtcgcaggaaccgtaggctttcgttgggtctatagttaacgccggatcgcagttggaaaccaccagctttttgtcagtatatattactcattttatagagccagaggccaagaagagtaagacggccgcaaagaaaaatgacaaagaggcagcaggagagggcccagccctgtatgaggaccccccagatcagaaaacctcacccagtggcaaacctgccacactcaagatctgctcttggaatgtggatgggcttcgagcctggattaagaagaaaggattagattgggtaaaggaagaagccccagatatactgtgccttcaagagaccaaatgttcagagaacaaactaccagctgaacttcaggagctgcctggactctctcatcaatactggtcagctccttcggacaaggaagggtacagtggcgtgggcctgctttcccgccagtgcccactcaaagtttcttacggcataggcgatgaggagcatgatcaggaaggccgggtgattgtggctgaatttgactcgtttgtgctggtaacagcatatgtacctaatgcaggccgaggtctggtacgactggagtaccggcagcgctgggatgaagcctttcgcaagttcctgaagggcctggcttcccgaaagccccttgtgctgtgtggagacctcaatgtggcacatgaagaaattgaccttcgcaaccccaaggggaacaaaaagaatgctggcttcacgccacaagagcgccaaggcttcggggaattactgcaggctgtgccactggctgacagctttaggcacctctaccccaacacaccctatgcctacaccttttggacttatatgatgaatgctcgatccaagaatgttggttggcgccttgattactttttgttgtcccactctctgttacctgcattgtgtgacagcaagatccgttccaaggccctcggcagtgatcactgtcctatcaccctatacctagcactgtgacaccacccctaaatcactttgagcctgggaaataagccccctcaactaccattccttctttaaacactcttcagagaaatctgcattctatttctcatgtataaaactaggaatcctccaaccaggctcctgtgatagagttcttttaagcccaagattttttatttgagggttttttgttttttaaaaaaaaattgaacaaagactactaatgactttgtttgaattatccacatgaaaataaagagccatagtttcagccttgctgtcttcgtgtcttaccccttcgtggggctacacattctcttcctcatattttcatgcacacaagttaacaactgaaaaagcgtagagtcatgaccttatttatttacaagcacaggataagtccctaacctcccccaaagactgagcaaccctacccagcccagttaaatactgcaactgggggggtaaaaaaggtcgggaggaggaattaagggaaatacaggaataggggaacatatcccacattaaatagttatatacacatcagttcctgtggttctgtacagagcagcggctgaccccacccccacaggacacaatgtggggagaggagactgagggtactgaggccagagccaacctctggtgaagtgcaatagcagcagcaaagtcctaatggtgcacaagagggaggggaacccccagggctacccacccccaccctgccctggaatgtgtaagggacaggaatggctctcagggagcacacaggaaggacaaggctggaaccgtcttcagggcccagttttaagggcaacgttttgcctacttcaccctagacacagcaacccttggaggaaagcagatggtcagcagtgctcttatctgcccctccaaacctaagtgagggcctggttccttcctacctctccccagggaaaaggaaggcagctgcttggcttccttctagaagccccgggagcctttaactaccccagctcccttcgtagtgtcactgtccccaccagggaggggccaggcacagtctgtgggtcatcaggctcaggagaagttctggacagggtggctgaccttcatacaggcccaataaagagcccggcccaaacacagcacagccaacaggatgacaaatgcccaggctgcatagatgcctccatatcgccgtgcatgcttccatgtgccaaactgatgaagataaggagggagaagaaaagaaagatggggttaatgttggtctccactacctcctattagttctaagaacagtaataactcacgcttcagtccttgttcct

SEQ ID NO: 9672 - protein, 36 aa, Homo sapiens; identical to SEQ ID NO: 9670

SEQ ID NO: 9673 - DNA, 2355 bp, Homo sapiens
cttctttgtgctcgggttaggaggagctaggctgccatcgggccggtgcagatacggggttgctcttttgctcataagaggggcttcgctggcagtctgaacggcaagcttgaaagctgcggcgggggtgtttgtcattcccttgatgtacgagccagaggccaagaagagtaagacggccgcaaagaaaaatgacaaagaggcagcaggagagggcccagccctgtatgaggaccccccagatcagaaaacctcacccagtggcaaacctgccacactcaagatctgctcttggaatgtggatgggcttcgagcctggattaagaagaaaggattagattgggtaaaggaagaagccccagatatactgtgccttcaagagaccaaatgttcagagaacaaactaccagctgaacttcaggagctgcctggactctctcatcaatactggtcagctccttcggacaaggaagggtacagtggcgtgggcctgctttcccgccagtgcccactcaaagtttcttacggcataggcgatgaggagcatgatcaggaaggccgggtgattgtggctgaatttgactcgtttgtgctggtaacagcatatgtacctaatgcaggccgaggtctggtacgactggagtaccggcagcgctgggatgaagcctttcgcaagttcctgaagggcctggcttcccgaaagccccttgtgctgtgtggagacctcaatgtggcacatgaagaaattgaccttcgcaaccccaaggggaacaaaaagaatgctggcttcacgccacaagagcgccaaggcttcggggaattactgcaggctgtgccactggctgacagctttaggcacctctaccccaacacaccctatgcctacaccttttggacttatatgatgaatgctcgatccaagaatgttggttggcgccttgattactttttgttgtcccactctctgttacctgcattgtgtgacagcaagatccgttccaaggccctcggcagtgatcactgtcctatcaccctatacctagcactgtgacaccacccctaaatcactttgagcctgggaaataagccccctcaactaccattccttctttaaacactcttcagagaaatctgcattctatttctcatgtataaaactaggaatcctccaaccaggctcctgtgatagagttcttttaagcccaagattttttatttgagggttttttgttttttaaaaaaaaattgaacaaagactactaatgactttgtttgaattatccacatgaaaataaagagccatagtttcagccttgctgtcttcgtgtcttaccccttcgtggggctacacattctcttcctcatattttcatgcacacaagttaacaactgaaaaagcgtagagtcatgaccttatttatttacaagcacaggataagtccctaacctcccccaaagactgagcaaccctacccagcccagttaaatactgcaactgggggggtaaaaaaggtcgggaggaggaattaagggaaatacaggaataggggaacatatcccacattaaatagttatatacacatcagttcctgtggttctgtacagagcagcggctgaccccacccccacaggacacaatgtggggagaggagactgagggtactgaggccagagccaacctctggtgaagtgcaatagcagcagcaaagtcctaatggtgcacaagagggaggggaacccccagggctacccacccccaccctgccctggaatgtgtaagggacaggaatggctctcagggagcacacaggaaggacaaggctggaaccgtcttcagggcccagttttaagggcaacgttttgcctacttcaccctagacacagcaacccttggaggaaagcagatggtcagcagtgctcttatctgcccctccaaacctaagtgagggcctggttccttcctacctctccccagggaaaaggaaggcagctgcttggcttccttctagaagccccgggagcctttaactaccccagctcccttcgtagtgtcactgtccccaccagggaggggccaggcacagtctgtgggtcatcaggctcaggagaagttctggacagggtggctgaccttcatacaggcccaataaagagcccggcccaaacacagcacagccaacaggatgacaaatgcccaggctgcatagatgcctccatatcgccgtgcatgcttccatgtgccaaactgatgaagataaggagggagaagaaaagaaagatggggttaatgttggtctccactacctcctattagttctaagaacagtaataactcacgcttcagtccttgttcct

SEQ ID NO: 9674 - protein, 301 aa, Homo sapiens [sequence omitted]

SEQ ID NO: 9675 - DNA, 1146 bp, Homo sapiens
agactaagagtcatttcgagtatatttcttagagtaatggtaatgacccctgaaaggtctgtcctatgggaacatgttctgcatccccaccccaaggttctcattgagggagaccctgcttgtgctattatttttgttttctttctccatagtggacagagttcacagaccgcactttggcacgttgtcctcactgcaggaaagtgtcatctattgggcgcagatacccacgtaagagatgtatctgctgcttcttgcttggcttgcttttggcagtcactgccactggccttgcctttggcacatggaagcatgcacggcgatatggaggcatctatgcagcctgggcatttgtcatcctgttggctgtgctgtgtttgggccgggctctttattgggcctgtatgaaggtcagccaccctgtccagaacttctcctgagcctgatgacccacagactgtgcctggcccctccctggtggggacagtgacactacgaagggagctggggtagttaaaggctcccggggcttctagaaggaagccaagcagctgccttccttttccctggggagaggtaggaaggaaccaggccctcacttaggtttggaggggcagataagagcactgctgaccatctgctttcctccaagggttgctgtgtctagggtgaagtaggcaaaacgttgcccttaaaactgggccctgaagacggttccagccttgtccttcctgtgtgctccctgagagccattcctgtcccttacacattccagggcagggtgggggtgggtagccctgggggttcccctccctcttgtgcaccattaggactttgctgctgctattgcacttcaccagaggttggctctggcctcagtaccctcagtctcctctccccacattgtgtcctgtgggggtggggtcagccgctgctctgtacagaaccacaggaactgatgtgtatataactatttaatgtgggatatgttcccctattcctgtatttcccttaattcctcctcccgaccttttttacccccccagttgcagtatttaactgggctgggtagggttgctcagtctttgggggaggttagggacttatcctgtgcttgtaaataaataaggtcatgactctacgctt

SEQ ID NO: 9676 - protein, 123 aa, Homo sapiens
MVMTPERSVLWEHVLHPHPKVLIEGDPACAIIFVFFLHSGQSSQTALWHVVLTAGKCHLLGADTHVRDVSAASCLACFWQSLPLALPLAHGSMHGDMEASMQPGHLSSCWLCCVWAGLFIGPV

SEQ ID NO: 9677 - DNA, 1806 bp, Homo sapiens
gcatcagtgggggtgtaagtgatcccagcccttctatttgcttcctctccagcatttcccccgtttcccgaggggcatccagccgtgttgcctggggaggacccacccccctattcacccttaactagcccggacagtgggagtgcccctatgatcacctgccgagtctgccaatctctcatcaacgtggaaggcaagatgcatcagcatgtagtcaaatgtggtgtctgcaatgaagccaccgtgagttacacatatctatgaaatgggccctgtttcctggatcctctttctgatgtcttggttctagaccctgaccttccggctattagccaagtgcttttgatgatacccaggtttcagttccaggtgtctcacacagccatttccccagaagccactcaccaaagctaatgttcactttctctcacttttacacctagcctagttcctatttgcaaatctcatgatatagtctttcttttatttctccttcctggttagcaccttatttttctgatctcataaagtgtttttggagggaagtggaggggattgggattagaggtttgcttgctgatgaccctattattctctagccaatcaagaatgcacccccagggaaaaaatatgttcgatgcccctgtaactgtctccttatctgcaaagtgacatcccaacggattgcatgccctcggccctactgcaaaagaatcatcaacctggggcctgtgcatcccggacctctgagtccagaaccccaacccatgggtgtcagggttatctgtggacattgcaagaatacttttctgtggacagagttcacagaccgcactttggcacgttgtcctcactgcaggaaagtgtcatctattgggcgcagatacccacgtaagagatgtatctgctgcttcttgcttggcttgcttttggcagtcactgccactggccttgcctttggcacatggaagcatgcacggcgatatggaggcatctatgcagcctgggcatttgtcatcctgttggctgtgctgtgtttgggccgggctctttattgggcctgtatgaaggtcagccaccctgtccagaacttctcctgagcctgatgacccacagactgtgcctggcccctccctggtggggacagtgacactacgaagggagctggggtagttaaaggctcccggggcttctagaaggaagccaagcagctgccttccttttccctggggagaggtaggaaggaaccaggccctcacttaggtttggaggggcagataagagcactgctgaccatctgctttcctccaagggttgctgtgtctagggtgaagtaggcaaaacgttgcccttaaaactgggccctgaagacggttccagccttgtccttcctgtgtgctccctgagagccattcctgtcccttacacattccagggcagggtgggggtgggtagccctgggggttcccctccctcttgtgcaccattaggactttgctgctgctattgcacttcaccagaggttggctctggcctcagtaccctcagtctcctctccccacattgtgtcctgtgggggtggggtcagccgctgctctgtacagaaccacaggaactgatgtgtatataactatttaatgtgggatatgttcccctattcctgtatttcccttaattcctcctcccgaccttttttacccccccagttgcagtatttaactgggctgggtagggttgctcagtctttgggggaggttagggacttatcctgtgcttgtaaataaataaggtcatgactctacgctt

SEQ ID NO: 9678 - protein, 110 aa, Homo sapiens
MGVRVICGHCKNTFLWTEFTDRTLARCPHCRKVSSIGRRYPRKRCICCFLLGLLLAVTATGLAFGTWKHARRYGGIYAAWAFVILLAVLCLGRALYWACMKVSHPVQNFS

SEQ ID NO: 9679 - DNA, 3458 bp, Homo sapiens
gtggcggtggctgcggcgacggcagaggcgaagggagccggatcgccgacctgagcgggaggcggcggtggcggccatggcggcagatggagagcgttccccgctgctgtctgagcccatcgacggtggcgcgggcggcaacggtttagtggggcccggcgggagtggggctgggcccgggggaggcctgaccccctccgcaccaccgtacggagccggtaaacatgccccgccccagggtaagccggggcgggtccgaggtgctccccggggtactctgaaagccggggagggggcgggaccgagggcggaggcgggtcccagtcgccaggtgcgggactgctgcacctgtgactgggcgaggcttccttccctccgtaatcgcgaccacagcctagggacggaagggggttctgagcaacctgatagaagtgccaattatgagaagccctccgagcttggtcagagggttgaagatcagaaggacttccctaccaccgtggagcatcagtgggggtgtaagtgatcccagcccttctatttgcttcctctccagcatttcccccgtttcccgaggggcatccagccgtgttgcctggggaggacccacccccctattcacccttaactagcccggacagtgggagtgcccctatgatcacctgccgagtctgccaatctctcatcaacgtggaaggcaagatgcatcagcatgtagtcaaatgtggtgtctgcaatgaagccaccgtgagttacacatatctatgaaatgggccctgtttcctggatcctctttctgatgtcttggttctagaccctgaccttccggctattagccaagtgcttttgatgatacccaggtttcagttccaggtgtctcacacagccatttccccagaagccactcaccaaagctaatgttcactttctctcacttttacacctagcctagttcctatttgcaaatctcatgatatagtctttcttttatttctccttcctggttagcaccttatttttctgatctcataaagtgtttttggagggaagtggaggggattgggattagaggtttgcttgctgatgaccctattattctctagccaatcaagaatgcacccccagggaaaaaatatgttcgatgcccctgtaactgtctccttatctgcaaagtgacatcccaacggattgcatgccctcggccctactggtaagaggcataaggtggggaagggcctaagtggggaactggaaagtcaaaaaaggatgagcgtatacagagaatgtaaaggtgagagagcctagtgtttatttaggagaaaaggctttgaagcatgtgcctcaggaatgttatagctgtctttctcgtttctcaataaaaatattgagatgaaatgatgtcgtttcggagaatagagagccttggggactgggtgtgttatcctgaggtcggaggggaattggggacctgaagtttaaacagtgctctttctttctcaaggattcttgagggtatacagttgggggacagagtatcttaagtacagagaagtcgagtgacttaatagacagggagtgggggatgtggaacagggactgtgaagatttttaggattaaaaatttttcaaacacaagtttgaaaatacaagtctttttcttttgtatagcaaaagaatcatcaacctggggcctgtgcatcccggacctctgagtccagaaccccaacccatgggtgtcagggttatctgtggacattgcaagaatacttttctggtgaggaaggggtattgggaaggggaggggaaaggagactaagagtcatttcgagtatatttcttagagtaatggtaatgacccctgaaaggtctgtcctatgggaacatgttctgcatccccaccccaaggttctcattgagggagaccctgcttgtgctattatttttgttttctttctccatagtggacagagttcacagaccgcactttggcacgttgtcctcactgcaggaaagtgtcatctattgggcgcagatacccacgtaagagatgtatctgctgcttcttgcttggcttgcttttggcagtcactgccactggccttgccgtgagtacccttgccccaacctctttcattctgcagcctcatctccataggctaagatttgggaaactgctaccctaaaaaaaagtggaagaaacttgggggactagtttgttttgttttaagatatggatgagctaaagtgcaaagtggctgatcaaacagactttattactactacaagagtgaaaaacagccttcctttctctgtaggatgaggataggacagtgaaattcttaatttaagagttgctatttttcaaacctggctcagttgtcagatattaagaaaaactgagatacagtgtgggatgggatgagtatgttacgcctaagggaaggaagctgatcagctctgcctttaagaaggtccctgagggtggctacatgtggataaggaacaaggactgaagcgtgagttattactgttcttagaactaataggaggtagtggagaccaacattaaccccatctttcttttcttctccctccttatcttcatcagtttggcacatggaagcatgcacggcgatatggaggcatctatgcagcctgggcatttgtcatcctgttggctgtgctgtgtttgggccgggctctttattgggcctgtatgaaggtcagccaccctgtccagaacttctcctgagcctgatgacccacagactgtgcctggcccctccctggtggggacagtgacactacgaagggagctggggtagttaaaggctcccggggcttctagaaggaagccaagcagctgccttccttttccctggggagaggtaggaaggaaccaggccctcacttaggtttggaggggcagataagagcactgctgaccatctgctttcctccaagggttgctgtgtctagggtgaagtaggcaaaacgttgcccttaaaactgggccctgaagacggttccagccttgtccttcctgtgtgctccctgagagccattcctgtcccttacacattccagggcagggtgggggtgggtagccctgggggttcccctccctcttgtgcaccattaggactttgctgctgctattgcacttcaccagaggttggctctggcctcagtaccctcagtctcctctccccacattgtgtcctgtgggggtggggtcagccgctgctctgtacagaaccacaggaactgatgtgtatataactatttaatgtgggatatgttcccctattcctgtatttcccttaattcctcctcccgaccttttttacccccccagttgcagtatttaactgggctgggtagggttgctcagtctttgggggaggttagggacttatcctgtgcttgtaaataaataaggtcatgactctacgctt

SEQ ID NO: 9680 - protein, 87 aa, Homo sapiens
MVMTPERSVLWEHVLHPHPKVLIEGDPACAIIFVFFLHSGQSSQTALWHVVLTAGKCHLLGADTHVRDVSAASCLACFWQSLPLALP

SEQ ID NO: 9681 - DNA, 1514 bp, Homo sapiens
gcggtggcggtggcggcggtggcggtggctgcggcgacggcagaggcgaagggagccggatcgccgacctgagcccgggggaggcctgaccccctccgcaccaccgtacggagccgcatttcccccgtttcccgaggggcatccagccgtgttgcctggggaggacccacccccctattcacccttaactagcccggacagtgggagtgcccctatgatcacctgccgagtctgccaatctctcatcaacgtggaaggcaagatgcatcagcatgtagtcaaatgtggtgtctgcaatgaagccaccccaatcaagaatgcacccccagggaaaaaatatgttcgatgcccctgtaactgtctccttatctgcaaagtgacatcccaacggattgcatgccctcggccctactgcaaaagaatcatcaacctggggcctgtgcatcccggacctctgagtccagaaccccaacccatgggtgtcagggttatctgtggacattgcaagaatacttttctgtggacagagttcacagaccgcactttggcacgttgtcctcactgcaggaaagtgtcatctattgggcgcagatacccacgtaagagatgtatctgctgcttcttgcttggcttgcttttggcagtcactgccactggccttgcctttggcacatggaagcatgcacggcgatatggaggcatctatgcagcctgggcatttgtcatcctgttggctgtgctgtgtttgggccgggctctttattgggcctgtatgaaggtcagccaccctgtccagaacttctcctgagcctgatgacccacagactgtgcctggcccctccctggtggggacagtgacactacgaagggagctggggtagttaaaggctcccggggcttctagaaggaagccaagcagctgccttccttttccctggggagaggtaggaaggaaccaggccctcacttaggtttggaggggcagataagagcactgctgaccatctgctttcctccaagggttgctgtgtctagggtgaagtaggcaaaacgttgcccttaaaactgggccctgaagacggttccagccttgtccttcctgtgtgctccctgagagccattcctgtcccttacacattccagggcagggtgggggtgggtagccctgggggttcccctccctcttgtgcaccattaggactttgctgctgctattgcacttcaccagaggttggctctggcctcagtaccctcagtctcctctccccacattgtgtcctgtgggggtggggtcagccgctgctctgtacagaaccacaggaactgatgtgtatataactatttaatgtgggatatgttcccctattcctgtatttcccttaattcctcctcccgaccttttttacccccccagttgcagtatttaactgggctgggtagggttgctcagtctttgggggaggttagggacttatcctgtgcttgtaaataaataaggtcatgactctacgctt

SEQ ID NO: 9682 - protein, 197 aa, Homo sapiens
MITCRVCQSLINVEGKMHQHVVKCGVCNEATPIKNAPPGKKYVRCPCNCLLICKVTSQRIACPRPYCKRIINLGPVHPGPLSPEPQPMGVRVICGHCKNTFLWTEFTDRTLARCPHCRKVSSIGRRYPRKRCICCFLLGLLLAVTATGLAFGTWKHARRYGGIYAAWAFVILLAVLCLGRALYWACMKVSHPVQNFS

SEQ ID NO: 9683 - DNA, 1693 bp, Homo sapiens
cactggttgcggagtgagctgggcgcgcggcgcgcaggcgccctggggacccggtagcggcggtggcggtggcggcggtggcggtggctgcggcgacggcagaggcgaagggagccggatcgccgacctgagcgggaggcggcggtggcggccatggcggcagatggagagcgttccccgctgctgtctgagcccatcgacggtggcgcgggcggcaacggtttagtggggcccggcgggagtggggctgggcccgggggaggcctgaccccctccgcaccaccgtacggagccgcatttcccccgtttcccgaggggcatccagccgtgttgcctggggaggacccacccccctattcacccttaactagcccggacagtgggagtgcccctatgatcacctgccgagtctgccaatctctcatcaacgtggaaggcaagatgcatcagcatgtagtcaaatgtggtgtctgcaatgaagccaccccaatcaagaatgcacccccagggaaaaaatatgttcgatgcccctgtaactgtctccttatctgcaaagtgacatcccaacggattgcatgccctcggccctactgcaaaagaatcatcaacctggggcctgtgcatcccggacctctgagtccagaaccccaacccatgggtgtcagggttatctgtggacattgcaagaatacttttctgtggacagagttcacagaccgcactttggcacgttgtcctcactgcaggaaagtgtcatctattgggcgcagatacccacgtaagagatgtatctgctgcttcttgcttggcttgcttttggcagtcactgccactggccttgcctttggcacatggaagcatgcacggcgatatggaggcatctatgcagcctgggcatttgtcatcctgttggctgtgctgtgtttgggccgggctctttattgggcctgtatgaaggtcagccaccctgtccagaacttctcctgagcctgatgacccacagactgtgcctggcccctccctggtggggacagtgacactacgaagggagctggggtagttaaaggctcccggggcttctagaaggaagccaagcagctgccttccttttccctggggagaggtaggaaggaaccaggccctcacttaggtttggaggggcagataagagcactgctgaccatctgctttcctccaagggttgctgtgtctagggtgaagtaggcaaaacgttgcccttaaaactgggccctgaagacggttccagccttgtccttcctgtgtgctccctgagagccattcctgtcccttacacattccagggcagggtgggggtgggtagccctgggggttcccctccctcttgtgcaccattaggactttgctgctgctattgcacttcaccagaggttggctctggcctcagtaccctcagtctcctctccccacattgtgtcctgtgggggtggggtcagccgctgctctgtacagaaccacaggaactgatgtgtatataactatttaatgtgggatatgttcccctattcctgtatttcccttaattcctcctcccgaccttttttacccccccagttgcagtatttaactgggctgggtagggttgctcagtctttgggggaggttagggacttatcctgtgcttgtaaataaataaggtcatgactctacgctt

SEQ ID NO: 9684 - protein, 277 aa, Homo sapiens
MAADGERSPLLSEPIDGGAGGNGLVGPGGSGAGPGGGLTPSAPPYGAAFPPFPEGHPAVLPGEDPPPYSPLTSPDSGSAPMITCRVCQSLINVEGKMHQHVVKCGVCNEATPIKNAPPGKKYVRCPCNCLLICKVTSQRIACPRPYCKRIINLGPVHPGPLSPEPQPMGVRVICGHCKNTFLWTEFTDRTLARCPHCRKVSSIGRRYPRKRCICCFLLGLLLAVTATGLAFGTWKHARRYGGIYAAWAFVILLAVLCLGRALYWACMKVSHPVQNFS

SEQ ID NO: 9685 - DNA, 405 bp, Homo sapiens
agcttgggatcttctgagcggggagaaaatggacggtggggaacagtagacaaagttagctgttctactcaaagaagtacctttaaaaagtcagagtaatgaggtaccagaaggaaatggattaaaaagttaagattatcactccagcctttgtcgctagagtcactttcaggacaggacacaagactgggttttcctggaagctgtccttacagagccccgtctttccccattgctgatcaaattgttaaattatcttttcattagtgtctccactactagaagatttcatcgttttatttgatctcctgcctaagccttcccagtagctgggactacagggacaagccaccgtgcctttactcagttttatgaccaccaacctttaacatacgcacaagtttg

SEQ ID NO: 9686 - protein, 47 aa, Homo sapiens
SHFQDRTQDWVFLEAVLTEPRLSPLLIKLLNYLFISVSTTRRFHRFI

SEQ ID NO: 9687 - DNA, 1506 bp, Homo sapiens
aagccagagcctagaccagtgagccaactgtgcgaaccagacccggcagccttgctcagttcagcatagcggagcggatccgatcggatcggagcggatcggagcacaccggagcaggctcatcgagaaggcgtctgcgagaccatggagaacggatacacctatgaagattataagaacactgcagaatggcttctgtctcacactaagcaccgacctcaagttgcaataatctgtggttctggattaggaggtctgactgataaattaactcaggcccagatctttgactacggtgaaatccccaactttccccgaagtacagtgccaggtcatgctggccgactggtgtttgggttcctgaatggcagggcctgtgtgatgatgcagggcaggttccacatgtatgaagggtacccactctggaaggtgacattcccagtgagggttttccaccttctgggtgtggacaccctggtagtcaccaatgcagcaggagggctgaaccccaagtttgaggttggagatatcatgctgatccgtgaccatatcaacctacctggtttcagtggtcagaaccctctcagagggcccaatgatgaaaggtttggagatcgtttccctgccatgtctgatgcctacgaccggactatgaggcagagggctctcagtacctggaaacaaatgggggagcaacgtgagctacaggaaggcacctatgtgatggtggcaggccccagctttgagactgtggcagaatgtcgtgtgctgcagaagctgggagcagacgctgttggcatgagtacagtaccagaagttatcgttgcacggcactgtggacttcgagtctttggcttctcactcatcactaacaaggtcatcatggattatgaaagcctggagaaggccaaccatgaagaagtcttagcagctggcaaacaagctgcacagaaattggaacagtttgtctccattcttatggccagcattccactccctgacaaagccagttgacctgccttggagtcgtctggcatctcccacacaagacccaagtagctgctaccttctttggccccttgctggagtcatgtgcctctgtccttaggttgtagcagaaaggaaaagattcctgtccttcacctttcccactttcttctaccagacccttctggtgccagatcctcttctcaaagctgggattacaggtgtgagcatagtgagaccttggcgctacaaaataaagctgttctcattcctgttctttcttacacaagagctggagcccgtgccctaccacacatctgtggagatgcccaggatttgactcgggccttagaactttgcatagcagctgctactagctctttgagataatacattccgaggggctcagttctgccttatctaaatcaccagagaccaaacaaggactaatccaatacctcttggattttatttaatgtcataatgttgtcagaataaagagaaagatgaaataatttc

SEQ ID NO: 9688 - protein, 289 aa, Homo sapiens
MENGYTYEDYKNTAEWLLSHTKHRPQVAIICGSGLGGLTDKLTQAQIFDYGEIPNFPRSTVPGHAGRLVFGFLNGRACVMMQGRFHMYEGYPLWKVTFPVRVFHLLGVDTLVVTNAAGGLNPKFEVGDIMLIRDHINLPGFSGQNPLRGPNDERFGDRFPAMSDAYDRTMRQRALSTWKQMGEQRELQEGTYVMVAGPSFETVAECRVLQKLGADAVGMSTVPEVIVARHCGLRVFGFSLITNKVIMDYESLEKANHEEVLAAGKQAAQKLEQFVSILMASIPLPDKAS

SEQ ID NO: 9689 - DNA, 2418 bp, Homo sapiens
aagccagagcctagaccagtgagccaactgtgcgaaccagacccggcagccttgctcagttcagcatagcggagcggatccgatcggatcggagcggatcggagcacaccggagcaggctcatcgagaaggcgtctgcgagaccatggagaacggatacacctatgaagattataagaacactgcagaatggcttctgtctcacactaagcaccgacctcaagttgcaataatctgtggttctggattaggaggtctgactgataaattaactcaggcccagatctttgactacggtgaaatccccaactttccccgaagtacagtgccaggtcatgctggccgactggtgtttgggttcctgaatggcagggcctgtgtgatgatgcagggcaggttccacatgtatgaagggtacccactctggaaggtgacattcccagtgagggttttccaccttctgggtgtggacaccctggtagtcaccaatgcagcaggagggctgaaccccaagtttgaggttggagatatcatgctgatccgtgaccatatcaacctacctggtttcagtggtcagaaccctctcagagggcccaatgatgaaaggtttggagatcgtttccctgccatgtctgatgcctacgaccggactatgaggcagagggctctcagtacctggaaacaaatgggggagcaacgtgagctacaggaaggcacctatgtgatggtggcaggccccagctttgagactgtggcagaatgtcgtgtgctgcagaagctgggagcagacgctgttggcatgagtacagtaccagaagttatcgttgcacggcactgtggacttcgagtctttggcttctcactcatcactaacaaggtcatcatggattatgaaagcctggagaaggccaaccatgaagaagtcttagcagctggcaaacaagctgcacagaaattggaacagtttgtctccattcttatggccagcattccactccctgacaaagccagttgacctgccttggagtcgtctggcatctcccacacaagacccaagtagctgctaccttctttggccccttgctggagtcatgtgcctctgtccttaggttgtagcagaaaggaaaagattcctgtccttcacctttcccactttcttctaccagacccttctggtgccagatcctcttctcaaagctgggattacaggtgtgagcatagtgagaccttggcgctacaaaataaagctgttctcattcctgttctttcttacacaagagctggagcccgtgccctaccacacatctgtggagatgcccaggatttgactcgggccttagaactttgcatagcagctgctactagctctttgagataatacattccgaggggctcagttctgccttatctaaatcaccagagaccaaacaaggactaatccaatacctcttggattttatttaatgtcataatgttgtcagaataaagagaaagatgaaataatttcatttttttgtgtaacttggtatggggctggggcacagaccaagattgacatgaaaggatgtgagatcgcatgtcttgtgtgactatctgcttctcagacaagcagttaggaactgagatgagatagtatgtgagggcagcaaaggatgaagaagggcaaaatgatgaaaggtgaggtggaaagaggttatgagatggtaaagaaaagttaacttctggcacttgattgccacttctgtcaggctggtcctgcctctctcccttgccttctgattgtttcatttcctgtttatttgatcatatctgaattagttcactggttagcctcttccttagttcccacttccttaccaaagccctaattatatttcctcttgtttgccttttctctcctactcttctctaacatctgcagccacactctccattcactccatgctgacaaggcagtggcaaacacttttctctgctgccagccactccactgttgactggattgctgccagccccaggcaaacctgtgaagttgtttcatactctgcttctctttgagtgcctccttctctccttcctcttcctttctgggctccagtctttctcttcacttgtgcttgtcagaacctccctgtgatactgcctccaggcatttcccccatgttggctcaccgcactattatctttgcttatcaacttgcattcagctggctggcatgtttcaaaaccacactgccctcccaggcctgtgtgccttttgagaaagaccagtgctggatgagcctctagtaatgacaacattttagttgttagtggtataatacggaagagatattttgcacaggctgctttggagaactttcaaattatcctttgtttggtaactgacctacttaactgcccaatacaaagaaaaagc

SEQ ID NO: 9690 - protein, 289 aa, Homo sapiens; identical to SEQ ID NO: 9688

SEQ ID NO: 9691 - DNA, 1070 bp, Homo sapiens
accagacccggcagccttgctcagttcagcatagcggagcggatccgatcggatcggagcggatcggagcacaccggagcaggctcatcgagaaggcgtctgcgagaccatggagaacggatacacctatgaagattataagaacactgcagaatggcttctgtctcacactaagcaccgacctcaagttgcaataatctgtggttctggattaggaggtctgactgataaattaactcaggcccagatctttgactacggtgaaatccccaactttccccgaagtacagtgccaggtcatgctggccgactggtgtttgggttcctgaatggcagggcctgtgtgatgatgcagggcaggttccacatgtatgaagggtacccactctggaaggtaagtcagagggataggtccggttggatctggaagaggcaggagagaactatctagcctctttcactacctagctatctgggctaggtggatttttggtcctctccttccttttctttcacgatgtatgtcatgcatttcagtgtagctgaattaatgaaattttgtaaatttttttcggattgtttgcttcgaaggtgacattcccagtgagggttttccaccttctgggtgtggacaccctggtagtcaccaatgcagcaggagggctgaaccccaagtttgaggttggagatatcatgctgatccgtgaccatatcaacctacctggtttcagtggtcagaaccctctcagagggcccaatgatgaaaggtatgtatgttactccgttttttttaggtgggtaggatttaaagacttctctaggagctgtgggagaatttttaaaattccgtttatgtgagataattcaacctgtgtcctaggtttggagatcgtttccctgccatgtctgatgcctacgaccggactatgaggcagagggctctcagtacctggaaacaaatgggggagcaacgtgagctacaggaaggcacctatgtgatggtggcaggccccagctttgagactgtggcagaatgtcgtgtgctgcagaagctgggagcagacgctgtt

SEQ ID NO: 9692 - protein, 113 aa, Homo sapiens [sequence omitted]

SEQ ID NO: 9693 - DNA, 2579 bp, Homo sapiens
cttgcatgcgttcaaattctttcccccttgttcagtagcctcttctttaagaagccagagtaagtatactatgagcttgcttgctggactgaggaggcaggtaattaagttagggcaatagataagaatacatgttttgagaactttgaaaaatttgaagaggtctataattactgcattcactgtactcactttattttgaaacagagtctcgctctgtcacccaggctcgagtgtagtgttgtgatctcggctcactgcaacctccacctcccaagttcaagagattctcccacctcagcctcccgagtagctgggattacaggcatgtgccaccacacctggctaatttttgtatttttagtagagatgaggtttcaccatgttggccagggtggtcttgaactcctggcctgttgatccgcctgtcttgggctcccgaagtgctgggactacaggtgtgagacaccgcacctggcctatttttaattttaatttttatagatttacaggggtacaatgcagttttgttatatggatatactgcgtggtggtgacgtctgtgctttagtgtaaccatcacctgagcagtgaacattgtacttattaggtaatttctcatccctcatccccatcccactttctcacctttccgagtccccagtgtctattatttcactctgtaggtccatatgtacacatttggttcccacttataagtgagaacatgtagtatttaatcttccatttctgagtatctactttttttgctcactttttactctctggcagtatggcttgtattatcttgaaatttctttaaaaagcccttccttctttgtgtgttcatgctgaacatgctgaacgcaccccatatctctaatcttgggttgtatttgtataattattagtaatgcctggctctctcaccagacttaaactttctgaaagcagagataataatgagtcttttacttaattacaacctaacattttgagcagagcgagtaactcacagtaggtgcttaatggatatgtgttgcatgaaaatataatcccattcatttctctttctgttttgtatacagtgccaggtcatgctggccgactggtgtttgggttcctgaatggcagggcctgtgtgatgatgcagggcaggttccacatgtatgaagggtacccactctggaaggtaagtcagagggataggtccggttggatctggaagaggcaggagagaactatctagcctctttcactacctagctatctgggctaggtggatttttggtcctctccttccttttctttcacgatgtatgtcatgcatttcagtgtagctgaattaatgaaattttgtaaatttttttcggattgtttgcttcgaaggtgacattcccagtgagggttttccaccttctgggtgtggacaccctggtagtcaccaatgcagcaggagggctgaaccccaagtttgaggttggagatatcatgctgatccgtgaccatatcaacctacctggtttcagtggtcagaaccctctcagagggcccaatgatgaaaggtatgtatgttactccgttttttttaggtgggtaggatttaaagacttctctaggagctgtgggagaatttttaaaattccgtttatgtgagataattcaacctgtgtcctaggtttggagatcgtttccctgccatgtctgatgcctacgaccggactatgaggcagagggctctcagtacctggaaacaaatgggggagcaacgtgagctacaggaaggcacctatgtgatggtggcaggccccagctttgagactgtggcagaatgtcgtgtgctgcagaagctgggagcagacgctgttggcatgagtacagtaccagaagttatcgttgcacggcactgtggacttcgagtctttggcttctcactcatcactaacaaggtcatcatggattatgaaagcctggagaaggccaaccatgaagaagtcttagcagctggcaaacaagctgcacagaaattggaacagtttgtctccattcttatggccagcattccactccctgacaaagccagttgacctgccttggagtcgtctggcatctcccacacaagacccaagtagctgctaccttctttggccccttgctggagtcatgtgcctctgtccttaggttgtagcagaaaggaaaagattcctgtccttcacctttcccactttcttctaccagacccttctggtgccagatcctcttctcaaagctgggattacaggtgtgagcatagtgagaccttggcgctacaaaataaagctgttctcattcctgttctttcttacacaagagctggagcccgtgccctaccacacatctgtggagatgcccaggatttgactcgggccttagaactttgcatagcagctgctactagctctttgagataatacattccgaggggctcagttctgccttatctaaatcaccagagaccaaacaaggactaatccaatacctcttggattttatttaatgtcataatgttgtcagaataaagagaaagatgaaataatttc

SEQ ID NO: 9694 - protein, 128 aa, Homo sapiens [sequence omitted]

SEQ ID NO: 9695 - DNA, 3491 bp, Homo sapiens
cttgcatgcgttcaaattctttcccccttgttcagtagcctcttctttaagaagccagagtaagtatactatgagcttgcttgctggactgaggaggcaggtaattaagttagggcaatagataagaatacatgttttgagaactttgaaaaatttgaagaggtctataattactgcattcactgtactcactttattttgaaacagagtctcgctctgtcacccaggctcgagtgtagtgttgtgatctcggctcactgcaacctccacctcccaagttcaagagattctcccacctcagcctcccgagtagctgggattacaggcatgtgccaccacacctggctaatttttgtatttttagtagagatgaggtttcaccatgttggccagggtggtcttgaactcctggcctgttgatccgcctgtcttgggctcccgaagtgctgggactacaggtgtgagacaccgcacctggcctatttttaattttaatttttatagatttacaggggtacaatgcagttttgttatatggatatactgcgtggtggtgacgtctgtgctttagtgtaaccatcacctgagcagtgaacattgtacttattaggtaatttctcatccctcatccccatcccactttctcacctttccgagtccccagtgtctattatttcactctgtaggtccatatgtacacatttggttcccacttataagtgagaacatgtagtatttaatcttccatttctgagtatctactttttttgctcactttttactctctggcagtatggcttgtattatcttgaaatttctttaaaaagcccttccttctttgtgtgttcatgctgaacatgctgaacgcaccccatatctctaatcttgggttgtatttgtataattattagtaatgcctggctctctcaccagacttaaactttctgaaagcagagataataatgagtcttttacttaattacaacctaacattttgagcagagcgagtaactcacagtaggtgcttaatggatatgtgttgcatgaaaatataatcccattcatttctctttctgttttgtatacagtgccaggtcatgctggccgactggtgtttgggttcctgaatggcagggcctgtgtgatgatgcagggcaggttccacatgtatgaagggtacccactctggaaggtaagtcagagggataggtccggttggatctggaagaggcaggagagaactatctagcctctttcactacctagctatctgggctaggtggatttttggtcctctccttccttttctttcacgatgtatgtcatgcatttcagtgtagctgaattaatgaaattttgtaaatttttttcggattgtttgcttcgaaggtgacattcccagtgagggttttccaccttctgggtgtggacaccctggtagtcaccaatgcagcaggagggctgaaccccaagtttgaggttggagatatcatgctgatccgtgaccatatcaacctacctggtttcagtggtcagaaccctctcagagggcccaatgatgaaaggtatgtatgttactccgttttttttaggtgggtaggatttaaagacttctctaggagctgtgggagaatttttaaaattccgtttatgtgagataattcaacctgtgtcctaggtttggagatcgtttccctgccatgtctgatgcctacgaccggactatgaggcagagggctctcagtacctggaaacaaatgggggagcaacgtgagctacaggaaggcacctatgtgatggtggcaggccccagctttgagactgtggcagaatgtcgtgtgctgcagaagctgggagcagacgctgttggcatgagtacagtaccagaagttatcgttgcacggcactgtggacttcgagtctttggcttctcactcatcactaacaaggtcatcatggattatgaaagcctggagaaggccaaccatgaagaagtcttagcagctggcaaacaagctgcacagaaattggaacagtttgtctccattcttatggccagcattccactccctgacaaagccagttgacctgccttggagtcgtctggcatctcccacacaagacccaagtagctgctaccttctttggccccttgctggagtcatgtgcctctgtccttaggttgtagcagaaaggaaaagattcctgtccttcacctttcccactttcttctaccagacccttctggtgccagatcctcttctcaaagctgggattacaggtgtgagcatagtgagaccttggcgctacaaaataaagctgttctcattcctgttctttcttacacaagagctggagcccgtgccctaccacacatctgtggagatgcccaggatttgactcgggccttagaactttgcatagcagctgctactagctctttgagataatacattccgaggggctcagttctgccttatctaaatcaccagagaccaaacaaggactaatccaatacctcttggattttatttaatgtcataatgttgtcagaataaagagaaagatgaaataatttcatttttttgtgtaacttggtatggggctggggcacagaccaagattgacatgaaaggatgtgagatcgcatgtcttgtgtgactatctgcttctcagacaagcagttaggaactgagatgagatagtatgtgagggcagcaaaggatgaagaagggcaaaatgatgaaaggtgaggtggaaagaggttatgagatggtaaagaaaagttaacttctggcacttgattgccacttctgtcaggctggtcctgcctctctcccttgccttctgattgtttcatttcctgtttatttgatcatatctgaattagttcactggttagcctcttccttagttcccacttccttaccaaagccctaattatatttcctcttgtttgccttttctctcctactcttctctaacatctgcagccacactctccattcactccatgctgacaaggcagtggcaaacacttttctctgctgccagccactccactgttgactggattgctgccagccccaggcaaacctgtgaagttgtttcatactctgcttctctttgagtgcctccttctctccttcctcttcctttctgggctccagtctttctcttcacttgtgcttgtcagaacctccctgtgatactgcctccaggcatttcccccatgttggctcaccgcactattatctttgcttatcaacttgcattcagctggctggcatgtttcaaaaccacactgccctcccaggcctgtgtgccttttgagaaagaccagtgctggatgagcctctagtaatgacaacattttagttgttagtggtataatacggaagagatattttgcacaggctgctttggagaactttcaaattatcctttgtttggtaactgacctacttaactgcccaatacaaagaaaaagc

SEQ ID NO: 9696 - protein, 128 aa, Homo sapiens [sequence omitted]

SEQ ID NO: 9697 - DNA, 1870 bp, Homo sapiens
atgatttttatcgaggatgacacccagaatatcagagagctggcatcttttctagcagagcaaaactcttccaagattgcagaagctgcccaaatcactcagttagaaagaacaagacataatgtggtaactcccccagagatcaatccatggactgaacccatggctatgcagggcctgaacagactttgtttatctggtgggcatgtgaacgacaaaaaccgtaggaaaaaagataatggcttctttgggacccacaagaaaagcattgttcagtattccttcccttctgctgttcccatgtctcgcatcccaagagagacctcatacctggaaagcctccatcccacagctgagctggattcttatatccagtcaactggagcagctgcaattgcagaattaaggaaaaactcatggctaaatgatcagatttgcaaaatccagatattcttatgggaatgtggttattggctaggggaatggaaagagggagtagagagtggaaaactggataaagttataggcaaaatgaagctgaatctggtgcagatctttttcatgttgctgatgctgctgctgggcctggggatgggcctggggttgggacttcatatggctacagcagtcttggaggagagtgatcaaccgctcaatgaattttggtccagtgactcacaggacaaagctgaggccactgaggagggagacggcacccaaaccacagaaacgctggtgcttagcaacaaagaagtggtgcaacctggctggccagaagatcccatcctcggtgaagatgaggttgggggtaacaagatgctcagagcctcagctctctttcagagcaacaaagactatcttaggcttgaccagacagatagagaatgcaatgatatgatggcacacaagatgaaggagcccagtcagagttgcatagcccagtatgcattcatccatgaggatctaaacacagtcaaagctgtctgtaacagtcctgtcattgcctgtgagctcaaggggggaaaatgtcacaaaagctcccgaccttttgatttgacattgtgcgagctgtcccaaccagaccaggtcactcctaactgcaattacctaacttctgttataaaaaagcacattattataacctgtaatgacatgaagcgccagttaccaactggacaatgaagcaactcatcatcttttttctcttcaccttctcctgttcctcttccttttttacttcttctttctcatatagttctcctgatcttaggtatcatgcagatggaattcttccttgccctatgggtcacccaacttgcattttgttcctaggattagagatggtaggataaggtgatgatgcctagtttctctaagctctctgcctctcctttcccttaccctggaaaggagtaagtgaagagctgctgtagtccgtactgtagtcctggccatccatttgtttcctgctctgctctgagtttgtctctggatgtggactggaagagtttagtgtatcctttacccatgttcttccctgctgcccaccctgagcctctacaacaatcacataagactcttgggttttgcacaactgcacttctctattgcggatgaagttaaagtgattctatctgtaatggcttctggaggaccatgtggaacaggcttccttttccgagcttggaaaaatttagggcctaggtatgggggtctgctggggaggtggtgtggtgctgtagagcaagatagaagatgggctggagcaagaatagaactcttttttcttgacccttcactgcccttttctctttcttcccaccttttactagcagcctccttgcttggcttcttgttttcatctcttacc

SEQ ID NO: 9698 - protein, 393 aa, Homo sapiens
MIFIEDDTQNIRELASFLAEQNSSKIAEAAQITQLERTRHNVVTPPEINPWTEPMAMQGLNRLCLSGGHVNDKNRRKKDNGFFGTHKKSIVQYSFPSAVPMSRIPRETSYLESLHPTAELDSYIQSTGAAAIAELRKNSWLNDQICKIQIFLWECGYWLGEWKEGVESGKLDKVIGKMKLNLVQIFFMLLMLLLGLGMGLGLGLHMATAVLEESDQPLNEFWSSDSQDKAEATEEGDGTQTTETLVLSNKEVVQPGWPEDPILGEDEVGGNKMLRASALFQSNKDYLRLDQTDRECNDMMAHKMKEPSQSCIAQYAFIHEDLNTVKAVCNSPVIACELKGGKCHKSSRPFDLTLCELSQPDQVTPNCNYLTSVIKKHIIITCNDMKRQLPTGQ

SEQ ID NO: 9699 - DNA, 2743 bp, Homo sapiens
tccagtctgtgggtcctgtcccatccatcctgacctgttccatctcagccccaggactcagtactgcggttgccaacactgctgccaggcatgatggatgggccacgttccgatgtgggccgttggggtggcaaccccttgcagccccctaccacgccatctccagagccagagccagagccagacggacgctctcgcagaggaggaggccgttccttctgggctcgctgctgtggctgctgttcatgccgaaatgcggcagatgacgactggggacctgaaccctctgactccaggggtcgagggtccagctctggcactcgaagacctggctcccggggctcagactcccgccggcctgtatcccggggcagcggtgtcaatgcagctggagatggcaccatccgagagggcatgctagtagtgaacggtgtggacttgctgagctcgcgctcggaccagaaccgccgagagcaccacacagacgagtatgagtacgacgagctgatagtgcgccgcgggcagcctttccatatgctcctcctcctgtcccggacctatgaatcctctgatcgcatcacccttgagttactcatcggaaacaaccccgaggtgggcaagggcacgcacgtgatcatcccagtgggcaaggggggcagtggaggctggaaagcccaggtggtcaaggccagtgggcagaatctgaacctgcgggtccacacttcccccaacgccatcatcggcaagtttcagttcacagtccgcacacaatcagacgctggggagttccagttgccctttgacccccgcaatgagatctacatcctcttcaacccctggtgcccagaggacattgtgtacgtggaccatgaggattggcggcaggagtatgttcttaatgagtctgggagaatttactacgggaccgaagcacagattggtgagcggacctggaactacggccagtttgaccacggggtgctggatgcctgcttatacatcctggaccggcgggggatgccatatggaggccgtggagacccagtcaatgtctcccgggtcatctctgccatggtgaactccctggatgacaatggagtcctgattgggaactggtctggtgattactcccgaggcaccaacccatcagcgtgggtgggcagcgtggagatcctgcttagctacctacgcacgggatattccgtcccctatggccagtgctgggtctttgctggcgtgaccaccacagtgctgcgctgcctgggtctggccacccgtactgtcaccaacttcaactccgcccacgacacagacacatcccttaccatggacatctacttcgacgagaacatgaagcccctggagcacctgaaccatgattctgtctggaacttccatgtgtggaacgactgctggatgaagaggccggatctgccctcgggctttgatgggtggcaggtggtggatgccacaccccaagagactagcagtggcatcttctgctgcggcccctgctctgtggagtccatcaagaatggcctggtctacatgaagtacgacacgcctttcatttttgctgaggtgaatagtgacaaggtgtactggcagcggcaggatgatggcagcttcaagattgtttatgtggaggagaaggccatcggcacactcattgtcacaaaggccatcagctccaacatgcgggaggacatcacctacctctataagcacccagaaggctcagacgcagagcggaaggcagtagagacagcagcagcccacggcagcaaacccaatgtgtatgccaaccggggctcagcggaggatgtggccatgcaggtggaggcacaggacgcggtgatggggcaggatctgatggtctctgtgatgctgatcaatcacagcagcagccgccgcacagtgaaactgcacctctacctctcagtcactttctatactggtgtcagtggtaccatcttcaaggagaccaagaaggaagtggagctggcaccaggggcctcggaccgtgtgaccatgccagtggcctacaaggaataccggccccatcttgtggaccagggggccatgctgctcaatgtctcaggccacgtcaaggagagcgggcaggtgctggccaagcagcacaccttccgtctgcgcaccccagacctctccctcacgttactgggagcagcagtggttggccaggagtgtgaagtacagattgtcttcaagaacccccttcccgtcaccctcaccaatgtcgtcttccggctcgaaggctctgggttacagaggcccaagatcctcaacgttggggacattggaggcaatgaaacagtgacactgcgccagtcgtttgtgcctgtgcgaccaggcccccgccagctcattgccagcttggacagcccacagctctcccaggtgcacggtgtcatccaggtggatgtggccccagcccctggggatgggggcttcttctcagacgctggaggtgacagtcacttaggagagaccatccctatggcatctcgaggtggagcttagccccgtgccaggagcaatgggactggagtcagatgagcaaggacattgccccaagataggggcacactacagagcagctccccaggagctcaggtggggagtccagggctcccggagggggagtccagggctcccggagagggagtcagtcttcacttgcactgggggaacagatgctaataaactgttttttaatgaa

SEQ ID NO: 9700 - protein, 817 aa, Homo sapiens; identical to SEQ ID NO: 1532

SEQ ID NO: 9701 - DNA, 674 bp, Homo sapiens
ctctgccatctggaacagctgctcttggtcacccatcttgacttgtcacacaatcgcctccgaaccctgccacctgcactggctgccctgcgctgccttgaggtaaagtacccatgtctccgtccctgtcacgggtggttcttttcctcttcctctccctcagaagtctgcccatcctacaaggagatgtgcaggaccctccaccccgaacaggtaactgcgtgccttccacctccatcacgcagcctgaccctgtgagcccctctgtgctctgtggacccgtcaccctgagctcctcagttgctgaaccatccctggctgacagcgcctgtcctgcctccctgccctccctgcccccaggtgctgcaggccagtgataatgccatagagtccctggacggcgtcaccaacctaccccggctgcaggagctgctactgtgcaacaaccgcctccagcagcctgcagtgctccagcctcttgcctcctgccccaggctggtcctcctcaacctgcagggtaacccgctgtgccaagcggtgggcatcttggagcaactggctgaactgctgccttcagttagcagcgtcctcacctaagaggccctgccccctacccttgccctttaacttattgggactgaataaagaatggagaggccctctcaggctaccaa

SEQ ID NO: 9702 - protein, 87 aa, Homo sapiens [sequence omitted]

SEQ ID NO: 9703 - DNA, 944 bp, Homo sapiens
gccgccaggagggctggtgccgggactccacgacagacgagcagctattcaggtggtgatagggaagcacaaaacaaggagaggggctctggactctgggcatcaggcagccagggcaggaggctggggcctcaaggagctgtttcagtctagatactgggaatgttgaccagtgcttcagggctgtgggcctcaactcctccccaccctgcccaccctcaggtgtgagctgtcagtggagaagtccacagtgctgcagtctgagctggaatcctgtaaggagctgcaggagctggagcctgagaataaatggtgcctgcttaccatcatcctgctgatgcgggcactggaccccctgctgtatgagaaggagaccctgcagtacttccagacctccaggccgtggaccccatgcgggcaacgtatctggatgacctgcgcagcaagttcttgctggagaatagcgtgctcaagatggagtatgccgaggtgcgtgtgctgcacctggctcacaaggatctgacagtgctctgccatctggaacagctgctcttggtcacccatcttgacttgtcacacaatcgcctccgaaccctgccacctgcactggctgccctgcgctgccttgaggtgctgcaggccagtgataatgccatagagtccctggacggcgtcaccaacctaccccggctgcaggagctgctactgtgcaacaaccgcctccagcagcctgcagtgctccagcctcttgcctcctgccccaggctggtcctcctcaacctgcagggtaacccgctgtgccaagcggtgggcatcttggagcaactggctgaactgctgccttcagttagcagcgtcctcacctaagaggccctgccccctacccttgccctttaacttattgggactgaataaagaatggagaggccctctcaggctaccaa

SEQ ID NO: 9704 - protein, 151 aa, Homo sapiens
MRATYLDDLRSKFLLENSVLKMEYAEVRVLHLAHKDLTVLCHLEQLLLVTHLDLSHNRLRTLPPALAALRCLEVLQASDNAIESLDGVTNLPRLQELLLCNNRLQQPAVLQPLASCPRLVLLNLQGNPLCQAVGILEQLAELLPSVSSVLT

SEQ ID NO: 9705 - DNA, 331 bp, Homo sapiens
gtctcctgaagagttggctgctctggtgaaggcagaactgggcttcctggagagctgcctgcgggtgaaccccaagtcttatggagctgctactgtgcaacaaccgcctccagcagcctgcagtgctccagcctcttgcctcctgccccaggctggtcctcctcaacctgcagggtaacccgctgtgccaagcggtgggcatcttggagcaactggctgaactgctgccttcagttagcagcgtcctcacctaagaggccctgccccctacccttgccctttaacttattgggactgaataaagaatggagaggccctctcaggctaccaa

SEQ ID NO: 9706 - protein, 57 aa, Homo sapiens
MELLLCNNRLQQPAVLQPLASCPRLVLLNLQGNPLCQAVGILEQLAELLPSVSSVLT

SEQ ID NO: 9707 - DNA, 2262 bp, Homo sapiens
gcagagtgcgctgcgtttcgatgagccgggacgtggcgccgctctagccagcgcctgggctctgtggcgggcgccgcagctccgcgtcccccgcgcctcctcccagcgcaggtgggtccgcccgcggggggcgggggtgcccgggagccgtgggacgggcgggtagcggcaacctttggggagcagagtggtccccaacgcccaggtgccccggctcgcgctctggcccgggcgaatcgggctataggaagggccacacggatggaagtcctagtccgggtgctcacctcttgtggaacgtgcaaagcctgtcccaggacctctttacactctgggggtctctgcccaggcacgcttgctgcttccggacacagctgtgggcggagctagtaggggcggggctacgtgattgacacttctctcctcagacttcaagggctaccactggacccttcccctgtcttgaaccctgagccggcaccatgcacggacgcctgaaggtgaagacgtcagaagagcaggcggaggccaaaaggctagagcgagagcagaagctgaagctataccagtcagccacccaggccgtattccagaagcgccaggctggtgagctggatgagtccgtgctggaactgacaagccagattctgggagccaaccctgattttgccaccctctggaactgccgacgagaggtgctccagcagctggagactcagaagtctcctgaagagttggctgctctggtgaaggcagaactgggcttcctggagagctgcctgcgggtgaaccccaagtcttatggtacctggcaccaccgatgctggctgctaggccgcctgcctgagcccaactggacccgagagctggagctctgtgcccgtttcctggaggtggatgagcggaactttcactgctgggactatcggcggtttgtggccacacaggcagccgtgccccctgcagaagagctagccttcactgacagcctcatcacccgaaacttctccaactactcttcctggcattaccgctcctgtctcttgccccagctgcacccccagccggattctggaccacaggggcgcctccctgaggatgtgctgctcaaagagctggagctggtgcagaatgccttcttcactgaccccaatgaccagagtgcctggttttatcaccgttggctcctaggccgagctgacccccaggatgcactgcgctgcctgcatgtgagccgggacgaggcctgtctgactgtctccttctctcggcccctcttagtgggctccaggatggagatcttgctgctcatggttgatgattctcccctgattgtggagtggaggaccccagatggcaggaaccggcccagccatgtctggctctgtgacctgcctgctgcctccctcaacgaccagttgccccaacatacatttcgcgtcatttggacagcaggcgatgtccagaaagaatgcgtgcttttaaaaggccgccaggagggctggtgccgggactccacgacagacgagcagctattcaggtgtgagctgtcagtggagaagtccacagtgctgcagtctgagctggaatcctgtaaggagctgcaggagctggagcctgagaataaatggtgcctgcttaccatcatcctgctgatgcgggcactggaccccctgctgtatgagaaggagaccctgcagtacttccagacctccaggccgtggaccccatgcgggcaacgtatctggatgacctgcgcagcaagttcttgctggagaatagcgtgctcaagatggagtatgccgaggtgcgtgtgctgcacctggctcacaaggatctgacagtgctctgccatctggaacagctgctcttggtcacccatcttgacttgtcacacaatcgcctccgaaccctgccacctgcactggctgccctgcgctgccttgaggtgctgcaggccagtgataatgccatagagtccctggacggcgtcaccaacctaccccggctgcaggagctgctactgtgcaacaaccgcctccagcagcctgcagtgctccagcctcttgcctcctgccccaggctggtcctcctcaacctgcagggtaacccgctgtgccaagcggtgggcatcttggagcaactggctgaactgctgccttcagttagcagcgtcctcacctaagaggccctgccccctacccttgccctttaacttattgggactgaataaagaatggagaggccctctcaggctaccaa

SEQ ID NO: 9708 - protein, 452 aa, Homo sapiens
MHGRLKVKTSEEQAEAKRLEREQKLKLYQSATQAVFQKRQAGELDESVLELTSQILGANPDFATLWNCRREVLQQLETQKSPEELAALVKAELGFLESCLRVNPKSYGTWHHRCWLLGRLPEPNWTRELELCARFLEVDERNFHCWDYRRFVATQAAVPPAEELAFTDSLITRNFSNYSSWHYRSCLLPQLHPQPDSGPQGRLPEDVLLKELELVQNAFFTDPNDQSAWFYHRWLLGRADPQDALRCLHVSRDEACLTVSFSRPLLVGSRMEILLLMVDDSPLIVEWRTPDGRNRPSHVWLCDLPAASLNDQLPQHTFRVIWTAGDVQKECVLLKGRQEGWCRDSTTDEQLFRCELSVEKSTVLQSELESCKELQELEPENKWCLLTIILLMRALDPLLYEKETLQYFQTSRPWTPCGQRIWMTCAASSCWRIACSRWSMPRCVCCTWLTRI

SEQ ID NO: 9709 - DNA, 1949 bp, Homo sapiens
gcctgcagagtgcgctgcgtttcgatgagccgggacgtggcgccgctctagccagcgcctgggctctgtggcgggcgccgcagctccgcgtcccccgcgcctcctcccagcgcagacttcaagggctaccactggacccttcccctgtcttgaaccctgagccggcaccatgcacggacgcctgaaggtgaagacgtcagaagagcaggcggaggccaaaaggctagagcgagagcagaagctgaagctataccagtcagccacccaggccgtattccagaagcgccaggctggtgagctggatgagtccgtgctggaactgacaagccagattctgggagccaaccctgattttgccaccctctggaactgccgacgagaggtgctccagcagctggagactcagaagtctcctgaagagttggctgctctggtgaaggcagaactgggcttcctggagagctgcctgcgggtgaaccccaagtcttatggtacctggcaccaccgatgctggctgctaggccgcctgcctgagcccaactggacccgagagctggagctctgtgcccgtttcctggaggtggatgagcggaactttcactgctgggactatcggcggtttgtggccacacaggcagccgtgccccctgcagaagagctagccttcactgacagcctcatcacccgaaacttctccaactactcttcctggcattaccgctcctgtctcttgccccagctgcacccccagccggattctggaccacaggggcgcctccctgaggatgtgctgctcaaagagctggagctggtgcagaatgccttcttcactgaccccaatgaccagagtgcctggttttatcaccgttggctcctaggccgagctgacccccaggatgcactgcgctgcctgcatgtgagccgggacgaggcctgtctgactgtctccttctctcggcccctcttagtgggctccaggatggagatcttgctgctcatggttgatgattctcccctgattgtggagtggaggaccccagatggcaggaaccggcccagccatgtctggctctgtgacctgcctgctgcctccctcaacgaccagttgccccaacatacatttcgcgtcatttggacagcaggcgatgtccagaaagaatgcgtgcttttaaaaggccgccaggagggctggtgccgggactccacgacagacgagcagctattcaggtgtgagctgtcagtggagaagtccacagtgctgcagtctgagctggaatcctgtaaggagctgcaggagctggagcctgagaataaatggtgcctgcttaccatcatcctgctgatgcgggcactggaccccctgctgtatgagaaggagaccctgcagtacttccagacctccaggccgtggaccccatgcgggcaacgtatctggatgacctgcgcagcaagttcttgctggagaatagcgtgctcaagatggagtatgccgaggtgcgtgtgctgcacctggctcacaaggatctgacagtgctctgccatctggaacagctgctcttggtcacccatcttgacttgtcacacaatcgcctccgaaccctgccacctgcactggctgccctgcgctgccttgaggtgctgcaggccagtgataatgccatagagtccctggacggcgtcaccaacctaccccggctgcaggagctgctactgtgcaacaaccgcctccagcagcctgcagtgctccagcctcttgcctcctgccccaggctggtcctcctcaacctgcagggtaacccgctgtgccaagcggtgggcatcttggagcaactggctgaactgctgccttcagttagcagcgtcctcacctaagaggccctgccccctacccttgccctttaacttattgggactgaataaagaatggagaggccctctcaggctaccaa

SEQ ID NO: 9710 - protein, 452 aa, Homo sapiens; identical to SEQ ID NO: 9708

SEQ ID NO: 9711 - DNA, 817 bp, Homo sapiens
tgcccgggagccgtgggacgggcgggtagcggcaacctttggggagcagagtggtccccaacgcccaggtgccccggctcgcgctctggcccgggcgaatcgggctataggaagggccacacgggcagccgtgccccctgcagaagagctagccttcactgacagcctcatcacccgaaacttctccaactactcttcctggcattaccgctcctgtctcttgccccagctgcacccccagccggattctggaccacaggggcgcctccctgaggatgtgctgctcaaagagctggagctggtgcagaatgccttcttcactgaccccaatgaccagagtgcctggttttatcaccgttggctcctaggccgagctgacccccaggatgcactgcgctgcctgcatgtgagccgggacgaggcctgtctgactgtctccttctctcggcccctcttagtgggctccaggatggagatcttgctgctcatggttgatgattctcccctgattgtggagtggaggaccccagatggcaggaaccggcccagccatgtctggctctgtgacctgcctgctgcctccctcaacgaccagttgccccaacatacatttcgcgtcatttggacagcaggcgatgtccagaaagaatgcgtgcttttaaaaggccgccaggagggctggtgccgggactccacgacagacgagcagctattcaggtggtgatagggaagcacaaaacaaggagaggggctctggactctgggcatcaggcagccagggcaggaggctggggcctcaaggagctgtttcagtcta

SEQ ID NO: 9712 - protein, 84 aa, Homo sapiens
MEILLLMVDDSPLIVEWRTPDGRNRPSHVWLCDLPAASLNDQLPQHTFRVIWTAGDVQKECVLLKGRQEGWCRDSTTDEQLFRW

SEQ ID NO: 9713 - DNA, 753 bp, Homo sapiens
gtttcgatgagccgggacgtggcgccgctctagccagcgcctgggctctgtggcgggcgccgcagctccgcgtcccccgcgcctcctcccagcgcagacttcaagggctaccactggacccttcccctgtcttgaaccctgagccggcaccatgcacggacgcctgaaggtgaagacgtcagaagagcaggcggaggccaaaaggctagagcgagagcagaagctgaagctataccagtcagccacccaggccgtattccagaagcgccaggctggtgagctggatgagtccgtgctggaactgacaagccagattctgggagccaaccctgattttgccaccctctggaactgccgacgagaggtgctccagcagctggagactcagaagtctcctgaagagttggctgctctggtgaaggcagaactgggcttcctggagagctgcctgcgggtgaaccccaagtcttatggtacctggcaccaccgatgctggctgctaggccgcctgcctgagcccaactggacccgagagctggagctctgtgcccgtttcctggaggtggatgagcggaactctgcacccccagccggattctggaccacaggggcgcctccctgaggatgtgctgctcaaaggtttattgagcacctacttcatgcgtggctccaggggtgcttaagaatcagtccctggctgaaggaagcttaagtgtctgatggggaagataaaactgacatacgtagcccctg

SEQ ID NO: 9714 - protein, 156 aa, Homo sapiens
MHGRLKVKTSEEQAEAKRLEREQKLKLYQSATQAVFQKRQAGELDESVLELTSQILGANPDFATLWNCRREVLQQLETQKSPEELAALVKAELGFLESCLRVNPKSYGTWHHRCWLLGRLPEPNWTRELELCARFLEVDERNSAPPAGFWTTGAPP

SEQ ID NO: 9715 - DNA, 804 bp, Homo sapiens
cgccgcagctccgcgtcccccgcgcctcctcccagcgcagacttcaagggctaccactggacccttcccctgtcttgaaccctgagccggcaccatggtcagcttctgcaaggcaacctgcactcttccaacccgttcatccttgtagcacggacgcctgaaggtgaagacgtcagaagagcaggcggaggccaaaaggctagagcgagagcagaagctgaagctataccagtcagccacccaggccgtattccagaagcgccaggctggtgagctggatgagtccgtgctggaactgacaagccagattctgggagccaaccctgattttgccaccctctggaactgccgacgagaggtgctccagcagctggagactcagaagtctcctgaagagttggctgctctggtgaaggcagaactgggcttcctggagagctgcctgcgggtgaaccccaagtcttatggtacctggcaccaccgatgctggctgctaggccgcctgcctgagcccaactggacccgagagctggagctctgtgcccgtttcctggaggtggatgagcggaactttcactgctgggactatcggcggtttgtggccacacaggcagccgtgccccctgcagaagagctagccttcactgacagcctcatcacccgaaacttctccaactactcttcctggcattaccgctcctgtctcttgccccagctgcacccccagccggattctggaccacaggggcgcctccctgaggatgtgctgctcaaaggtttattgagcacctacttcatgcgtgg

SEQ ID NO: 9716 - protein, 64 aa, Homo sapiens
TLSRHHGQLLQGNLHSSNPFILVARTPEGEDVRRAGGGQKARARAEAEAIPVSHPGRIPEAPGW

SEQ ID NO: 9717 - DNA, 281 bp, Homo sapiens
actagctccgcccacagctgtgtccggaagcagcaagcgtgcctgggcagagacccccagagtgtaaagaggtcctgggacaggctttgcacgttccacaagagtgtctcgctgtgtcgtctagactggagtgcagtggtgtgatcatggctcaactcctaggctcaagcgatcctcctgcctcagcctccggagtagctgctgggactgcaggaacgtgccaccatgcctggctcaaacacaaagttttttcataaaactcacttggcggcaaaattcta

SEQ ID NO: 9718 - protein, 36 aa, Homo sapiens
MAQLLGSSDPPASASGVAAGTAGTCHHAWLKHKVFS

SEQ ID NO: 9719 - DNA, 1224 bp, Homo sapiens
catatgtcctaagtggaaaggctgtctagctccaaagaccatgcacttgacccccacaccagctagcttagaaggtccaaacactatttggcactaccagatccttccacttagcaaagacagcagatcctggtgccagggcacagggctcacctggatgtggggaggagtggctctggcacctgccaatactttgggtcctacaggccctgcttgaggtctttggcctctttggtctttggtctttttctcctggaacagaagttgaaatggggaggagacctgggcagtgctcttggaaattaacccttcacttctctgcccctgtgtttcagttcaaatcagccttctcatctgcggaaaccacagaattgagtggcaaatgtgtggtggctttggcaacaggtgaagtttgggggcagctggtaataagaaagggcatggaggatgtgtagtgcggtagcatccagtgcccagatctggctcgggagttggttgaggaacatgtcattcttttctctgctttttgaggcccaaggggtcagcattcccagtttgaggtctgagagccttaggagcaggctcctgggaagtgtggaaaaagtccaaggcccaagagaaagagctctccagggatcctgagctccagggctctcagcagtgccctgtccaactgggcccaaaccttgtcactctgcatactcccctgcctgccatctccacctgtctgtgtgcccgcagatcccaatatcctgagcctgagtggtaaggtgctgccatcctgtgaccttgctcgacgctatggccttcgggatgtggacggccgccccgtccaagactatttgtctttgagctctgttctctcacacgtgtccggcctgggctggctggcctcctacctgccctccttcctccgtgtgcccaagtggattattgccctctacactagcaagttctaaccctcctggtctgacactacgtctctgcttgtcttctcatttggacttggtggttcgtcctgtctcagtgaaacagcagcctttcttgtttacccatacccttgatatgaagagaagccctctgctgtgtgtccgtggtgagttctggggtgcgcctaggtcccttctttgtgccttggttttccttgtccttctttttactttttgccttagtattgaaaaatgctcttggagctaataaaagtctcatttctctttcaatgtg

SEQ ID NO: 9720 - protein, 64 aa, Homo sapiens [sequence omitted]

SEQ ID NO: 9721 - DNA, 723 bp, Homo sapiens
ccagtggcataggagctgaggagtgtgacaagctggctgctgactgtgcccacgagctgcggcgccatggggtcagctgtgtgtctctgtggccggggattgtgcagacagaactgctgaaggagcatatggcaaaggaggaggtcctgcaggatcctgtgttgaagcagttcaaatcagccttctcatctgcggaaaccacagaattgagtggcaaatgtgtggtggctttggcaacagatcccaatatcctgagcctgagtggtaaggtgctgccatcctgtgaccttgctcgacgctatggccttcgggatgtggacggccgccccgtccaagactatttgtctttgagctctgttctctcacacgtgtccggcctgggctggctggcctcctacctgccctccttcctccgtgtgcccaagtggattattgccctctacactagcaagttctaaccctcctggtctgacactacgtctctgcttgtcttctcatttggacttggtggttcgtcctgtctcagtgaaacagcagcctttcttgtttacccatacccttgatatgaagagaagccctctgctgtgtgtccgtggtgagttctggggtgcgcctaggtcccttctttgtgccttggttttccttgtccttctttttactttttgccttagtattgaaaaatgctcttggagctaataaaagtctcatttctctttcaatgtg

SEQ ID NO: 9722 - protein, 109 aa, Homo sapiens [sequence omitted]

SEQ ID NO: 9723 - DNA, 1033 bp, Homo sapiens
ggcaaagctgcggtgaggacccagtggcataggagctgaggaggtaaaagacagtgatgttacctatagctcaggaggtacaatccccagtggtcagaatggtaaggctggctcctctcagctcctcctctgcctcatccatggacagttcctttgcttgtgctcctcttggttggctagagtaggcatcacactggggagcgtgggcagctgagaccttggggctcctgggaaggacagggtgggtggagcattcacagtagaagcagagagggcagggcaggaaagtgacatggctaggtggctcttaccctgccttccgcctctccacagtgtgacaagctggctgctgactgtgcccacgagctgcggcgccatggggtcagctgtgtgtctctgtggccggggattgtgcagacagaactgctgaaggagcatatggcaaaggaggaggtcctgcaggatcctgtgttgaagcagttcaaatcagccttctcatctgcggaaaccacagaattgagtggcaaatgtgtggtggctttggcaacagatcccaatatcctgagcctgagtggtaaggtgctgccatcctgtgaccttgctcgacgctatggccttcgggatgtggacggccgccccgtccaagactatttgtctttgagctctgttctctcacacgtgtccggcctgggctggctggcctcctacctgccctccttcctccgtgtgcccaagtggattattgccctctacactagcaagttctaaccctcctggtctgacactacgtctctgcttgtcttctcatttggacttggtggttcgtcctgtctcagtgaaacagcagcctttcttgtttacccatacccttgatatgaagagaagccctctgctgtgtgtccgtggtgagttctggggtgcgcctaggtcccttctttgtgccttggttttccttgtccttctttttactttttgccttagtattgaaaaatgctcttggagctaataaaagtctcatttctctttcaatgtg

SEQ ID NO: 9724 - protein, 109 aa, Homo sapiens [sequence omitted]

SEQ ID NO: 9725 - DNA, 1435 bp, Homo sapiens
gggctcatcgtggtcatctcctccccaggaagcctgcagtatatgttcaatgtcccctatggtgtgggcaaagctgcggtgaggacccagtggcataggagctgaggaggtaaaagacagtgatgttacctatagctcaggaggtacaatccccagtggtcagaatggtaaggctggctcctctcagctcctcctctgcctcatccatggacagttcctttgcttgtgctcctcttggttggctagagtaggcatcacactggggagcgtgggcagctgagaccttggggctcctgggaaggacagggtgggtggagcattcacagtagaagcagagagggcagggcaggaaagtgacatggctaggtggctcttaccctgccttccgcctctccacagtgtgacaagctggctgctgactgtgcccacgagctgcggcgccatggggtcagctgtgtgtctctgtggccggggattgtgcagacagaactgctgaaggagcatatggcaaaggaggaggtcctgcaggatcctgtgttgaagcagttcaaatcagccttctcatctgcggaaaccacagaattgagtggcaaatgtgtggtggctttggcaacaggtgaagtttgggggcagctggtaataagaaagggcatggaggatgtgtagtgcggtagcatccagtgcccagatctggctcgggagttggttgaggaacatgtcattcttttctctgctttttgaggcccaaggggtcagcattcccagtttgaggtctgagagccttaggagcaggctcctgggaagtgtggaaaaagtccaaggcccaagagaaagagctctccagggatcctgagctccagggctctcagcagtgccctgtccaactgggcccaaaccttgtcactctgcatactcccctgcctgccatctccacctgtctgtgtgcccgcagatcccaatatcctgagcctgagtggtaaggtgctgccatcctgtgaccttgctcgacgctatggccttcgggatgtggacggccgccccgtccaagactatttgtctttgagctctgttctctcacacgtgtccggcctgggctggctggcctcctacctgccctccttcctccgtgtgcccaagtggattattgccctctacactagcaagttctaaccctcctggtctgacactacgtctctgcttgtcttctcatttggacttggtggttcgtcctgtctcagtgaaacagcagcctttcttgtttacccatacccttgatatgaagagaagccctctgctgtgtgtccgtggtgagttctggggtgcgcctaggtcccttctttgtgccttggttttccttgtccttctttttactttttgccttagtattgaaaaatgctcttggagctaataaaagtctcatttctctttcaatgtg

SEQ ID NO: 9726 - protein, 53 aa, Homo sapiens [sequence omitted]

SEQ ID NO: 9727 - DNA, 2630 bp, Homo sapiens
cacacgcatactccccccactcgtctgttgttgttgttgttgttgttgttgttgttgttgttttgaggtggaatctcgctctgtcacccaggctagagtgcagtgtgcaatctcagctcactgcaacctctgcctcctgggttcaagcgattctcatacctcaacctcccgagtagctgggattacaggcacctgccaccacgcctggctaatttttgtatttttagtagagaacggggtttcaccgtgttggctgggctggtctcgaactcctgatctcaagtgatctacccacctcagcctcccaaagtgttgggattataggcatgagccaccatactcagcctcgccctgctctttatatacacagaaatatacatgtatctttgtatttgtgtgtgtatgtgtgtgtatcttaattttacgtcaaatctgtcagtcttttatagtttctgtcttggtgtgacgctaataaaagccttttccctcaagtttataaacacatttgatcatgttttctttcagtacttctgtgctttcgttttttatatttaaatatttgatccttttaggcttaattttaaaataataaacgaggcagagacccaattcccctaactcaaataactggtcggttgtcccaaatgatccaactttcccccactgatttgacaggttcctttcgtaatacattgcgttctcacatacacttgtatctaattattctctgttttgtttcattgacttatcagtctactgttaacacctgtattgcattcttttaactattatgtcttgtacattttaatttattttattttattttttagagacggggtcttgctgtgttggccaggctggtctcaaactcctgacctcaagcaattctcccatctcagcctcccaaaatgctgggattacaggcataagccaccatgcctggcccctgtgcattttaatatgggtgacagcaggggtagggaaagcaatccccctcacccacaagacattagtctttttagtccttttttcggaattttcctggctgttctctttctttttatttatttatttatttttgagacaatctcactctgtcagccaggctagagtgcagtggcacaatctcagcttactgcaacctccgcctcctgggctcaagagatcctcctgcctcaggctcccgagtagctgggactataggcacgtaccaccacacctggctaatttttgtatttttagtacagatgggctttcaccacgttggccaggctggtctcaaactcctgagctcaagtgatctgcccccctcgcctcccaaagtgctgggattgcaggcgtgagccaccgtgcccagcttttctggctgttctcacgtttattcttctcattgagctttagattattttatcaattcctccaaaaggtcttattgagctataatccaatttgactgaatctatggattgatttacatagaaatgatgatttacatgtcagttcttagctttgaaagattttgtctgtacttattgtcatggttttatagtttttctatgtagacactatacatttcttaagttttctccccctgaacaattttgtttgtaattgttattgtgacagggctcttgcgttccatttcttcttccaaagattgctgtttctcatctgtcagtggttattttgaccagttttcctctcagaatatggcctcaagcccctaattcctcaggtcgctaacccaccctgtgtagccttcctagtggacaacaaccaccagaaggcaggggaagccgccagaggctgtggcacccaggccagcactaacacggttcattccttcttcccttgccccaccttctagaggccactacttttgctcagtgtatggggcacggctgatggtaccagctggccaggggctcatcgtggtcatctcctccccaggaagcctgcagtatatgttcaatgtcccctatggtgtgggcaaagctgcgtgtgacaagctggctgctgactgtgcccacgagctgcggcgccatggggtcagctgtgtgtctctgtggccggggattgtgcagacagaactgctgaaggagcatatggcaaaggaggaggtcctgcaggatcctgtgttgaagcagatcccaatatcctgagcctgagtggtaaggtgctgccatcctgtgaccttgctcgacgctatggccttcgggatgtggacggccgccccgtccaagactatttgtctttgagctctgttctctcacacgtgtccggcctgggctggctggcctcctacctgccctccttcctccgtgtgcccaagtggattattgccctctacactagcaagttctaaccctcctggtctgacactacgtctctgcttgtcttctcatttggacttggtggttcgtcctgtctcagtgaaacagcagcctttcttgtttacccatacccttgatatgaagagaagccctctgctgtgtgtccgtggtgagttctggggtgcgcctaggtcccttctttgtgccttggttttccttgtccttctttttactttttgccttagtattgaaaaatgctcttggagctaataaaagtctcatttctctttcaatgtg

SEQ ID NO: 9728 - protein, 85 aa, Homo sapiens
MVPAGQGLIVVISSPGSLQYMFNVPYGVGKAACDKLAADCAHELRRHGVSCVSLWPGIVQTELLKEHMAKEEVLQDPVLKQIPIS

SEQ ID NO: 9729 - DNA, 1476 bp, Homo sapiens
agatagcccaggactctgcgtggacgcgccccgaggggctgccgcgccagattcccatatccaggcagccacactcagagggttgtagtagttgtccacctctggacagtcccactcagccccttcttcactctctgggcctcccaaaagacagtcagccttgtcctcaggcccgcacccagttgtcagcctctgactcctctcccctcaaaggattcttaccttggctcctcctcttagccctaacctgcctcctttgcctgtgagtcatggcagctcccatgaatggccaagtgtgtgtggtgactggtgcctccaggggtattggccgtggcattgccttgcagctctgcaaagcaggcgccacagtttacatcactggccgccatctggacacccttcgcgttgttgctcaggaggcacaatccctcgggggccaatgtgtgcctgtggtgtgcgattcaagccaggagagtgaagtgcgaagcctgtttgagcaagtggatcgggaacagcaagggcgtctagatgtgctggtcaacaatgcttatgcaggggtccagacgatcctgaacaccaggaataaggcattctgggaaacccctgcctccatgtgggatgatatcaacaacgtcggactcagaggccactacttttgctcagtgtatggggcacggctgatggtaccagctggccaggggctcatcgtggtcatctcctccccaggaagcctgcagtatatgttcaatgtcccctatggtgtgggcaaagctgcgtgtgacaagctggctgctgactgtgcccacgagctgcggcgccatggggtcagctgtgtgtctctgtggccggggattgtgcagacagaactgctgaaggagcatatggcaaaggaggaggtcctgcaggatcctgtgttgaagcagttcaaatcagccttctcatctgcggaaaccacagaattgagtggcaaatgtgtggtggctttggcaacagatcccaatatcctgagcctgagtggtaaggtgctgccatcctgtgaccttgctcgacgctatggccttcgggatgtggacggccgccccgtccaagactatttgtctttgagctctgttctctcacacgtgtccggcctgggctggctggcctcctacctgccctccttcctccgtgtgcccaagtggattattgccctctacactagcaagttctaaccctcctggtctgacactacgtctctgcttgtcttctcatttggacttggtggttcgtcctgtctcagtgaaacagcagcctttcttgtttacccatacccttgatatgaagagaagccctctgctgtgtgtccgtggtgagttctggggtgcgcctaggtcccttctttgtgccttggttttccttgtccttctttttactttttgccttagtattgaaaaatgctcttggagctaataaaagtctcatttctctttcaatgtg

SEQ ID NO: 9730 - protein, 313 aa, Homo sapiens; identical to SEQ ID NO: 1538

SEQ ID NO: 9731 - DNA, 1431 bp, Homo sapiens
agatcgctccgcccccatccgcaggttctaactttggcctgggactctgcccctctacctcagcacagaatcgccccgggtcctactacagaatcaatccttgaacactgcctccacgtcgccggctcaatctgggcgagaacccagacttccaccgcagccccgcaatctgcagacctcagcggcagcgcaggtggcagacctgcctcctttgcctgtgagtcatggcagctcccatgaatggccaagtgtgtgtggtgactggtgcctccaggggtattggccgtggcattgccttgcagctctgcaaagcaggcgccacagtttacatcactggccgccatctggacacccttcgcgttgttgctcaggaggcacaatccctcgggggccaatgtgtgcctgtggtgtgcgattcaagccaggagagtgaagtgcgaagcctgtttgagcaagtggatcgggaacagcaagggcgtctagatgtgctggtcaacaatgcttatgcaggggtccagacgatcctgaacaccaggaataaggcattctgggaaacccctgcctccatgtgggatgatatcaacaacgtcggactcagaggccactacttttgctcagtgtatggggcacggctgatggtaccagctggccaggggctcatcgtggtcatctcctccccaggaagcctgcagtatatgttcaatgtcccctatggtgtgggcaaagctgcgtgtgacaagctggctgctgactgtgcccacgagctgcggcgccatggggtcagctgtgtgtctctgtggccggggattgtgcagacagaactgctgaaggagcatatggcaaaggaggaggtcctgcaggatcctgtgttgaagcagttcaaatcagccttctcatctgcggaaaccacagaattgagtggcaaatgtgtggtggctttggcaacagatcccaatatcctgagcctgagtggtaaggtgctgccatcctgtgaccttgctcgacgctatggccttcgggatgtggacggccgccccgtccaagactatttgtctttgagctctgttctctcacacgtgtccggcctgggctggctggcctcctacctgccctccttcctccgtgtgcccaagtggattattgccctctacactagcaagttctaaccctcctggtctgacactacgtctctgcttgtcttctcatttggacttggtggttcgtcctgtctcagtgaaacagcagcctttcttgtttacccatacccttgatatgaagagaagccctctgctgtgtgtccgtggtgagttctggggtgcgcctaggtcccttctttgtgccttggttttccttgtccttctttttactttttgccttagtattgaaaaatgctcttggagctaataaaagtctcatttctctttcaatgtg

SEQ ID NO: 9732 - protein, 313 aa, Homo sapiens; identical to SEQ ID NO: 1538

SEQ ID NO: 9733 - DNA, 1258 bp, Homo sapiens
cgcaggttctaactttggcctgggactctgcccctctacctcagcacagaatcgccccgggtcctactacagaatcaatccttgaacactgcctccacgtcgccggctcaatctgggcgagaacccagacttccaccgcagccccgcaatctgcagacctcagcggcagcgcaggtggcagacctgcctcctttgcctgtgagtcatggcagctcccatgaatggccaagtgtgtgtggtgactggtgcctccaggggtattggccgtggcattgccttgcagctctgcaaagcaggcgccacagtttacatcactggccgccatctggacacccttcgcgttgttgctcaggaggcacaatccctcgggggccaatgtgtgcctgtggtgtgcgattcaagccaggagagtgaagtgcgaagcctgtttgagcaagtggatcgggaacagcaagggcgtctagatgtgctggtcaacaatgcttatgcaggggtccagacgatcctgaacaccaggaataaggcattctgggaaacccctgcctccatgtgggatgatatcaacaacgtcggactcaggaagcctgcagtatatgttcaatgtcccctatggtgtgggcaaagctgcggtgaggacccagtggcataggagctgaggaggtaaaagacagtgatgttacctatagctcaggaggtacaatccccagtggtcagaatggtaaggctggctcctctcagctcctcctctgcctcatccatggacagttcctttgcttgtgctcctcttggttggctagagtaggcatcacactggggagcgtgggcagctgagaccttggggctcctgggaaggacagggtgggtggagcattcacagtagaagcagagagggcagggcaggaaagtgacatggctaggtggctcttaccctgccttccgcctctccacagtgtgacaagctggctgctgactgtgcccacgagctgcggcgccatggggtcagctgtgtgtctctgtggccggggattgtgcagacagaactgctgaaggagcatatggcaaaggaggaggtcctgcaggatcctgtgttgaagcaggttggcaaggggagggcgaaggaagcagagaacaggggagtcggcctctgcatcctcaataacaagatcagatactcccactcaccaggtgcttactgtggcaggtgcagggctgagcatgggacacacattatttcctttaatcctgtaagggagatacc

SEQ ID NO: 9734 - protein, 147 aa, Homo sapiens
MAAPMNGQVCVVTGASRGIGRGIALQLCKAGATVYITGRHLDTLRVVAQEAQSLGGQCVPVVCDSSQESEVRSLFEQVDREQQGRLDVLVNNAYAGVQTILNTRNKAFWETPASMWDDINNVGLRKPAVYVQCPLWCGQSCGEDPVA

SEQ ID NO: 9735 - DNA, 934 bp, Homo sapiens
cgcaggttctaactttggcctgggactctgcccctctacctcagcacagaatcgccccgggtcctactacagaatcaatccttgaacactgcctccacgtcgccggctcaatctgggcgagaacccagacttccaccgcagccccgcaatctgcagacctcagcggcagcgcaggtggcagacctgcctcctttgcctgtgagtcatggcagctcccatgaatggccaagtgtgtgtggtgactggtgcctccaggggtattggccgtggcattgccttgcagctctgcaaagcaggcgccacagtttacatcactggccgccatctggacacccttcgcgttgttgctcaggaggcacaatccctcgggggccaatgtgtgcctgtggtgtgcgattcaagccaggagagtgaagtgcgaagcctgtttgagcaagtggatcgggaacagcaagggcgtctagatgtgctggtcaacaatgcttatgcaggggtccagacgatcctgaacaccaggaataaggcattctgggaaacccctgcctccatgtgggatgatatcaacaacgtcggactcagaggccactacttttgctcagtgtatggggcacggctgatggtaccagctggccaggggctcatcgtggtcatctcctccccaggaagcctgcagtatatgttcaatgtcccctatggtgtgggcaaagctgcggtgaggacccagtggcataggagctgaggaggtaaaagacagtgatgttacctatagctcaggaggtacaatccccagtggtcagaatggtaaggctggctcctctcagctcctcctctgcctcatccatggacagttcctttgcttgtgctcctcttggttggctagagtaggcatcacactggggagcgtgggcagctgagaccttggggctcctgggaa

SEQ ID NO: 9736 - protein, 177 aa, Homo sapiens
MAAPMNGQVCVVTGASRGIGRGIALQLCKAGATVYITGRHLDTLRVVAQEAQSLGGQCVPVVCDSSQESEVRSLFEQVDREQQGRLDVLVNNAYAGVQTILNTRNKAFWETPASMWDDINNVGLRGHYFCSVYGARLMVPAGQGLIVVISSPGSLQYMFNVPYGVGKAAVRTQWHRS

SEQ ID NO: 9737 - DNA, 609 bp, Homo sapiens
cccccatccgcaggttctaactttggcctgggactctgcccctctacctcagcacagaatcgccccgggtcctactacagaatcaatccttgaacactgcctccacgtcgccggctcaatctgggcgagaacccagacttccaccgcagccccgcaatctgcagacctcagcggcagcgcaggtggcagacctgcctcctttgcctgtgagtcatggcagctcccatgaatggccaagtgtgtgtggtgactggtgcctccaggggtattggccgtggcattgccttgcagctctgcaaagcaggcgccacagtttacatcactggccgccatctggacacccttcgcgttgttgctcaggaggtgagtgcttcctctgggaccacagttgcagaaaccacccgagagagcccttccacttaacagctcctttcctaatcccttacctgaaactataatactactcaacaagatgtgaatatttattcaaagtggaaattaaaaaccccgtaaataacttcaggtaaggtagaattttgccgccaagtgagttttatgaaaaaactttgtgtttgagccaggcatggtggcacgttcctgcagtcccag

SEQ ID NO: 9738 - protein, 69 aa, Homo sapiens [sequence omitted]

SEQ ID NO: 9739 - DNA, 6033 bp, Homo sapiens
aaactttgtctggataaggcgcacgcttggcgacgtcgaaggtccgtccgcagttaaggaagcttttgcagccggacaggtcgcgaagcacacatggggcagggtccgcgctctccacacaaggtggggcgccggttcccagctggtggcaaacgggggcgcggggccaaggggtcggggcgccccttaccaggccgtaagcggcaaccctggccgcctccggatgggcgctcggagccggctccagattcgcacccgcacctgagcccggaagctctgggatatttccgccgggcgctgtcagcattgaaagaggctcccgagactggggaagaacgagatctgatggtgcacaatataatgaaggaagtagagactcaggccctagctttgtccacgaacaggactggcagtgagatgctgcaggaactgttgggattcagtcccttgaaaccgctttgtcgcgtgtgggctgctctgcgctctaacttgcgcactgtggcctgtcaccgatgcggggtccatgtattacaaagtgctttgctacagctccctcgattgctggggagtgctgcagaggaggaggaggaggaggaggaggatggaaaggatggtcccacggagaccctggaggagctggtcctgggactagccgctgaggtgtgtgatgattttcttgtctactgtggagacacacatggcagcttcgtggtcagaactctgcttcaggtgttaggagggactattctggagtctgagagagccaggccccgtggttcccaatcatctgaagcacagaagaccccagctcaggaatgtaagccagctgattttgaagtccctgaaacctttttgaatcgccttcaggacctgagctcctcctttctgaaggacattgcagtgtttatcactgataagatctccagcttctgtcttcaagtggctttacaggttttacaccgcaaacttccccagttttgcgctcatctctgcaatgctgtgattggctacctgagtactcgcggttcctcagtagatggcagtcccctactgctatttctccgagatcagacgagttccagactcctggagcaggtcctgctggtgttggagcccccaagactccagagcctctttgaggagcacttgcaggggcagctgcagaccctggctgcacatcccattgccaacttccctttgcagcgcttactggatgcagtcactacccctgagctgctgtcccctgtgtttgaggagctgagccctgtcttggaagctgtattggcccagggccacccaggggtagtcattgccctggtgggggcctgtcgcagagttggggcctaccaagccaaggtcctacagctcttgttggaggcattccactgtgcagagccctcatcccggcaagtggcctgtgtgcctctctttgccactttgatggcttatgaggtgtactatggactgacggaggaggagggggcagtgcctgcagagcaccaggtggcaatggccgcagccagagccttgggggatgtgacagtccttgggtctctactgctccagcatctgctgcacttctccactcctggtcttgtacttcgaagtctgggtgccttgacgggaccacagcttctgtcccttgcccaaagtcccgctggctctcatgtgctcgatgccatcctgaccagcccctctgtgacgcgcaagctgcgccgccgtgtgctgcagaacctaaagggacaatatgtggctctggcctgtagtcgccatggcagccgtgtgctagatgccatctggagtggagcagccttgagggcccggaaggaaattgctgctgagcttggggagcagaaccaggagctgataagagaccctttcggccaccatgtggctcgaaatgtggccttgactaccttcctaaagcggcgagaggcttgggaacagcagcagggtgcggtggccaagcggaggcgggcattgaactccatacttgaagactgaggctttggatctgggactgggtgttgatgggggagggcaaaatggggtatccaccccatccctttcctggtttaaattggagtcagaagtcttagtggtaaatatttgatatttttattggaaatgtttttgttagtttgaggggaagggtatgaagacagatctcaaggtaaagtcagagagggctgtcatcagtatgctggggagtttagggacaggaggcattggtaggggattagatgtagcagcagtcaggctgggatcaagatgcctgggggacatcttgatcttggcctttcagggcaagtgggaggccagaaaggtggctaggaaagaacagcattcttcaggtaagggtatagacttgggatgtgaggcgttatgctgaaaggttctgtcacgaggggatcagaggacagtggggaaattgggtgggttatctagcctgtactgtctgcaggtcctgaaatttgatgctgtcatagtctttgcagtgggtcggttggaatgattctgggggcagaagctcagagccccttagtaggaatggaggcggcccttctgctgccactgctcagccccctccactgcatgacgaagggtggaggaaattcccagcaacatatggcccaggccttgcagcagtgtggaggtccaacgaaggagctccctgaatggcagagacaagaggaaatcagatgatttggaaaacttgggaggaagccatcaagctgggagatgaggactttccacaagcaagagctaactaggggtaggtgggtgcaagaggacgaattatggggactatccaactgtaggggatggggcagtatgacatgttgatttctgacctgagtactttctttgggccaagtccttgaaagtcacaactcatagagtagagcccgtagaatgtggctttgacattcaggctgccaaagaggtctcgagggttttgcttgtacacgtcaaaggtgaatcgggcgatgtccttgctgtgcttgggcctctcccgtcccaggccatatgacagcactccactctgtaggacacccttgtcagtgcagtagatcctcataccagacacccaccactaatctccatcagcactgggtcagaccctccctcgcttggactttctgtccactgtgtgacatccttgacaattccacaactcctcctgcacctggtccccaggatcagggttaagctagagaggaagcccgggaaagctctaaaggacaggcattggaagcagccccagtataggcctcttacccttgtagggctccagctctgaccagactgcaacaccatcaggcacgtgtcatcctccagcagctggaagaagtcctcactgtccactgcagttccatcctcctctagcaccagggttagcactccattcagcagtagggtctccaatgcctgcccaatggcaagaagcaagaagggcaggtcttatcccatgccccttccctctttagctgcccaacatccatcagttggctctagacattggtcgatgtcccactttgactttccggcactttgatacctcctaaaggttgcagctctccgtgttcttcagtttttgggggatcctagctagaggctgacctttttcctctttgctcctaccatgtcattggcatctccccttgctcccctccaagtcacttctggtttggaattggaaagcaagccaggttctcacgaagtccacccttctgtcttatctacaatgctgcacctcacttcccacaccctcaagagttctccagaagtgttttcagtaatagtgtttaacctttttgagtccttactctgtgccaggtatgaggactttacctacattatcctcttactcctttcaacaaccctaggaggtgatgtattattattgcctttttatagttgaagaaactgaggttttggtaggttgaacaacttcccaaggtttgacaggcaggaagtggcagaatcagaatttgaacttgatttgtcacacaaatcacctttccatactagcttctgaattctgtccctcgaactctccctatctcctgctaacccctgctcccatagaaaagctcactcggtggaaaatgaacaaattgaccagagctcattaggcccactccgctgcttttagccctcagagggaggggcagctgtgtgacttcagccctctgctccatcatcacaagttgccactgttgtggagccccttggctacccctgctataggaaccgaggaacttggcctacttactttggctagcagctcctggcgggtggcagctgtcaggcctttccggatggtccgcttgtgatcacagacacggaaaggtcgctggggtggtggagctgaggtccagaccctccgtccaaactccgagcttatattagatactgacctggtagttgagaagaaaagtcaagaaggggcgaggaggggcttggtgagtgtaaagggcatgatgagggtagagtggctagagggctagggagggagagatctaggtttatcgattagggatgagggagagaccatggagtgcaggtgggggcgggtggctcaggagcttgacaagcccactgtggagtggggagcaggagaggaaggggtactggttagtctcctaggggctgagtggagtattgttgccctgcctatatcccctaaaggtggagggtagagcggagggttagcagtcacctgagtaagtcactggggttcagagctgagaggtactccatggtggaccggagagttccttccctggaacttctgggctgggtggttctctcctgtgctggggctttagtggtgttttctgttacaaacctgggatctcagcccaggacaaggtgggaatgagtcaagcctggactctggcccccctgcctggccagtaagaagggcaaagtccaaggggagggatgagggaggggccagatggggtcctggaggaagaattgcctggcaaaagccattggagcttgtatgtgtgtctttggtgatgacatgtgttgtgagggtagatgggaaccatgtaaaaggatgaaatgtgacttctggtgtttttttatttctatggagggaatttctggggacggtttctggctctcaggctctgagaagctgcagtttatgagtggctctgtgtgtgctgccacctactggagaagccataagctgcagctttaggaaaagggaacccggggcagagtgtggggaagtgggatggcagcatggcagggctttggaaaatgagaggtgagactgtgtccaggaagggtgtaaggagaggatggatcctgatacatggattcaggatcattagggtcctgtctgggacactggccttcctgcttacctgctctttccttcctccttggtcggaggaggggctggctcactgctctggcttcattttccagagctgcctgctgcagtcacacttaggtcatcttctctcacttttctccttttgccgattagtggacgtgacagagatgtgaatggggcagggatgtcctttgatggcatcaagactttagcttctggtgcgctgtgtcccagctctgatttcagttgcagccgtgatggacagttgcatggaagctgagactctcactgacagtgaaaccctcaaatgaacacaatccctgctttcctgccaaggatccttgtagggtcccccagcttccccactttttttctgtgtcctgacaaagaaacacagagtaacttgattgccctgtgacctggccagttgcatttcccctgcaggcttgagcccaagccagagccttgaaaaggtattcaggttgttgcccaaaacactgaaaaaaactggccctggccctgaaccaaataccttgaaccctcgtaaactccataccctgacccccttgttttggatatacccaggtagaacaactctctctcactgtctgttgtgaggatacgctgtagcccactcattaagtacattctcctaataaatgctttggactgat

SEQ ID NO: 9740 - protein, 636 aa, Homo sapiens; identical to SEQ ID NO: 1540

SEQ ID NO: 9741 - DNA, 6613 bp, Homo sapiens
aaactttgtctggataaggcgcacgcttggcgacgtcgaaggtccgtccgcagttaaggaagcttttgcagccggacaggtcgcgaagcacacatggggcagggtccgcgctctccacacaaggtggggcgccggttcccagctggtggcaaacgggggcgcggggccaaggggtcggggcgccccttaccaggccgtaagcggcaaccctggccgcctccggatgggcgctcggagccggctccagattcgcacccgcacctgagcccggaagctctgggatatttccgccgggcgctgtcagcattgaaagaggctcccgagactggggaagaacgagatctgatggtgcacaatataatgaaggaagtagagactcaggccctagctttgtccacgaacaggactggcagtgagatgctgcaggaactgttgggattcagtcccttgaaaccgctttgtcgcgtgtgggctgctctgcgctctaacttgcgcactgtggcctgtcaccgatgcggggtccatgtattacaaagtgctttgctacagctccctcgattgctggggagtgctgcagaggaggaggaggaggaggaggaggatggaaaggatggtcccacggagaccctggaggagctggtcctgggactagccgctgaggtgtgtgatgattttcttgtctactgtggagacacacatggcagcttcgtggtcagaactctgcttcaggtgttaggagggactattctggagtctgagagagccaggccccgtggttcccaatcatctgaagcacagaagaccccagctcaggaatgtaagccagctgattttgaagtccctgaaacctttttgaatcgccttcaggacctgagctcctcctttctgaaggacattgcagtgtttatcactgataagatctccagcttctgtcttcaagtggctttacaggttttacaccgcaaacttccccagttttgcgctcatctctgcaatgctgtgattggctacctgagtactcgcggttcctcagtagatggcagtcccctactgctatttctccgagatcagacgagttccagactcctggagcaggtcctgctggtgttggagcccccaagactccagagcctctttgaggagcacttgcaggggcagctgcagaccctggctgcacatcccattgccaacttccctttgcagcgcttactggatgcagtcactacccctgagctgctgtcccctgtgtttgaggagctgagccctgtcttggaagctgtattggcccagggccacccaggggtagtcattgccctggtgggggcctgtcgcagagttggggcctaccaagccaaggtcctacagctcttgttggaggcattccactgtgcagagccctcatcccggcaagtggcctgtgtgcctctctttgccactttgatggcttatgaggtgtactatggactgacggaggaggagggggcagtgcctgcagagcaccaggtggcaatggccgcagccagagccttgggggatgtgacagtccttgggtctctactgctccagcatctgctgcacttctccactcctggtcttgtacttcgaagtctgggtgccttgacgggaccacagcttctgtcccttgcccaaagtcccgctggctctcatgtgctcgatgccatcctgaccagcccctctgtgacgcgcaagctgcgccgccgtgtgctgcagaacctaaagggacaatatgtggctctggcctgtagtcgccatggcagccgtgtgctagatgccatctggagtggagcagccttgagggcccggaaggaaattgctgctgagcttggggagcagaaccaggagctgataagagaccctttcggccaccatgtggctcgaaatgtggccttgactaccttcctaaagcggcgagaggcttgggaacagcagcagggtgcggtggccaagcggaggcgggcattgaactccatacttgaagactgaggctttggatctgggactgggtgttgatgggggagggcaaaatggggtatccaccccatccctttcctggtttaaattggagtcagaagtcttagtggtaaatatttgatatttttattggaaatgtttttgttagtttgaggggaagggtatgaagacagatctcaaggtaaagtcagagagggctgtcatcagtatgctggggagtttagggacaggaggcattggtaggggattagatgtagcagcagtcaggctgggatcaagatgcctgggggacatcttgatcttggcctttcagggcaagtgggaggccagaaaggtggctaggaaagaacagcattcttcaggtaagggtatagacttgggatgtgaggcgttatgctgaaaggttctgtcacgaggggatcagaggacagtggggaaattgggtgggttatctagcctgtactgtctgcaggtcctgaaatttgatgctgtcatagtctttgcagtgggtcggttggaatgattctgggggcagaagctcagagccccttagtaggaatggaggcggcccttctgctgccactgctcagccccctccactgcatgacgaagggtggaggaaattcccagcaacatatggcccaggccttgcagcagtgtggaggtccaacgaaggagctccctgaatggcagagacaagaggaaatcagatgatttggaaaacttgggaggaagccatcaagctgggagatgaggactttccacaagcaagagctaactaggggtaggtgggtgcaagaggacgaattatggggactatccaactgtaggggatggggcagtatgacatgttgatttctgacctgagtactttctttgggccaagtccttgaaagtcacaactcatagagtagagcccgtagaatgtggctttgacattcaggctgccaaagaggtctcgagggttttgcttgtacacgtcaaaggtgaatcgggcgatgtccttgctgtgcttgggcctctcccgtcccaggccatatgacagcactccactctgtaggacacccttgtcagtgcagtagatcctcataccagacacccaccactaatctccatcagcactgggtcagaccctccctcgcttggactttctgtccactgtgtgacatccttgacaattccacaactcctcctgcacctggtccccaggatcagggttaagctagagaggaagcccgggaaagctctaaaggacaggcattggaagcagccccagtataggcctcttacccttgtagggctccagctctgaccagactgcaacaccatcaggcacgtgtcatcctccagcagctggaagaagtcctcactgtccactgcagttccatcctcctctagcaccagggttagcactccattcagcagtagggtctccaatgcctgcccaatggcaagaagcaagaagggcaggtcttatcccatgccccttccctctttagctgcccaacatccatcagttggctctagacattggtcgatgtcccactttgactttccggcactttgatacctcctaaaggttgcagctctccgtgttcttcagtttttgggggatcctagctagaggctgacctttttcctctttgctcctaccatgtcattggcatctccccttgctcccctccaagtcacttctggtttggaattggaaagcaagccaggttctcacgaagtccacccttctgtcttatctacaatgctgcacctcacttcccacaccctcaagagttctccagaagtgttttcagtaatagtgtttaacctttttgagtccttactctgtgccaggtatgaggactttacctacattatcctcttactcctttcaacaaccctaggaggtgatgtattattattgcctttttatagttgaagaaactgaggttttggtaggttgaacaacttcccaaggtttgacaggcaggaagtggcagaatcagaatttgaacttgatttgtcacacaaatcacctttccatactagcttctgaattctgtccctcgaactctccctatctcctgctaacccctgctcccatagaaaagctcactcggtggaaaatgaacaaattgaccagagctcattaggcccactccgctgcttttagccctcagagggaggggcagctgtgtgacttcagccctctgctccatcatcacaagttgccactgttgtggagccccttggctacccctgctataggaaccgaggaacttggcctacttactttggctagcagctcctggcgggtggcagctgtcaggcctttccggatggtccgcttgtgatcacagacacggaaaggtcgctggggtggtggagctgaggtccagaccctccgtccaaactccgagcttatattagatactgacctggtagttgagaagaaaagtcaagaaggggcgaggaggggcttggtgagtgtaaagggcatgatgagggtagagtggctagagggctagggagggagagatctaggtttatcgattagggatgagggagagaccatggagtgcaggtgggggcgggtggctcaggagcttgacaagcccactgtggagtggggagcaggagaggaaggggtactggttagtctcctaggggctgagtggagtattgttgccctgcctatatcccctaaaggtggagggtagagcggagggttagcagtcacctgagtaagtcactggggttcagagctgagaggtactccatggtggaccggagagttccttccctggaacttctgggctgggtggttctctcctgtgctggggctttagtggtgttttctgttacaaacctgggatctcagcccaggacaaggtgggaatgagtcaagcctggactctggcccccctgcctggccagtaagaagggcaaagtccaaggggagggatgagggaggggccagatggggtcctggaggaagaattgcctggcaaaagccattggagcttgtatgtgtgtctttggtgatgacatgtgttgtgagggtagatgggaaccatgtaaaaggatgaaatgtgacttctggtgtttttttatttctatggagggaatttctggggacggtttctggctctcaggctctgagaagctgcagtttatgagtggctctgtgtgtgctgccacctactggagaagccataagctgcagctttaggaaaagggaacccggggcagagtgtggggaagtgggatggcagcatggcagggctttggaaaatgagaggtgagactgtgtccaggaagggtgtaaggagaggatggatcctgatacatggattcaggatcattagggtcctgtctgggacactggccttcctgcttacctgctctttccttcctccttggtcggaggaggggctggctcactgctctggcttcattttccagagctgcctgctgcagtcacacttaggtcatcttctctcacttttctccttttgccgattagtggacgtgacagagatgtgaatggggcagggatgtcctttgatggcatcaagactttagcttctggtgcgctgtgtcccagctctgatttcagttgcagccgtgatggacagttgcatggaagctgagactctcactgacagtgaaaccctcaaatgaacacaatccctgctttcctgccaaggatccttgtagggtcccccagcttccccactttttttctgtgtcctgacaaagaaacacagagtaacttgattgccctgtgacctggccagttgcatttcccctgcaggcttgagcccaagccagagccttgaaaaggtattcaggttgttgcccaaaacactgaaaaaaactggccctggccctgaaccaaataccttgaaccctcgtaaactccataccctgacccccttgttttggatatacccaggtagaacaactctctctcactgtctgttgtgaggatacgctgtagcccactcattaagtacattctcctaataaatgctttggactgatcaccctgccagtcttttgtcttgggcaatctatacttttctcagaggttcccaaggcctactgaagggacttaacatactcttaatggctttcctctctcttgttttaccttatgccctcacttcctgagttaacctcccaaatacaggatcacctgtacccaagcccttagctcaagaatacaggatcacctgtacccaagcccttagctcaagctctgctttggaagaacccaaactaagacagtgctcctggtgccctccccaagcaacctcaagttctggctgttacttgagcagaggcctttcttttcccttcccccagctctatccatctgccaggcccccctcaaatctcttcatttccaagttttgcttgacttttccaagaggagagggctgcttcttagtatgtccctactcatcctttcctttcttgtcttgtatcctggtgcagcctggtaatggggcctcttcatggttgtgtgtcatgactccctaaccattatgcctccatgcatcccctgttcctcctggaacctagcaccatgccttacatggaaaagctgtcattgacagcc

SEQ ID NO: 9742 - protein, 636 aa, Homo sapiens; identical to SEQ ID NO: 1540

SEQ ID NO: 9743 - DNA, 2108 bp, Homo sapiens
ggcgcacgcttggcgacgtcgaaggtccgtccgcagttaaggaagcttttgcagccggacaggtcgcgaagcacacatggggcagggtccgcgctctccacacaaggtggggcgccggttcccagctggtggcaaacgggggcgcggggccaaggggtcggggcgccccttaccaggccgtaagcggcaaccctggccgcctccggatgggcgctcggagccggctccagattcgcacccgcacctgagcccggaagctctgggatatttccgccgggcgctgtcagcattgaaagaggctcccgagactggggaagaacgagatctgatggtgcacaatataatgaaggaagtagagactcaggccctagctttgtccacgaacaggactggcagtgagatgctgcaggaactgttgggattcagtcccttgaaaccgctttgtcgcgtgtgggctgctctgcgctctaacttgcgcactgtggcctgtcaccgatgcggggtccatgtattacaaagtgctttgctacagctccctcgattgctggggagtgctgcagaggaggaggaggaggaggaggaggatggaaaggatggtcccacggagaccctggaggagctggtcctgggactagccgctgaggtgtgtgatgattttcttgtctactgtggagacacacatggcagcttcgtggtcagaactctgcttcaggtgttaggagggactattctggagtctgagagagccaggccccgtggttcccaatcatctgaagcacagaagaccccagctcaggaatgtaagccagctgattttgaagtccctgaaacctttttgaatcgccttcaggacctgagctcctcctttctgaaggacattgcagtgtttatcactgataagatctccagcttctgtcttcaagtggctttacaggttttacaccgcaaacttccccagttttgcgctcatctctgcaatgctgtgattggctacctgagtactcgcggttcctcagtagatggcagtcccctactgctatttctccgagatcagacgagttccagactcctggagcaggtcctgctggtgttggagcccccaagactccagagcctctttgaggagcacttgcaggggcagctgcagaccctggctgcacatcccattgccaacttccctttgcagcgcttactggatgcagtcactacccctgagctgctgtcccctgtgtttgaggagctgagccctgtcttggaagctgtattggcccagggccacccaggggtagtcattgccctggtgggggcctgtcgcagagttggggcctaccaagccaaggtcctacagctcttgttggaggcattccactgtgcagagccctcatcccggcaagtggcctgtgtgcctctctttgccactttgatggcttatgaggtgtactatggactgacggaggaggagggggcagtgcctgcagagcaccaggtggcaatggccgcagccagagccttgggggatgtgacagtccttgggtctctactgctccagcatctgctgcacttctccactcctggtcttgtacttcgaagtctgggtgccttgacgggaccacagcttctgtcccttgcccaaagtcccgctggctctcatgtgctcgatgccatcctgaccagcccctctgtgacgcgcaagctgcgccgccgtgtgctgcagaacctaaagggacaatatgtggctctggcctgtagtcgccatggcagccgtgtgctagatgccatctggagtggagcagccttgagggcccggaaggaaattgctgctgagcttggggagcagaaccaggagctgataagagaccctttcggccaccatgtggctcgaaatgtggccttgactaccttcctaaagcggcgagaggcttgggaacagcagcagggtgcggtggccaagcggaggcgggcattgaactccatacttgaagactgaggctttggatctgggactgggtgttgatgggggagggcaaaatggggtatccaccccatccctttcctggtttaaattggagtcagaagtcttagtggtaaatatttgatatttttattgg

SEQ ID NO: 9744 - protein, 636 aa, Homo sapiens; identical to SEQ ID NO: 1540

SEQ ID NO: 9745 - DNA, 1942 bp, Homo sapiens
ggcgcacgcttggcgacgtcgaaggtccgtccgcagttaaggaagcttttgcagccggacaggtcgcgaagcacacatggggcagggtccgcgctctccacacaaggtggggcgccggttcccagctggtggcaaacgggggcgcggggccaaggggtcggggcgccccttaccaggccgtaagcggcaaccctggccgcctccggatgggcgctcggagccggctccagattcgcacccgcacctgagcccggaagctctgggatatttccgccgggcgctgtcagcattgaaagaggctcccgagactggggaagaacgagatctgatggtgcacaatataatgaaggaagtagagactcaggccctagctttgtccacgaacaggactggcagtgagatgctgcaggaactgttgggattcagtcccttgaaaccgctttgtcgcgtgtgggctgctctgcgctctaacttgcgcactgtggcctgtcaccgatgcggggtccatgtattacaaagtgctttgctacagctccctcgattgctggggagtgctgcagaggaggaggaggaggaggaggaggatggaaaggatggtcccacggagaccctggaggagctggtcctgggactagccgctgaggtgtgtgatgattttcttgtctactgtggagacacacatggcagcttcgtggtcagaactctgcttcaggtgttaggagggactattctggagtctgagagagccaggccccgtggttcccaatcatctgaagcacagaagaccccagctcaggaatgtaagccagctgattttgaagtccctgaaacctttttgaatcgccttcaggacctgagctcctcctttctgaaggacattgcagtgtttatcactgataagatctccagcttctgtcttcaagtggctttacaggttttacaccgcaaacttccccagttttgcgctcatctctgcaatgctgtgattggctacctgagtactcgcggttcctcagtagatggcagtcccctactgctatttctccgagatcagacgagttccagactcctggagcaggtcctgctggtgttggagcccccaagactccagagcctctttgaggagcacttgcaggggcagctgcagaccctggctgcacatcccattgccaacttccctttgcagcgcttactggatgcagtcactacccctgagctgctgtcccctgtgtttgaggagctgagccctgtcttggaagctgtattggcccagggccacccaggggtagtcattgccctggtgggggcctgtcgcagagttggggcctaccaagccaaggtcctacagctcttgttggaggcattccactgtgcagagccctcatcccggcaagtggcctgtgtgcctctctttgccactttgatggcttatgaggtgtactatggactgacggaggaggagggggcagtgcctgcagagcaccaggtggcaatggccgcagccagagccttgggggatgtgacagtccttgggtctctactgctccagcatctgctgcacttctccactcctggtcttgtacttcgaagtctgggtgccttgacgggaccacagcttctgtcccttgcccaaaggcccggaaggaaattgctgctgagcttggggagcagaaccaggagctgataagagaccctttcggccaccatgtggctcgaaatgtggccttgactaccttcctaaagcggcgagaggcttgggaacagcagcagggtgcggtggccaagcggaggcgggcattgaactccatacttgaagactgaggctttggatctgggactgggtgttgatgggggagggcaaaatggggtatccaccccatccctttcctggtttaaattggagtcagaagtcttagtggtaaatatttgatatttttattgg

SEQ ID NO: 9746 - protein, 535 aa, Homo sapiens
MGQGPRSPHKVGRRFPAGGKRGRGAKGSGRPLPGRKRQPWPPPDGRSEPAPDSHPHLSPEALGYFRRALSALKEAPETGEERDLMVHNIMKEVETQALALSTNRTGSEMLQELLGFSPLKPLCRVWAALRSNLRTVACHRCGVHVLQSALLQLPRLLGSAAEEEEEEEEDGKDGPTETLEELVLGLAAEVCDDFLVYCGDTHGSFVVRTLLQVLGGTILESERARPRGSQSSEAQKTPAQECKPADFEVPETFLNRLQDLSSSFLKDIAVFITDKISSFCLQVALQVLHRKLPQFCAHLCNAVIGYLSTRGSSVDGSPLLLFLRDQTSSRLLEQVLLVLEPPRLQSLFEEHLQGQLQTLAAHPIANFPLQRLLDAVTTPELLSPVFEELSPVLEAVLAQGHPGVVIALVGACRRVGAYQAKVLQLLLEAFHCAEPSSRQVACVPLFATLMAYEVYYGLTEEEGAVPAEHQVAMAAARALGDVTVLGSLLLQHLLHFSTPGLVLRSLGALTGPQLLSLAQRPGRKLLLSLGSRTRS

SEQ ID NO: 9747 - DNA, 3879 bp, Homo sapiens
ggcgcacgcttggcgacgtcgaaggtccgtccgcagttaaggaagcttttgcagccggacaggtcgcgaagcacacatggggcagggtccgcgctctccacacaaggtggggcgccggttcccagctggtggcaaacgggggcgcggggccaaggggtcggggcgccccttaccaggccgtaagcggcaaccctggccgcctccggatgggcgctcggagccggctccagattcgcacccgcacctgagcccggaagctctgggatatttccgccgggcgctgtcagcattgaaagaggctcccgagactggggaagaacgagatctgatggtgcacaatataatgaaggaagtagagactcaggccctagctttgtccacgaacaggactggcagtgagatgctgcaggaactgttgggattcagtcccttgaaaccgctttgtcgcgtgtgggctgctctgcgctctaacttgcgcactgtggcctgtcaccgatgcggggtccatgtattacaaagtgctttgctacagctccctcgattgctggggagtgctgcagaggaggaggaggaggaggaggaggatggaaaggatggtcccacggagaccctggaggagctggtcctgggactagccgctgaggtgtgtgatgattttcttgtctactgtggagacacacatggcagcttcgtggtcagaactctgcttcaggtgttaggagggactattctggagtctgagagagccaggccccgtggttcccaatcatctgaagcacagaagaccccagctcaggaatgtaagccagctgattttgaagtccctgaaacctttttgaatcgccttcaggacctgagctcctcctttctgaaggacattgcagtgtttatcactgataagatctccagcttctgtcttcaagtggctttacaggttttacaccgcaaacttccccagttttgcgctcatctctgcaatgctgtgattggctacctgagtactcgcggttcctcagtagatggcagtcccctactgctatttctccgagatcagacgagttccagactcctggagcaggtcctgctggtgttggagcccccaagactccagagcctctttgaggagcacttgcaggggcagctgcagaccctggctgcacatcccattgccaacttccctttgcagcgcttactggatgcagtcactacccctgagctgctgtcccctgtgtttgaggagctgagccctgtcttggaagctgtattggcccagggccacccaggggtagtcattgccctggtgggggcctgtcgcagagttggggcctaccaagccaaggtcctacagctcttgttggaggcattccactgtgcagagccctcatcccggcaagtggcctgtgtgcctctctttgccactttgatggcttatgaggtgtactatggactgacggaggaggagggggcagtgcctgcagagcaccaggtggcaatggccgcagccagagccttgggggatgtgacagtccttgggtctctactgctccagcatctgctgcacttctccactcctggtcttgtacttcgaagtctgggtgccttgacgggaccacagcttctgtcccttgcccaaagtcccgctggctctcatgtgctcgatgccatcctgaccagcccctctgtgacgcgcaagctgcgccgccgtgtgctgcagaacctaaagggacaatatgtggctctggcctgtagtcgccatggcagccgtgtgctagatgccatctggagtggagcagccttgagggcccggaaggaaattgctgctgagcttggggagcagaaccaggagctgataagagaccctttcggccaccatgtggctcgaaatgtggccttgactaccttcctaaagcggcgagaggcttgggaacagcagcagggtgcggtggccaagcggaggcgggcattgaactccatacttgaagactgaggctttggatctgggactgggtgttgatgggggagggcaaaatggggtatccaccccatccctttcctggtttaaattggagtcagaagtcttagtggtaaatatttgatatttttattggaaatgtttttgttagtttgaggggaagggtatgaagacagatctcaaggtaaagtcagagagggctgtcatcagtatgctggggagtttagggacaggaggcattggtaggggattagatgtagcagcagtcaggctgggatcaagatgcctgggggacatcttgatcttggcctttcagggcaagtgggaggccagaaaggtggctaggaaagaacagcattcttcaggtaagggtatagacttgggatgtgaggcgttatgctgaaaggttctgtcacgaggggatcagaggacagtggggaaattgggtgggttatctagcctgtactgtctgcaggtcctgaaatttgatgctgtcatagtctttgcagtgggtcggttggaatgattctgggggcagaagctcagagccccttagtaggaatggaggcggcccttctgctgccactgctcagccccctccactgcatgacgaagggtggaggaaattcccagcaacatatggcccaggccttgcagcagtgtggaggtccaacgaaggagctccctgaatggcagagacaagaggaaatcagatgatttggaaaacttgggaggaagccatcaagctgggagatgaggactttccacaagcaagagctaactaggggtaggtgggtgcaagaggacgaattatggggactatccaactgtaggggatggggcagtatgacatgttgatttctgacctgagtactttctttgggccaagtccttgaaagtcacaactcatagagtagagcccgtagaatgtggctttgacattcaggctgccaaagaggtctcgagggttttgcttgtacacgtcaaaggtgaatcgggcgatgtccttgctgtgcttgggcctctcccgtcccaggccatatgacagcactccactctgtaggacacccttgtcagtgcagtagatcctcataccagacacccaccactaatctccatcagcactgggtcagaccctccctcgcttggactttctgtccactgtgtgacatccttgacaattccacaactcctcctgcacctggtccccaggatcagggttaagctagagaggaagcccgggaaagctctaaaggacaggcattggaagcagccccagtataggcctcttacccttgtagggctccagctctgaccagactgcaacaccatcaggcacgtgtcatcctccagcagctggaagaagtcctcactgtccactgcagttccatcctcctctagcaccagggttagcactccattcagcagtagggtctccaatgcctgcccaatggcaagaagcaagaagggcaggtcttatcccatgccccttccctctttagctgcctatatcccctaaaggtggagggtagagcggagggttagcagtcacctgagtaagtcactggggttcagagctgagaggtactccatggtggaccggagagttccttccctggaacttctgggctgggtggttctctcctgtgctggggctttagtggtgttttctgttacaaacctgggatctcagcccaggacaaggtgggaatgagtcaagcctggactctggcccccctgcctggccagtaagaagggcaaagtccaaggggagggatgagggaggggccagatggggtcctggaggaagaattgcctggcaaaagccattggagcttgtatgtgtgtctttggtgatgacatgtgttgtgagggtagatgggaaccatgtaaaaggatgaaatgtg

SEQ ID NO: 9748 - protein, 636 aa, Homo sapiens; identical to SEQ ID NO: 1540

SEQ ID NO: 9749 - DNA, 4831 bp, Homo sapiens
ggcgcacgcttggcgacgtcgaaggtccgtccgcagttaaggaagcttttgcagccggacaggtcgcgaagcacacatggggcagggtccgcgctctccacacaaggtggggcgccggttcccagctggtggcaaacgggggcgcggggccaaggggtcggggcgccccttaccaggccgtaagcggcaaccctggccgcctccggatgggcgctcggagccggctccagattcgcacccgcacctgagcccggaagctctgggatatttccgccgggcgctgtcagcattgaaagaggctcccgagactggggaagaacgagatctgatggtgcacaatataatgaaggaagtagagactcaggccctagctttgtccacgaacaggactggcagtgagatgctgcaggaactgttgggattcagtcccttgaaaccgctttgtcgcgtgtgggctgctctgcgctctaacttgcgcactgtggcctgtcaccgatgcggggtccatgtattacaaagtgctttgctacagctccctcgattgctggggagtgctgcagaggaggaggaggaggaggaggaggatggaaaggatggtcccacggagaccctggaggagctggtcctgggactagccgctgaggtgtgtgatgattttcttgtctactgtggagacacacatggcagcttcgtggtcagaactctgcttcaggtgttaggagggactattctggagtctgagagagccaggccccgtggttcccaatcatctgaagcacagaagaccccagctcaggaatgtaagccagctgattttgaagtccctgaaacctttttgaatcgccttcaggacctgagctcctcctttctgaaggacattgcagtgtttatcactgataagatctccagcttctgtcttcaagtggctttacaggttttacaccgcaaacttccccagttttgcgctcatctctgcaatgctgtgattggctacctgagtactcgcggttcctcagtagatggcagtcccctactgctatttctccgagatcagacgagttccagactcctggagcaggtcctgctggtgttggagcccccaagactccagagcctctttgaggagcacttgcaggggcagctgcagaccctggctgcacatcccattgccaacttccctttgcagcgcttactggatgcagtcactacccctgagctgctgtcccctgtgtttgaggagctgagccctgtcttggaagctgtattggcccagggccacccaggggtagtcattgccctggtgggggcctgtcgcagagttggggcctaccaagccaaggtcctacagctcttgttggaggcattccactgtgcagagccctcatcccggcaagtggcctgtgtgcctctctttgccactttgatggcttatgaggtgtactatggactgacggaggaggagggggcagtgcctgcagagcaccaggtggcaatggccgcagccagagccttgggggatgtgacagtccttgggtctctactgctccagcatctgctgcacttctccactcctggtcttgtacttcgaagtctgggtgccttgacgggaccacagcttctgtcccttgcccaaagtcccgctggctctcatgtgctcgatgccatcctgaccagcccctctgtgacgcgcaagctgcgccgccgtgtgctgcagaacctaaagggacaatatgtggctctggcctgtagtcgccatggcagccgtgtgctagatgccatctggagtggagcagccttgagggcccggaaggaaattgctgctgagcttggggagcagaaccaggagctgataagagaccctttcggccaccatgtggctcgaaatgtggccttgactaccttcctaaagcggcgagaggcttgggaacagcagcagggtgcggtggccaagcggaggcgggcattgaactccatacttgaagactgaggctttggatctgggactgggtgttgatgggggagggcaaaatggggtatccaccccatccctttcctggtttaaattggagtcagaagtcttagtggtaaatatttgatatttttattggaaatgtttttgttagtttgaggggaagggtatgaagacagatctcaaggtaaagtcagagagggctgtcatcagtatgctggggagtttagggacaggaggcattggtaggggattagatgtagcagcagtcaggctgggatcaagatgcctgggggacatcttgatcttggcctttcagggcaagtgggaggccagaaaggtggctaggaaagaacagcattcttcaggtaagggtatagacttgggatgtgaggcgttatgctgaaaggttctgtcacgaggggatcagaggacagtggggaaattgggtgggttatctagcctgtactgtctgcaggtcctgaaatttgatgctgtcatagtctttgcagtgggtcggttggaatgattctgggggcagaagctcagagccccttagtaggaatggaggcggcccttctgctgccactgctcagccccctccactgcatgacgaagggtggaggaaattcccagcaacatatggcccaggccttgcagcagtgtggaggtccaacgaaggagctccctgaatggcagagacaagaggaaatcagatgatttggaaaacttgggaggaagccatcaagctgggagatgaggactttccacaagcaagagctaactaggggtaggtgggtgcaagaggacgaattatggggactatccaactgtaggggatggggcagtatgacatgttgatttctgacctgagtactttctttgggccaagtccttgaaagtcacaactcatagagtagagcccgtagaatgtggctttgacattcaggctgccaaagaggtctcgagggttttgcttgtacacgtcaaaggtgaatcgggcgatgtccttgctgtgcttgggcctctcccgtcccaggccatatgacagcactccactctgtaggacacccttgtcagtgcagtagatcctcataccagacacccaccactaatctccatcagcactgggtcagaccctccctcgcttggactttctgtccactgtgtgacatccttgacaattccacaactcctcctgcacctggtccccaggatcagggttaagctagagaggaagcccgggaaagctctaaaggacaggcattggaagcagccccagtataggcctcttacccttgtagggctccagctctgaccagactgcaacaccatcaggcacgtgtcatcctccagcagctggaagaagtcctcactgtccactgcagttccatcctcctctagcaccagggttagcactccattcagcagtagggtctccaatgcctgcccaatggcaagaagcaagaagggcaggtcttatcccatgccccttccctctttagctgcctatatcccctaaaggtggagggtagagcggagggttagcagtcacctgagtaagtcactggggttcagagctgagaggtactccatggtggaccggagagttccttccctggaacttctgggctgggtggttctctcctgtgctggggctttagtggtgttttctgttacaaacctgggatctcagcccaggacaaggtgggaatgagtcaagcctggactctggcccccctgcctggccagtaagaagggcaaagtccaaggggagggatgagggaggggccagatggggtcctggaggaagaattgcctggcaaaagccattggagcttgtatgtgtgtctttggtgatgacatgtgttgtgagggtagatgggaaccatgtaaaaggatgaaatgtgacttctggtgtttttttatttctatggagggaatttctggggacggtttctggctctcaggctctgagaagctgcagtttatgagtggctctgtgtgtgctgccacctactggagaagccataagctgcagctttaggaaaagggaacccggggcagagtgtggggaagtgggatggcagcatggcagggctttggaaaatgagaggtgagactgtgtccaggaagggtgtaaggagaggatggatcctgatacatggattcaggatcattagggtcctgtctgggacactggccttcctgcttacctgctctttccttcctccttggtcggaggaggggctggctcactgctctggcttcattttccagagctgcctgctgcagtcacacttaggtcatcttctctcacttttctccttttgccgattagtggacgtgacagagatgtgaatggggcagggatgtcctttgatggcatcaagactttagcttctggtgcgctgtgtcccagctctgatttcagttgcagccgtgatggacagttgcatggaagctgagactctcactgacagtgaaaccctcaaatgaacacaatccctgctttcctgccaaggatccttgtagggtcccccagcttccccactttttttctgtgtcctgacaaagaaacacagagtaacttgattgccctgtgacctggccagttgcatttcccctgcaggcttgagcccaagccagagccttgaaaaggtattcaggttgttgcccaaaacactgaaaaaaactggccctggccctgaaccaaataccttgaaccctcgtaaactccataccctgacccccttgttttggatatacccaggtagaacaactctctctcactgtctgttgtgaggatacgctgtagcccactcattaagtacattctcctaataaatgctttggactgat

SEQ ID NO: 9750 - protein, 636 aa, Homo sapiens; identical to SEQ ID NO: 1540

SEQ ID NO: 9751 - DNA, 5411 bp, Homo sapiens
ggcgcacgcttggcgacgtcgaaggtccgtccgcagttaaggaagcttttgcagccggacaggtcgcgaagcacacatggggcagggtccgcgctctccacacaaggtggggcgccggttcccagctggtggcaaacgggggcgcggggccaaggggtcggggcgccccttaccaggccgtaagcggcaaccctggccgcctccggatgggcgctcggagccggctccagattcgcacccgcacctgagcccggaagctctgggatatttccgccgggcgctgtcagcattgaaagaggctcccgagactggggaagaacgagatctgatggtgcacaatataatgaaggaagtagagactcaggccctagctttgtccacgaacaggactggcagtgagatgctgcaggaactgttgggattcagtcccttgaaaccgctttgtcgcgtgtgggctgctctgcgctctaacttgcgcactgtggcctgtcaccgatgcggggtccatgtattacaaagtgctttgctacagctccctcgattgctggggagtgctgcagaggaggaggaggaggaggaggaggatggaaaggatggtcccacggagaccctggaggagctggtcctgggactagccgctgaggtgtgtgatgattttcttgtctactgtggagacacacatggcagcttcgtggtcagaactctgcttcaggtgttaggagggactattctggagtctgagagagccaggccccgtggttcccaatcatctgaagcacagaagaccccagctcaggaatgtaagccagctgattttgaagtccctgaaacctttttgaatcgccttcaggacctgagctcctcctttctgaaggacattgcagtgtttatcactgataagatctccagcttctgtcttcaagtggctttacaggttttacaccgcaaacttccccagttttgcgctcatctctgcaatgctgtgattggctacctgagtactcgcggttcctcagtagatggcagtcccctactgctatttctccgagatcagacgagttccagactcctggagcaggtcctgctggtgttggagcccccaagactccagagcctctttgaggagcacttgcaggggcagctgcagaccctggctgcacatcccattgccaacttccctttgcagcgcttactggatgcagtcactacccctgagctgctgtcccctgtgtttgaggagctgagccctgtcttggaagctgtattggcccagggccacccaggggtagtcattgccctggtgggggcctgtcgcagagttggggcctaccaagccaaggtcctacagctcttgttggaggcattccactgtgcagagccctcatcccggcaagtggcctgtgtgcctctctttgccactttgatggcttatgaggtgtactatggactgacggaggaggagggggcagtgcctgcagagcaccaggtggcaatggccgcagccagagccttgggggatgtgacagtccttgggtctctactgctccagcatctgctgcacttctccactcctggtcttgtacttcgaagtctgggtgccttgacgggaccacagcttctgtcccttgcccaaagtcccgctggctctcatgtgctcgatgccatcctgaccagcccctctgtgacgcgcaagctgcgccgccgtgtgctgcagaacctaaagggacaatatgtggctctggcctgtagtcgccatggcagccgtgtgctagatgccatctggagtggagcagccttgagggcccggaaggaaattgctgctgagcttggggagcagaaccaggagctgataagagaccctttcggccaccatgtggctcgaaatgtggccttgactaccttcctaaagcggcgagaggcttgggaacagcagcagggtgcggtggccaagcggaggcgggcattgaactccatacttgaagactgaggctttggatctgggactgggtgttgatgggggagggcaaaatggggtatccaccccatccctttcctggtttaaattggagtcagaagtcttagtggtaaatatttgatatttttattggaaatgtttttgttagtttgaggggaagggtatgaagacagatctcaaggtaaagtcagagagggctgtcatcagtatgctggggagtttagggacaggaggcattggtaggggattagatgtagcagcagtcaggctgggatcaagatgcctgggggacatcttgatcttggcctttcagggcaagtgggaggccagaaaggtggctaggaaagaacagcattcttcaggtaagggtatagacttgggatgtgaggcgttatgctgaaaggttctgtcacgaggggatcagaggacagtggggaaattgggtgggttatctagcctgtactgtctgcaggtcctgaaatttgatgctgtcatagtctttgcagtgggtcggttggaatgattctgggggcagaagctcagagccccttagtaggaatggaggcggcccttctgctgccactgctcagccccctccactgcatgacgaagggtggaggaaattcccagcaacatatggcccaggccttgcagcagtgtggaggtccaacgaaggagctccctgaatggcagagacaagaggaaatcagatgatttggaaaacttgggaggaagccatcaagctgggagatgaggactttccacaagcaagagctaactaggggtaggtgggtgcaagaggacgaattatggggactatccaactgtaggggatggggcagtatgacatgttgatttctgacctgagtactttctttgggccaagtccttgaaagtcacaactcatagagtagagcccgtagaatgtggctttgacattcaggctgccaaagaggtctcgagggttttgcttgtacacgtcaaaggtgaatcgggcgatgtccttgctgtgcttgggcctctcccgtcccaggccatatgacagcactccactctgtaggacacccttgtcagtgcagtagatcctcataccagacacccaccactaatctccatcagcactgggtcagaccctccctcgcttggactttctgtccactgtgtgacatccttgacaattccacaactcctcctgcacctggtccccaggatcagggttaagctagagaggaagcccgggaaagctctaaaggacaggcattggaagcagccccagtataggcctcttacccttgtagggctccagctctgaccagactgcaacaccatcaggcacgtgtcatcctccagcagctggaagaagtcctcactgtccactgcagttccatcctcctctagcaccagggttagcactccattcagcagtagggtctccaatgcctgcccaatggcaagaagcaagaagggcaggtcttatcccatgccccttccctctttagctgcctatatcccctaaaggtggagggtagagcggagggttagcagtcacctgagtaagtcactggggttcagagctgagaggtactccatggtggaccggagagttccttccctggaacttctgggctgggtggttctctcctgtgctggggctttagtggtgttttctgttacaaacctgggatctcagcccaggacaaggtgggaatgagtcaagcctggactctggcccccctgcctggccagtaagaagggcaaagtccaaggggagggatgagggaggggccagatggggtcctggaggaagaattgcctggcaaaagccattggagcttgtatgtgtgtctttggtgatgacatgtgttgtgagggtagatgggaaccatgtaaaaggatgaaatgtgacttctggtgtttttttatttctatggagggaatttctggggacggtttctggctctcaggctctgagaagctgcagtttatgagtggctctgtgtgtgctgccacctactggagaagccataagctgcagctttaggaaaagggaacccggggcagagtgtggggaagtgggatggcagcatggcagggctttggaaaatgagaggtgagactgtgtccaggaagggtgtaaggagaggatggatcctgatacatggattcaggatcattagggtcctgtctgggacactggccttcctgcttacctgctctttccttcctccttggtcggaggaggggctggctcactgctctggcttcattttccagagctgcctgctgcagtcacacttaggtcatcttctctcacttttctccttttgccgattagtggacgtgacagagatgtgaatggggcagggatgtcctttgatggcatcaagactttagcttctggtgcgctgtgtcccagctctgatttcagttgcagccgtgatggacagttgcatggaagctgagactctcactgacagtgaaaccctcaaatgaacacaatccctgctttcctgccaaggatccttgtagggtcccccagcttccccactttttttctgtgtcctgacaaagaaacacagagtaacttgattgccctgtgacctggccagttgcatttcccctgcaggcttgagcccaagccagagccttgaaaaggtattcaggttgttgcccaaaacactgaaaaaaactggccctggccctgaaccaaataccttgaaccctcgtaaactccataccctgacccccttgttttggatatacccaggtagaacaactctctctcactgtctgttgtgaggatacgctgtagcccactcattaagtacattctcctaataaatgctttggactgatcaccctgccagtcttttgtcttgggcaatctatacttttctcagaggttcccaaggcctactgaagggacttaacatactcttaatggctttcctctctcttgttttaccttatgccctcacttcctgagttaacctcccaaatacaggatcacctgtacccaagcccttagctcaagaatacaggatcacctgtacccaagcccttagctcaagctctgctttggaagaacccaaactaagacagtgctcctggtgccctccccaagcaacctcaagttctggctgttacttgagcagaggcctttcttttcccttcccccagctctatccatctgccaggcccccctcaaatctcttcatttccaagttttgcttgacttttccaagaggagagggctgcttcttagtatgtccctactcatcctttcctttcttgtcttgtatcctggtgcagcctggtaatggggcctcttcatggttgtgtgtcatgactccctaaccattatgcctccatgcatcccctgttcctcctggaacctagcaccatgccttacatggaaaagctgtcattgacagcc

SEQ ID NO: 9752 - protein, 636 aa, Homo sapiens; identical to SEQ ID NO: 1540

SEQ ID NO: 9753 - DNA, 2012 bp, Homo sapiens
cgcaccagaagctaaagtcttgatgccatcaaaggacatccctgccccattcacatctctgtcacgtccactaatcggcaaaaggagaaaagtgagagaagatgacctaagtgtgactgcagcaggcagctctggaaaatgaagccagagcagtgagccagcccctcctccgaccaaggaggaaggaaagagcaggtaagcaggaaggccagtgtcccagacaggaccctaatgatcctgaatccatgtatcaggatccatcctctccttacacccttcctggacacagtctcacctctcattttccaaagccctgccatgctgccatcccacttccccacactctgccccgggttcccttttcctaaagctgcagcttatggcttctccagtaggtggcagcacacacagagccactcataaactgcagcttctcagagcctgagagccagaaaccgtccccagaaattccctccatagaaataaaaaaacaccagaagtcacatttcatccttttacatggttcccatctaccctcacaacacatgtcatcaccaaagacacacatacaagctccaatggcttttgccaggcaattcttcctccaggaccccatctggcccctccctcatccctccccttggactttgcccttcttactggccaggcaggggggccagagtccaggcttgactcattcccaccttgtcctgggctgagatcccaggtttgtaacagaaaacaccactaaagccccagcacaggagagaaccacccagcccagaagttccagggaaggaactctccggtccaccatggagtacctctcagctctgaaccccagtgacttactcaggtcagtatctaatataagctcggagtttggacggagggtctggacctcagctccaccaccccagcgacctttccgtgtctgtgatcacaagcggaccatccggaaaggcctgacagctgccacccgccaggagctgctagccaaagcattggagaccctactgctgaatggagtgctaaccctggtgctagaggaggatggaactgcagtggacagtgaggacttcttccagctgctggaggatgacacgtgcctgatggtgttgcagtctggtcagagctggagccctacaaggagtggagtgctgtcatatggcctgggacgggagaggcccaagcacagcaaggacatcgcccgattcacctttgacgtgtacaagcaaaaccctcgagacctctttggcagcctgaatgtcaaagccacattctacgggctctactctatgagttgtgactttcaaggacttggcccaaagaaagtactcagggagctccttcgttggacctccacactgctgcaaggcctgggccatatgttgctgggaatttcctccacccttcgtcatgcagtggagggggctgagcagtggcagcagaagggccgcctccattcctactaaggggctctgagcttctgcccccagaatcattccaaccgacccactgcaaagactatgacagcatcaaatttcaggacctgcagacagtacaggctagataacccacccaatttccccactgtcctctgatcccctcgtgacagaacctttcagcataacgcctcacatcccaagtctatacccttacctgaagaatgctgttctttcctagccacctttctggcctcccacttgccctgaaaggccaagatcaagatgtcccccaggcatcttgatcccagcctgactgctgctacatctaatcccctaccaatgcctcctgtccctaaactccccagcatactgatgacagccctctctgactttaccttgagatctgtcttcatacccttcccctcaaactaacaaaaacatttccaataaaaatatcaaatatttaccactaagacttctgactccaatttaaaccaggaaagggatggggtggataccccattttgccctcccccatcaacacccagtcccagatccaaagcc

SEQ ID NO: 9754 - protein, 219 aa, Homo sapiens; identical to SEQ ID NO: 1542

SEQ ID NO: 9755 - DNA, 2324 bp, Homo sapiens
gccagcgctgcgaccgcctgcagaaggttgactgcgtggtagggggcccagagcaagccgaaggcaagcacgatggcgctcaccagccggcccacccgcgccccgtgccgcccggagccccagcgggcgccccgcagccgtgccagcgtcacgctgtagcagccgagcatcagcccgaaaggaagcacgaaagcggtcagagtctccaggctcaggtgggcggcggcgtggaccggcgacgggtggcacagctggcatacgcggtccctccacaggtggcggtagacggcggccgggacggcgagcaacagggcggccagccagaccgccagcagcaggcggcgggccagggccgggctgcgcagccgaggcgccaggaaggggcgggtgactgcgaggcagcgctgcaggctgagcaggccggtgagcagcacgctggcgtacatgctgagcgcgcacacgtagtacaccgccttgcagcccgcctggcccagcggccaggcctgccgggtcaggaaggccacaaagagcggcgtgagcagcagcaccgcgccgtcggccagcgccaggtgcagcacaagcgtggccgccagcggtcgcccccgtgcaggccgccagcccgccaagctccacaccacgaagccgttgccaggcagccccagcagcgccgccagcagcaggaaggctgtgcctgtggcccgcgaagtcttccagctcagcagtgtctcgttccctgggggacggtagcagaccgacatccttctgggcctacaggacacagaaaaaaagtggggaagctgggggaccctacaaggatccttggcaggaaagcagggattgtgttcatttgagggtttcactgtcagtgagagtctcagcttccatgcaactgtccatcacggctgcaactgaaatcagagctgggacacagcgcaccagaagctaaagtcttgatgccatcaaaggacatccctgccccattcacatctctgtcacgtccactaatcggcaaaaggagaaaagtgagagaagatgacctaagtgtgactgcagcaggcagctctggaaaatgaagccagagcagtgagccagcccctcctccgaccaaggaggaaggaaagagcagccccagcacaggagagaaccacccagcccagaagttccagggaaggaactctccggtccaccatggagtacctctcagctctgaaccccagtgacttactcaggtcagtatctaatataagctcggagtttggacggagggtctggacctcagctccaccaccccagcgacctttccgtgtctgtgatcacaagcggaccatccggaaaggcctgacagctgccacccgccaggagctgctagccaaagcattggagaccctactgctgaatggagtgctaaccctggtgctagaggaggatggaactgcagtggacagtgaggacttcttccagctgctggaggatgacacgtgcctgatggtgttgcagtctggtcagagctggagccctacaaggagtggagtgctgtcatatggcctgggacgggagaggcccaagcacagcaaggacatcgcccgattcacctttgacgtgtacaagcaaaaccctcgagacctctttggcagcctgaatgtcaaagccacattctacgggctctactctatgagttgtgactttcaaggacttggcccaaagaaagtactcagggagctccttcgttggacctccacactgctgcaaggcctgggccatatgttgctgggaatttcctccacccttcgtcatgcagtggagggggctgagcagtggcagcagaagggccgcctccattcctactaaggggctctgagcttctgcccccagaatcattccaaccgacccactgcaaagactatgacagcatcaaatttcaggacctgcagacagtacaggctagataacccacccaatttccccactgtcctctgatcccctcgtgacagaacctttcagcataacgcctcacatcccaagtctatacccttacctgaagaatgctgttctttcctagccacctttctggcctcccacttgccctgaaaggccaagatcaagatgtcccccaggcatcttgatcccagcctgactgctgctacatctaatcccctaccaatgcctcctgtccctaaactccccagcatactgatgacagccctctctgactttaccttgagatctgtcttcatacccttcccctcaaactaacaaaaacatttccaataaaaatatcaaatatttaccactaagacttctgactccaatttaaaccaggaaag

SEQ ID NO: 9756 - protein, 219 aa, Homo sapiens; identical to SEQ ID NO: 1542

SEQ ID NO: 9757 - DNA, 3865 bp, Homo sapiens
agcttcgccaaggccccttccggtggagccagcgctgcgaccgcctgcagaaggttgactgcgtggtagggggcccagagcaagccgaaggcaagcacgatggcgctcaccagccggcccacccgcgccccgtgccgcccggagccccagcgggcgccccgcagccgtgccagcgtcacgctgtagcagccgagcatcagcccgaaaggaagcacgaaagcggtcagagtctccaggctcaggtgggcggcggcgtggaccggcgacgggtggcacagctggcatacgcggtccctccacaggtggcggtagacggcggccgggacggcgagcaacagggcggccagccagaccgccagcagcaggcggcgggccagggccgggctgcgcagccgaggcgccaggaaggggcgggtgactgcgaggcagcgctgcaggctgagcaggccggtgagcagcacgctggcgtacatgctgagcgcgcacacgtagtacaccgccttgcagcccgcctggcccagcggccaggcctgccgggtcaggaaggccacaaagagcggcgtgagcagcagcaccgcgccgtcggccagcgccaggtgcagcacaagcgtggccgccagcggtcgcccccgtgcaggccgccagcccgccaagctccacaccacgaagccgttgccaggcagccccagcagcgccgccagcagcaggaaggctgtgcctgtggcccgcgaagtcttccagctcagcagtgtctcgttccctgggggacggtagcagaccgacatccttctgggcctacaggtgggtggaaggcgccacagagggcgttcaggggtggggcaaaaccccacctgtgatgcccgatgagaaggtgccatgcctcctccttacttccctgcagcctgcctcttttctgcctgggagtcctgacttccacgaggacccagaccccacctcaaacacaactccttcttggaacccagatcccctgctcccagtcagttgacctgccccactcctggcctccttcccagagctcagtggtaaacaggcataaagtcatcaccccaggctgtcactatctctaccaccactcctctagtctggcccctccttctttgtccagccccattctagcacatctgggcaaaactggatggtggggtgtaaagggacgtgcacagatctacttaccaagctgggagcaagcaggattgggggcctggagaagctgaaaggttaagcagcagtaggcgaggtgcctactcctgtcctgtgcctatcacatttgcagagggtgacccaaacaactcagtcccccacctgccttatccttgcctgtttccagtctcctggtccggctgagcccctggcctcctacctcctcccacctcttgcctcaggccctgccccagtcactccaccctcagggctctcaccgggctgtcaatgacagcttttccatgtaaggcatggtgctaggttccaggaggaacaggggatgcatggaggcataatggttagggagtcatgacacacaaccatgaagaggccccattaccaggctgcaccaggatacaagacaagaaaggaaaggatgagtagggacatactaagaagcagccctctcctcttggaaaagtcaagcaaaacttggaaatgaagagatttgaggggggcctggcagatggatagagctgggggaagggaaaagaaaggcctctgctcaagtaacagccagaacttgaggttgcttggggagggcaccaggagcactgtcttagtttgggttcttccaaagcagagcttgagctaagggcttgggtacaggtgatcctgtattcttgagctaagggcttgggtacaggtgatcctgtatttgggaggttaactcaggaagtgagggcataaggtaaaacaagagagaggaaagccattaagagtatgttaagtcccttcagtaggccttgggaacctctgagaaaagtatagattgcccaagacaaaagactggcagggtgatcagtccaaagcatttattaggagaatgtacttaatgagtgggctacagcgtatcctcacaacagacagtgagagagagttgttctacctgggtatatccaaaacaagggggtcagggtatggagtttacgagggttcaaggtatttggttcagggccagggccagtttttttcagtgttttgggcaacaacctgaataccttttcaaggctctggcttgggctcaagcctgcaggggaaatgcaactggccaggtcacagggcaatcaagttactctgtgtttctttgtcaggacacagaaaaaaagtggggaagctgggggaccctacaaggatccttggcaggaaagcagggattgtgttcatttgagggtttcactgtcagtgagagtctcagcttccatgcaactgtccatcacggctgcaactgaaatcagagctgggacacagcgcaccagaagctaaagtcttgatgccatcaaaggacatccctgccccattcacatctctgtcacgtccactaatcggcaaaaggagaaaagtgagagaagatgacctaagtgtgactgcagcaggcagctctggaaaatgaagccagagcagtgagccagcccctcctccgaccaaggaggaaggaaagagcagccccagcacaggagagaaccacccagcccagaagttccagggaaggaactctccggtccaccatggagtacctctcagctctgaaccccagtgacttactcaggtcagtatctaatataagctcggagtttggacggagggtctggacctcagctccaccaccccagcgacctttccgtgtctgtgatcacaagcggaccatccggaaaggcctgacagctgccacccgccaggagctgctagccaaagcattggagaccctactgctgaatggagtgctaaccctggtgctagaggaggatggaactgcagtggacagtgaggacttcttccagctgctggaggatgacacgtgcctgatggtgttgcagtctggtcagagctggagccctacaaggagtggagtgctgtcatatggcctgggacgggagaggcccaagcacagcaaggacatcgcccgattcacctttgacgtgtacaagcaaaaccctcgagacctctttggcagcctgaatgtcaaagccacattctacgggctctactctatgagttgtgactttcaaggacttggcccaaagaaagtactcagggagctccttcgttggacctccacactgctgcaaggcctgggccatatgttgctgggaatttcctccacccttcgtcatgcagtggagggggctgagcagtggcagcagaagggccgcctccattcctactaaggggctctgagcttctgcccccagaatcattccaaccgacccactgcaaagactatgacagcatcaaatttcaggacctgcagacagtacaggctagataacccacccaatttccccactgtcctctgatcccctcgtgacagaacctttcagcataacgcctcacatcccaagtctatacccttacctgaagaatgctgttctttcctagccacctttctggcctcccacttgccctgaaaggccaagatcaagatgtcccccaggcatcttgatcccagcctgactgctgctacatctaatcccctaccaatgcctcctgtccctaaactccccagcatactgatgacagccctctctgactttaccttgagatctgtcttcatacccttcccctcaaactaacaaaaacatttccaataaaaatatcaaatatttaccactaagacttctgactccaatttaaaccaggaaag

SEQ ID NO: 9758 - protein, 219 aa, Homo sapiens; identical to SEQ ID NO: 1542

SEQ ID NO: 9759 - DNA, 1919 bp, Homo sapiens
cgcaccagaagctaaagtcttgatgccatcaaaggacatccctgccccattcacatctctgtcacgtccactaatcggcaaaaggagaaaagtgagagaagatgacctaagtgtgactgcagcaggcagctctggaaaatgaagccagagcagtgagccagcccctcctccgaccaaggaggaaggaaagagcaggtaagcaggaaggccagtgtcccagacaggaccctaatgatcctgaatccatgtatcaggatccatcctctccttacacccttcctggacacagtctcacctctcattttccaaagccctgccatgctgccatcccacttccccacactctgccccgggttcccttttcctaaagctgcagcttatggcttctccagtaggtggcagcacacacagagccactcataaactgcagcttctcagagcctgagagccagaaaccgtccccagaaattccctccatagaaataaaaaaacaccagaagtcacatttcatccttttacatggttcccatctaccctcacaacacatgtcatcaccaaagacacacatacaagctccaatggcttttgccaggcaattcttcctccaggaccccatctggcccctccctcatccctccccttggactttgcccttcttactggccaggcaggggggccagagtccaggcttgactcattcccaccttgtcctgggctgagatcccaggtttgtaacagaaaacaccactaaagccccagcacaggagagaaccacccagcccagaagttccagggaaggaactctccggtccaccatggagtacctctcagctctgaaccccagtgacttactcaggtcagtatctaatataagctcggagtttggacggagggtctggacctcagctccaccaccccagcgacctttccgtgtctgtgatcacaagcggaccatccggaaaggcctgacagctgccacccgccaggagctgctagccaaagcattggagaccctactgctgaatggagtgctaaccctggtgctagaggaggatggaactgcagtggacagtgaggacttcttccagctgctggaggatgacacgtgcctgatggtgttgcagtctggtcagagctggagccctacaaggagtggagtgctgtcatatggcctgggacgggagaggcccaagcacagcaaggacatcgcccgattcacctttgacgtgtacaagcaaaaccctcgagacctctttggcagcctgaatgtcaaagccacattctacgggctctactctatgagttgtgactttcaaggacttggcccaaagaaagtactcagggagctccttcgttggacctccacactgctgcaaggcctgggccatatgttgctgggaatttcctccacccttcgtcatgcagtggagggggctgagcagtggcagcagaagggccgcctccattcctactaaggggctctgagcttctgcccccagaatcattccaaccgacccactgcaaagactatgacagcatcaaatttcaggacctgcagacagtacaggctagataacccacccaatttccccactgtcctctgatcccctcgtgacagaacctttcagcataacgcctcacatcccaagtctatacccttacctgaagaatgctgttctttcctagccacctttctggcctcccacttgccctgaaaggccaagatcaagatgtcccccaggcatcttgatcccagcctgactgctgctacatctaatcccctaccaatgcctcctgtccctaaactccccagcatactgatgacagccctctctgactttaccttgagatctgtcttcatacccttcccctcaaactaacaaaaacatttccaataaaaatatcaaatatttaccact

SEQ ID NO: 9760 - protein, 219 aa, Homo sapiens; identical to SEQ ID NO: 1542

SEQ ID NO: 9761 - DNA, 2292 bp, Homo sapiens
gccagcgctgcgaccgcctgcagaaggttgactgcgtggtagggggcccagagcaagccgaaggcaagcacgatggcgctcaccagccggcccacccgcgccccgtgccgcccggagccccagcgggcgccccgcagccgtgccagcgtcacgctgtagcagccgagcatcagcccgaaaggaagcacgaaagcggtcagagtctccaggctcaggtgggcggcggcgtggaccggcgacgggtggcacagctggcatacgcggtccctccacaggtggcggtagacggcggccgggacggcgagcaacagggcggccagccagaccgccagcagcaggcggcgggccagggccgggctgcgcagccgaggcgccaggaaggggcgggtgactgcgaggcagcgctgcaggctgagcaggccggtgagcagcacgctggcgtacatgctgagcgcgcacacgtagtacaccgccttgcagcccgcctggcccagcggccaggcctgccgggtcaggaaggccacaaagagcggcgtgagcagcagcaccgcgccgtcggccagcgccaggtgcagcacaagcgtggccgccagcggtcgcccccgtgcaggccgccagcccgccaagctccacaccacgaagccgttgccaggcagccccagcagcgccgccagcagcaggaaggctgtgcctgtggcccgcgaagtcttccagctcagcagtgtctcgttccctgggggacggtagcagaccgacatccttctgggcctacaggacacagaaaaaaagtggggaagctgggggaccctacaaggatccttggcaggaaagcagggattgtgttcatttgagggtttcactgtcagtgagagtctcagcttccatgcaactgtccatcacggctgcaactgaaatcagagctgggacacagcgcaccagaagctaaagtcttgatgccatcaaaggacatccctgccccattcacatctctgtcacgtccactaatcggcaaaaggagaaaagtgagagaagatgacctaagtgtgactgcagcaggcagctctggaaaatgaagccagagcagtgagccagcccctcctccgaccaaggaggaaggaaagagcagccccagcacaggagagaaccacccagcccagaagttccagggaaggaactctccggtccaccatggagtacctctcagctctgaaccccagtgacttactcaggtcagtatctaatataagctcggagtttggacggagggtctggacctcagctccaccaccccagcgacctttccgtgtctgtgatcacaagcggaccatccggaaaggcctgacagctgccacccgccaggagctgctagccaaagcattggagaccctactgctgaatggagtgctaaccctggtgctagaggaggatggaactgcagtggacagtgaggacttcttccagctgctggaggatgacacgtgcctgatggtgttgcagtctggtcagagctggagccctacaaggagtggagtgctgtcatatggcctgggacgggagaggcccaagcacagcaaggacatcgcccgattcacctttgacgtgtacaagcaaaaccctcgagacctctttggcagcctgaatgtcaaagccacattctacgggctctactctatgagttgtgactttcaaggacttggcccaaagaaagtactcagggagctccttcgttggacctccacactgctgcaaggcctgggccatatgttgctgggaatttcctccacccttcgtcatgcagtggagggggctgagcagtggcagcagaagggccgcctccattcctactaaggggctctgagcttctgcccccagaatcattccaaccgacccactgcaaagactatgacagcatcaaatttcaggacctgcagacagtacaggctagataacccacccaatttccccactgtcctctgatcccctcgtgacagaacctttcagcataacgcctcacatcccaagtctatacccttacctgaagaatgctgttctttcctagccacctttctggcctcccacttgccctgaaaggccaagatcaagatgtcccccaggcatcttgatcccagcctgactgctgctacatctaatcccctaccaatgcctcctgtccctaaactccccagcatactgatgacagccctctctgactttaccttgagatctgtcttcatacccttcccctcaaactaacaaaaacatttccaataaaaatatcaaatatttaccact

SEQ ID NO: 9762 - protein, 219 aa, Homo sapiens; identical to SEQ ID NO: 1542

SEQ ID NO: 9763 - DNA, 2434 bp, Homo sapiens
gccagcgctgcgaccgcctgcagaaggttgactgcgtggtagggggcccagagcaagccgaaggcaagcacgatggcgctcaccagccggcccacccgcgccccgtgccgcccggagccccagcgggcgccccgcagccgtgccagcgtcacgctgtagcagccgagcatcagcccgaaaggaagcacgaaagcggtcagagtctccaggctcaggtgggcggcggcgtggaccggcgacgggtggcacagctggcatacgcggtccctccacaggtggcggtagacggcggccgggacggcgagcaacagggcggccagccagaccgccagcagcaggcggcgggccagggccgggctgcgcagccgaggcgccaggaaggggcgggtgactgcgaggcagcgctgcaggctgagcaggccggtgagcagcacgctggcgtacatgctgagcgcgcacacgtagtacaccgccttgcagcccgcctggcccagcggccaggcctgccgggtcaggaaggccacaaagagcggcgtgagcagcagcaccgcgccgtcggccagcgccaggtgcagcacaagcgtggccgccagcggtcgcccccgtgcaggccgccagcccgccaagctccacaccacgaagccgttgccaggcagccccagcagcgccgccagcagcaggaaggctgtgcctgtggcccgcgaagtcttccagctcagcagtgtctcgttccctgggggacggtagcagaccgacatccttctgggcctacagcctgcctcttttctgcctgggagtcctgacttccacgaggacccagaccccacctcaaacacaactccttcttggaacccagatcccctgctcccagtcagttgacctgccccactcctggcctccttcccagagctcagtggacacagaaaaaaagtggggaagctgggggaccctacaaggatccttggcaggaaagcagggattgtgttcatttgagggtttcactgtcagtgagagtctcagcttccatgcaactgtccatcacggctgcaactgaaatcagagctgggacacagcgcaccagaagctaaagtcttgatgccatcaaaggacatccctgccccattcacatctctgtcacgtccactaatcggcaaaaggagaaaagtgagagaagatgacctaagtgtgactgcagcaggcagctctggaaaatgaagccagagcagtgagccagcccctcctccgaccaaggaggaaggaaagagcagccccagcacaggagagaaccacccagcccagaagttccagggaaggaactctccggtccaccatggagtacctctcagctctgaaccccagtgacttactcaggtcagtatctaatataagctcggagtttggacggagggtctggacctcagctccaccaccccagcgacctttccgtgtctgtgatcacaagcggaccatccggaaaggcctgacagctgccacccgccaggagctgctagccaaagcattggagaccctactgctgaatggagtgctaaccctggtgctagaggaggatggaactgcagtggacagtgaggacttcttccagctgctggaggatgacacgtgcctgatggtgttgcagtctggtcagagctggagccctacaaggagtggagtgctgtcatatggcctgggacgggagaggcccaagcacagcaaggacatcgcccgattcacctttgacgtgtacaagcaaaaccctcgagacctctttggcagcctgaatgtcaaagccacattctacgggctctactctatgagttgtgactttcaaggacttggcccaaagaaagtactcagggagctccttcgttggacctccacactgctgcaaggcctgggccatatgttgctgggaatttcctccacccttcgtcatgcagtggagggggctgagcagtggcagcagaagggccgcctccattcctactaaggggctctgagcttctgcccccagaatcattccaaccgacccactgcaaagactatgacagcatcaaatttcaggacctgcagacagtacaggctagataacccacccaatttccccactgtcctctgatcccctcgtgacagaacctttcagcataacgcctcacatcccaagtctatacccttacctgaagaatgctgttctttcctagccacctttctggcctcccacttgccctgaaaggccaagatcaagatgtcccccaggcatcttgatcccagcctgactgctgctacatctaatcccctaccaatgcctcctgtccctaaactccccagcatactgatgacagccctctctgactttaccttgagatctgtcttcatacccttcccctcaaactaacaaaaacatttccaataaaaatatcaaatatttaccact

SEQ ID NO: 9764 - protein, 219 aa, Homo sapiens; identical to SEQ ID NO: 1542

SEQ ID NO: 9765 - DNA, 3833 bp, Homo sapiens
agcttcgccaaggccccttccggtggagccagcgctgcgaccgcctgcagaaggttgactgcgtggtagggggcccagagcaagccgaaggcaagcacgatggcgctcaccagccggcccacccgcgccccgtgccgcccggagccccagcgggcgccccgcagccgtgccagcgtcacgctgtagcagccgagcatcagcccgaaaggaagcacgaaagcggtcagagtctccaggctcaggtgggcggcggcgtggaccggcgacgggtggcacagctggcatacgcggtccctccacaggtggcggtagacggcggccgggacggcgagcaacagggcggccagccagaccgccagcagcaggcggcgggccagggccgggctgcgcagccgaggcgccaggaaggggcgggtgactgcgaggcagcgctgcaggctgagcaggccggtgagcagcacgctggcgtacatgctgagcgcgcacacgtagtacaccgccttgcagcccgcctggcccagcggccaggcctgccgggtcaggaaggccacaaagagcggcgtgagcagcagcaccgcgccgtcggccagcgccaggtgcagcacaagcgtggccgccagcggtcgcccccgtgcaggccgccagcccgccaagctccacaccacgaagccgttgccaggcagccccagcagcgccgccagcagcaggaaggctgtgcctgtggcccgcgaagtcttccagctcagcagtgtctcgttccctgggggacggtagcagaccgacatccttctgggcctacaggtgggtggaaggcgccacagagggcgttcaggggtggggcaaaaccccacctgtgatgcccgatgagaaggtgccatgcctcctccttacttccctgcagcctgcctcttttctgcctgggagtcctgacttccacgaggacccagaccccacctcaaacacaactccttcttggaacccagatcccctgctcccagtcagttgacctgccccactcctggcctccttcccagagctcagtggtaaacaggcataaagtcatcaccccaggctgtcactatctctaccaccactcctctagtctggcccctccttctttgtccagccccattctagcacatctgggcaaaactggatggtggggtgtaaagggacgtgcacagatctacttaccaagctgggagcaagcaggattgggggcctggagaagctgaaaggttaagcagcagtaggcgaggtgcctactcctgtcctgtgcctatcacatttgcagagggtgacccaaacaactcagtcccccacctgccttatccttgcctgtttccagtctcctggtccggctgagcccctggcctcctacctcctcccacctcttgcctcaggccctgccccagtcactccaccctcagggctctcaccgggctgtcaatgacagcttttccatgtaaggcatggtgctaggttccaggaggaacaggggatgcatggaggcataatggttagggagtcatgacacacaaccatgaagaggccccattaccaggctgcaccaggatacaagacaagaaaggaaaggatgagtagggacatactaagaagcagccctctcctcttggaaaagtcaagcaaaacttggaaatgaagagatttgaggggggcctggcagatggatagagctgggggaagggaaaagaaaggcctctgctcaagtaacagccagaacttgaggttgcttggggagggcaccaggagcactgtcttagtttgggttcttccaaagcagagcttgagctaagggcttgggtacaggtgatcctgtattcttgagctaagggcttgggtacaggtgatcctgtatttgggaggttaactcaggaagtgagggcataaggtaaaacaagagagaggaaagccattaagagtatgttaagtcccttcagtaggccttgggaacctctgagaaaagtatagattgcccaagacaaaagactggcagggtgatcagtccaaagcatttattaggagaatgtacttaatgagtgggctacagcgtatcctcacaacagacagtgagagagagttgttctacctgggtatatccaaaacaagggggtcagggtatggagtttacgagggttcaaggtatttggttcagggccagggccagtttttttcagtgttttgggcaacaacctgaataccttttcaaggctctggcttgggctcaagcctgcaggggaaatgcaactggccaggtcacagggcaatcaagttactctgtgtttctttgtcaggacacagaaaaaaagtggggaagctgggggaccctacaaggatccttggcaggaaagcagggattgtgttcatttgagggtttcactgtcagtgagagtctcagcttccatgcaactgtccatcacggctgcaactgaaatcagagctgggacacagcgcaccagaagctaaagtcttgatgccatcaaaggacatccctgccccattcacatctctgtcacgtccactaatcggcaaaaggagaaaagtgagagaagatgacctaagtgtgactgcagcaggcagctctggaaaatgaagccagagcagtgagccagcccctcctccgaccaaggaggaaggaaagagcagccccagcacaggagagaaccacccagcccagaagttccagggaaggaactctccggtccaccatggagtacctctcagctctgaaccccagtgacttactcaggtcagtatctaatataagctcggagtttggacggagggtctggacctcagctccaccaccccagcgacctttccgtgtctgtgatcacaagcggaccatccggaaaggcctgacagctgccacccgccaggagctgctagccaaagcattggagaccctactgctgaatggagtgctaaccctggtgctagaggaggatggaactgcagtggacagtgaggacttcttccagctgctggaggatgacacgtgcctgatggtgttgcagtctggtcagagctggagccctacaaggagtggagtgctgtcatatggcctgggacgggagaggcccaagcacagcaaggacatcgcccgattcacctttgacgtgtacaagcaaaaccctcgagacctctttggcagcctgaatgtcaaagccacattctacgggctctactctatgagttgtgactttcaaggacttggcccaaagaaagtactcagggagctccttcgttggacctccacactgctgcaaggcctgggccatatgttgctgggaatttcctccacccttcgtcatgcagtggagggggctgagcagtggcagcagaagggccgcctccattcctactaaggggctctgagcttctgcccccagaatcattccaaccgacccactgcaaagactatgacagcatcaaatttcaggacctgcagacagtacaggctagataacccacccaatttccccactgtcctctgatcccctcgtgacagaacctttcagcataacgcctcacatcccaagtctatacccttacctgaagaatgctgttctttcctagccacctttctggcctcccacttgccctgaaaggccaagatcaagatgtcccccaggcatcttgatcccagcctgactgctgctacatctaatcccctaccaatgcctcctgtccctaaactccccagcatactgatgacagccctctctgactttaccttgagatctgtcttcatacccttcccctcaaactaacaaaaacatttccaataaaaatatcaaatatttaccact

SEQ ID NO: 9766 - protein, 219 aa, Homo sapiens; identical to SEQ ID NO: 1542

SEQ ID NO: 9767 - DNA, 835 bp, Homo sapiens
gtggtaaatatttgatatttttattggaaatgtttttgttagtttgaggggaagggtatgaagacagatctcaaggtaaagtcagagagggctgtcatcagtatgctggggagtttagggacaggaggcattggtaggggattagatgtagcagcagtcaggctgggatcaagatgcctgggggacatcttgatcttggcctttcagggcaagtgggaggccagaaaggtggctaggaaagaacagcattcttcaggtaagggtatagacttgggatgtgaggcgttatgctgaaaggttctgtcacgaggggatcagaggacagtggggaaattgggtgggttatctagcctgtactgtctgcaggtcctgaaatttgatgctgtcatagtctttgcagtgggtcggttggaatgattctgggggcagaagctcagagccccttagtaggaatggaggcggcccttctgctgccactgctcagccccctccactgcatgacgaagggtggaggaaattcccagcaacatatggcccaggccttgcagcagtgtggaggtccaacgaaggagctccctgaatggcagagacaagaggaaatcagatgatttggaaaacttgggaggaagccatcaagctgggagatgaggactttccacaagcaagagctaactagggggaatcttactgccccacttcagcttgtgctgtttcctggcaaggcaggctctcacatgcctggacgcctgggcacaggacaggagtaggcacctcgcctactgctgcttaacctttcagcttctccaggcccccaatcctgcttgctcccagcttg

SEQ ID NO: 9768 - protein, 40 aa, Homo sapiens
MRTFHKQELTRGNLTAPLQLVLFPGKAGSHMPGRLGTGQE

SEQ ID NO: 9769 - DNA, 3084 bp, Homo sapiens
aaactggccctggccctgaaccaaataccttgaaccctcgtaaactccataccctgacccccttgttttggatatacccaggtagaacaactctctctcactgtctgttgtgaggatacgctgtagcccactcattaagtacattctcctaataaatgctttggactgatcaccctgccagtcttttgtcttgggcaatctatacttttctcagaggttcccaaggcctactgaagggacttaacatactcttaatggctttcctctctcttgttttaccttatgccctcacttcctgagttaacctcccaaatacaggatcacctgtacccaagcccttagctcaagaatacaggatcacctgtacccaagcccttagctcaagctctgctttggaagaacccaaactaagacagtgctcctggtgccctccccaagcaacctcaagttctggctgttacttgagcagaggcctttcttttcccttcccccagctctatccatctgccaggcccccctcaaatctcttcatttccaagttttgcttgacttttccaagaggagagggctgcttcttagtatgtccctactcatcctttcctttcttgtcttgtatcctggtgcagcctggtaatggggcctcttcatggttgtgtgtcatgactccctaaccattatgcctccatgcatcccctgttcctcctggaacctagcaccatgccttacatggaaaagctgtcattgacagcccggtgagagccctgagggtggagtgactggggcagggcctgaggcaagaggtgggaggaggtaggaggccaggggctcagccggaccaggagactggaaacaggcaaggataaggcaggtgggggactgagttgtttgggtcacctctgcaggccagagagaccaggcaacatacacactgcagaaggtgggctgggaggattggggccagagctgggggagggatgagaacagaagcaggaccaggattcagcagagtcctcctatttccttccaccaccagggaatcttactgccccacttcagcttgtgctgtttcctggcaaggcaggctctcacatgcctggacgcctgggtgcgttggtgatgggaaggagcagggtgagggaggggccccaggagaggcccaggatgagcctcatcttgtccctccccattcttgtcttaccctctgcaaatgtgataggcacaggacaggagtaggcacctcgcctactgctgcttaacctttcagcttctccaggcccccaatcctgcttgctcccagcttggtaagtagatctgtgcacgtccctttacaccccaccatccagttttgcccagatgtgctagaatggggctggacaaagaaggaggggccagactagaggagtggtggtagagatagtgacagcctggggtgatgactttatgcctgtttaccactgagctctgggaaggaggccaggagtggggcaggtcaactgactgggagcaggggatctgggttccaagaaggagttgtgtttgaggtggggtctgggtcctcgtggaagtcaggactcccaggcagaaaagaggcaggctgcagggaagtaaggaggaggcatggcaccttctcatcgggcatcacaggtggggttttgccccacccctgaacgccctctgtggcgccttccacccacctgtaggcccagaaggatgtcggtctgctaccgtcccccagggaacgagacactgctgagctggaagacttcgcgggccacaggcacagccttcctgctgctggcggcgctgctggggctgcctggcaacggcttcgtggtgtggagcttggcgggctggcggcctgcacgggggcgaccgctggcggccacgcttgtgctgcacctggcgctggccgacggcgcggtgctgctgctcacgccgctctttgtggccttcctgacccggcaggcctggccgctgggccaggcgggctgcaaggcggtgtactacgtgtgcgcgctcagcatgtacgccagcgtgctgctcaccggcctgctcagcctgcagcgctgcctcgcagtcacccgccccttcctggcgcctcggctgcgcagcccggccctggcccgccgcctgctgctggcggtctggctggccgccctgttgctcgccgtcccggccgccgtctaccgccacctgtggagggaccgcgtatgccagctgtgccacccgtcgccggtccacgccgccgcccacctgagcctggagactctgaccgctttcgtgcttcctttcgggctgatgctcggctgctacagcgtgacgctggcacggctgcggggcgcccgctggggctccgggcggcacggggcgcgggtgggccggctggtgagcgccatcgtgcttgccttcggcttgctctgggccccctaccacgcagtcaaccttctgcaggcggtcgcagcgctggctccaccggaaggggccttggcgaagctgggcggagccggccaggcggcgcgagcgggaactacggccttggccttcttcagttctagcgtcaacccggtgctctacgtcttcaccgctggagatctgctgccccgggcaggtccccgtttcctcacgcggctcttcgaaggctctggggaggcccgagggggcggccgctctagggaagggaccatggagctccgaactacccctcagctgaaagtggtggggcagggccgcggcaatggagacccggggggtgggatggagaaggacggtccggaatgggacctttgacagcagaccctacaacctgctgcccttccctgtccctttccaccccccacccaccctccagaggtcagtgttctgggacatttggggacccttctttgactagagtttggatctggctgggtaggattactatacacttggggcaggcccaggctcctccaaactgagggattatgagggtggtgatggtccctgttaaggactattgtgtgcttgcaagttggcatgtacccatgtgccagcattgcttacttgttgccaatagctgttattgtgaaatacactgggaagccatta

SEQ ID NO: 9770 - protein, 389 aa, Homo sapiens; identical to SEQ ID NO: 1544

SEQ ID NO: 9771 - DNA, 1608 bp, Homo sapiens
gcacaggacaggagtaggcacctcgcctactgctgcttaacctttcagcttctccaggcccccaatcctgcttgctcccagcttggtggggttttgccccacccctgaacgccctctgtggcgccttccacccacctgtaggcccagaaggatgtcggtctgctaccgtcccccagggaacgagacactgctgagctggaagacttcgcgggccacaggcacagccttcctgctgctggcggcgctgctggggctgcctggcaacggcttcgtggtgtggagcttggcgggctggcggcctgcacgggggcgaccgctggcggccacgcttgtgctgcacctggcgctggccgacggcgcggtgctgctgctcacgccgctctttgtggccttcctgacccggcaggcctggccgctgggccaggcgggctgcaaggcggtgtactacgtgtgcgcgctcagcatgtacgccagcgtgctgctcaccggcctgctcagcctgcagcgctgcctcgcagtcacccgccccttcctggcgcctcggctgcgcagcccggccctggcccgccgcctgctgctggcggtctggctggccgccctgttgctcgccgtcccggccgccgtctaccgccacctgtggagggaccgcgtatgccagctgtgccacccgtcgccggtccacgccgccgcccacctgagcctggagactctgaccgctttcgtgcttcctttcgggctgatgctcggctgctacagcgtgacgctggcacggctgcggggcgcccgctggggctccgggcggcacggggcgcgggtgggccggctggtgagcgccatcgtgcttgccttcggcttgctctgggccccctaccacgcagtcaaccttctgcaggcggtcgcagcgctggctccaccggaaggggccttggcgaagctgggcggagccggccaggcggcgcgagcgggaactacggccttggccttcttcagttctagcgtcaacccggtgctctacgtcttcaccgctggagatctgctgccccgggcaggtccccgtttcctcacgcggctcttcgaaggctctggggaggcccgagggggcggccgctctagggaagggaccatggagctccgaactacccctcagctgaaagtggtggggcagggccgcggcaatggagacccggggggtgggatggagaaggacggtccggaatgggacctttgacagcagaccctacaacctgctgcccttccctgtccctttccaccccccacccaccctccagaggtcagtgttctgggacatttggggacccttctttgactagagtttggatctggctgggtaggattactatacacttggggcaggcccaggctcctccaaactgagggattatgagggtggtgatggtccctgttaaggactattgtgtgcttgcaagttggcatgtacccatgtgccagcattgcttacttgttgccaatagctgttattgtgaaatacactgggaagccattagatgatgacttaagtgtgcttcccctggtggttcttcatgcctgagttgtactgaagccacctagttccctgctgggtcaagc

SEQ ID NO: 9772 - protein, 358 aa, Homo sapiens
MSVCYRPPGNETLLSWKTSRATGTAFLLLAALLGLPGNGFVVWSLAGWRPARGRPLAATLVLHLALADGAVLLLTPLFVAFLTRQAWPLGQAGCKAVYYVCALSMYASVLLTGLLSLQRCLAVTRPFLAPRLRSPALARRLLLAVWLAALLLAVPAAVYRHLWRDRVCQLCHPSPVHAAAHLSLETLTAFVLPFGLMLGCYSVTLARLRGARWGSGRHGARVGRLVSAIVLAFGLLWAPYHAVNLLQAVAALAPPEGALAKLGGAGQAARAGTTALAFFSSSVNPVLYVFTAGDLLPRAGPRFLTRLFEGSGEARGGGRSREGTMELRTTPQLKVVGQGRGNGDPGGGMEKDGPEWDL

SEQ ID NO: 9773 - DNA, 2241 bp, Homo sapiens
gcggtgctgctgctcacgccgctctttgtggccttcctgacccggcaggcctggccgctgggccaggcgggctgcaaggcggtgtactacgtgtgcgcgctcagcatgtacgccagcgtgctgctcaccggcctgctcagcctgcagcgctgcctcgcagtcacccgccccttcctggcgcctcggctgcgcagcccggccctggcccgccgcctgctgctggcggtctggctggccgccctgttgctcgccgtcccggccgccgtctaccgccacctgtggagggaccgcgtatgccagctgtgccacccgtcgccggtccacgccgccgcccacctgagcctggagactctgaccgctttcgtgcttcctttcgggctgatgctcggctgctacagcgtgacgctggcacggctgcggggcgcccgctggggctccgggcggcacggggcgcgggtgggccggctggtgagcgccatcgtgcttgccttcggcttgctctgggccccctaccacgcagtcaaccttctgcaggcggtcgcagcgctggctccaccggaaggggccttggcgaagctgggcggagccggccaggcggcgcgagcgggaactacggccttggccttcttcagttctagcgtcaacccggtgctctacgtcttcaccgctggagatctgctgccccgggcaggtccccgtttcctcacgcggctcttcgaaggctctggggaggcccgagggggcggccgctctagggaagggaccatggagctccgaactacccctcagctgaaagtggtggggcagggccgcggcaatggagacccggggggtgggatggagaaggacggtccggaatgggacctttgacagcagaccctacaacctgctgcccttccctgtccctttccaccccccacccaccctccagaggtcctcccgacggccatgaacactacatcttctgcagcacccccctcactaggtgtagagttcatctctctgctggctatcatcctgctgtcagtggcgctggctgtggggcttcccggcaacagctttgtggtgtggagtatcctgaaaaggatgcagaagcgctctgtcactgccctgatggtgctgaacctggccctggccgacctggccgtattgctcactgctccctttttccttcacttcctggcccaaggcacctggagttttggactggctggttgccgcctgtgtcactatgtctgcggagtcagcatgtacgccagcgtcctgcttatcacggccatgagtctagaccgctcactggcggtggcccgcccctttgtgtcccagaagctacgcaccaaggcgatggcccggcgggtgctggcaggcatctgggtgttgtcctttctgctggccacacccgtcctcgcgtaccgcacagtagtgccctggaaaacgaacatgagcctgtgcttcccgcggtaccccagcgaagggcaccgggccttccatctaatcttcgaggctgtcacgggcttcctgctgcccttcctggctgtggtggccagctactcggacatagggcgtcggctacaggcccggcgcttccgccgcagccgccgcaccggccgcctggtggtgctcatcatcctgaccttcgccgccttctggctgccctaccacgtggtgaacctggctgaggcgggccgcgcgctggccggccaggccgccgggttagggctcgtggggaagcggctgagcctggcccgcaacgtgctcatcgcactcgccttcctgagcagcagcgtgaaccccgtgctgtacgcgtgcgccggcggcggcctgctgcgctcggcgggcgtgggcttcgtcgccaagctgctggagggcacgggctccgaggcgtccagcacgcgccgcgggggcagcctgggccagaccgctaggagcggccccgccgctctggagcccggcccttccgagagcctcactgcctccagccctctcaagttaaacgaactgaactaggcctggtggaaggaggcgcactttcctcctggcagaatgctagctctgagccagttcagtacctggaggaggagcaggggcgtggagggcgtggagggcgtgggagcgtgggaggcgggagtggagtggaagaagagggagaggtggagcaaagtgagggccgagtgagagcgtgctccagcctggctcccacaggcagctttaaccattaaaactgaagtctgaaatttggtc

SEQ ID NO: 9774 - protein, 273 aa, Homo sapiens
MGPLTADPTTCCPSLSLSTPHPPSRGPPDGHEHYIFCSTPLTRCRVHLSAGYHPAVSGAGCGASRQQLCGVEYPEKDAEALCHCPDGAEPGPGRPGRIAHCSLFPSLPGPRHLEFWTGWLPPVSLCLRSQHVRQRPAYHGHESRPLTGGGPPLCVPEATHQGDGPAGAGRHLGVVLSAGHTRPRVPHSSALENEHEPVLPAVPQRRAPGLPSNLRGCHGLPAALPGCGGQLLGHRASATGPALPPQPPHRPPGGAHHPDLRRLLAALPRGEPG

SEQ ID NO: 9775 - DNA, 3332 bp, Homo sapiens
gcggtgctgctgctcacgccgctctttgtggccttcctgacccggcaggcctggccgctgggccaggcgggctgcaaggcggtgtactacgtgtgcgcgctcagcatgtacgccagcgtgctgctcaccggcctgctcagcctgcagcgctgcctcgcagtcacccgccccttcctggcgcctcggctgcgcagcccggccctggcccgccgcctgctgctggcggtctggctggccgccctgttgctcgccgtcccggccgccgtctaccgccacctgtggagggaccgcgtatgccagctgtgccacccgtcgccggtccacgccgccgcccacctgagcctggagactctgaccgctttcgtgcttcctttcgggctgatgctcggctgctacagcgtgacgctggcacggctgcggggcgcccgctggggctccgggcggcacggggcgcgggtgggccggctggtgagcgccatcgtgcttgccttcggcttgctctgggccccctaccacgcagtcaaccttctgcaggcggtcgcagcgctggctccaccggaaggggccttggcgaagctgggcggagccggccaggcggcgcgagcgggaactacggccttggccttcttcagttctagcgtcaacccggtgctctacgtcttcaccgctggagatctgctgccccgggcaggtccccgtttcctcacgcggctcttcgaaggctctggggaggcccgagggggcggccgctctagggaagggaccatggagctccgaactacccctcagctgaaagtggtggggcagggccgcggcaatggagacccggggggtgggatggagaaggacggtccggaatgggacctttgacagcagaccctacaacctgctgcccttccctgtccctttccaccccccacccaccctccagaggtcctcccgacggccatgaacactacatcttctgcagcacccccctcactaggtgtagagttcatctctctgctggctatcatcctgctgtcagtggcgctggctgtggggcttcccggcaacagctttgtggtgtggagtatcctgaaaaggatgcagaagcgctctgtcactgccctgatggtgctgaacctggccctggccgacctggccgtattgctcactgctccctttttccttcacttcctggcccaaggcacctggagttttggactggctggttgccgcctgtgtcactatgtctgcggagtcagcatgtacgccagcgtcctgcttatcacggccatgagtctagaccgctcactggcggtggcccgcccctttgtgtcccagaagctacgcaccaaggcgatggcccggcgggtgctggcaggcatctgggtgttgtcctttctgctggccacacccgtcctcgcgtaccgcacagtagtgccctggaaaacgaacatgagcctgtgcttcccgcggtaccccagcgaagggcaccgggccttccatctaatcttcgaggctgtcacgggcttcctgctgcccttcctggctgtggtggccagctactcggacatagggcgtcggctacaggcccggcgcttccgccgcagccgccgcaccggccgcctggtggtgctcatcatcctgaccttcgccgccttctggctgccctaccacgtggtgaacctggctgaggcgggccgcgcgctggccggccaggccgccgggttagggctcgtggggaagcggctgagcctggcccgcaacgtgctcatcgcactcgccttcctgagcagcagcgtgaaccccgtgctgtacgcgtgcgccggcggcggcctgctgcgctcggcgggcgtgggcttcgtcgccaagctgctggagggcacgggctccgaggcgtccagcacgcgccgcgggggcagcctgggccagaccgctaggagcggccccgccgctctggagcccggcccttccgagagcctcactgcctccagccctctcaagttaaacgaactgaactaggcctggtggaaggaggcgcactttcctcctggcagaatgctagctctgagccagttcagtacctggaggaggagcaggggcgtggagggcgtggagggcgtgggagcgtgggaggcgggagtggagtggaagaagagggagaggtggagcaaagtgagggccgagtgagagcgtgctccagcctggctcccacaggcagctttaaccattaaaactgaagtctgaaatttggtcaaccttgtgagtggggtacatgtgctgtgggtatcggggtgctcgtgggcgccctggtggggcccctctcggtagttgagagtcacgtcctttagttccccatgatttacaattttggaagggacacaaagaaacatagacttcccccatcccagatgattccgagtacatagtctgcagataatacttagcaaaacgcagtctacagactcctaaagcagcttgtctaggaagaccacccatgtgggcttatcactccaggttctgtgacccgggaccttctgagaaaacagcactgctgtgaaatatcttccttgaagcctgtgataagtctccttgttagaatgactccaacttcctgccaataatctttgtcctctccataggagatgttctaggggatgccttccttccctccatttcacaaagaggccagacttgaggactaagtcattagatcttatcccttagaattttgcatatcagcatctgctaacctccacaacacaccctggcacagggtggggctgagggccccaggaaacaaagattcccaaaagtgagagggatgagtcattatttcctagagatgactgttgttttagagaaccttggtccaactctgttctgacaaggttttaggaagatggcaacaacagtggcagcagtgtactttttggatctttctcataaaaaaacaaaagagcaagtaagagagggaaaccaaatatccacatgcaacatccgcaacaaatctagtatgtcaaggtttgacatactcccatggaccccaaagtatgagccagtgagaatgagtcatcaatatctcaagacccatataccagcatctgtgcagaaggatgcagaaggaagcaaagggatgttggatggacctaagaagaggagatccccaagctgtctacagatccttactggaaggtatggtgcaccaatttgagaacagcagctgaaactgggagggacctaacggagtatttcccagtcctctcgcccattctgtatggtgagcacataataggtacttatttagtgtttgtcgaattaataaagttcaaatgacatttccctgg

SEQ ID NO: 9776 - protein, 273 aa, Homo sapiens; identical to SEQ ID NO: 9774

SEQ ID NO: 9777 - DNA, 1417 bp, Homo sapiens
gggcggagccggccaggcggcgcgagcgggaactacggccttggccttcttcagttctagcgtcaacccggtgctctacgtcttcaccgctggagatctgctgccccgggtcctcccgacggccatgaacactacatcttctgcagcacccccctcactaggtgtagagttcatctctctgctggctatcatcctgctgtcagtggcgctggctgtggggcttcccggcaacagctttgtggtgtggagtatcctgaaaaggatgcagaagcgctctgtcactgccctgatggtgctgaacctggccctggccgacctggccgtattgctcactgctccctttttccttcacttcctggcccaaggcacctggagttttggactggctggttgccgcctgtgtcactatgtctgcggagtcagcatgtacgccagcgtcctgcttatcacggccatgagtctagaccgctcactggcggtggcccgcccctttgtgtcccagaagctacgcaccaaggcgatggcccggcgggtgctggcaggcatctgggtgttgtcctttctgctggccacacccgtcctcgcgtaccgcacagtagtgccctggaaaacgaacatgagcctgtgcttcccgcggtaccccagcgaagggcaccgggccttccatctaatcttcgaggctgtcacgggcttcctgctgcccttcctggctgtggtggccagctactcggacatagggcgtcggctacaggcccggcgcttccgccgcagccgccgcaccggccgcctggtggtgctcatcatcctgaccttcgccgccttctggctgccctaccacgtggtgaacctggctgaggcgggccgcgcgctggccggccaggccgccgggttagggctcgtggggaagcggctgagcctggcccgcaacgtgctcatcgcactcgccttcctgagcagcagcgtgaaccccgtgctgtacgcgtgcgccggcggcggcctgctgcgctcggcgggcgtgggcttcgtcgccaagctgctggagggcacgggctccgaggcgtccagcacgcgccgcgggggcagcctgggccagaccgctaggagcggccccgccgctctggagcccggcccttccgagagcctcactgcctccagccctctcaagttaaacgaactgaactaggcctggtggaaggaggcgcactttcctcctggcagaatgctagctctgagccagttcagtacctggaggaggagcaggggcgtggagggcgtggagggcgtgggagcgtgggaggcgggagtggagtggaagaagagggagaggtggagcaaagtgagggccgagtgagagcgtgctccagcctggctcccacaggcagctttaaccattaaaactgaagtctgaaatttggtc

SEQ ID NO: 9778 - protein, 352 aa, Homo sapiens; identical to SEQ ID NO: 1546

SEQ ID NO: 9779 - DNA, 2508 bp, Homo sapiens
gggcggagccggccaggcggcgcgagcgggaactacggccttggccttcttcagttctagcgtcaacccggtgctctacgtcttcaccgctggagatctgctgccccgggtcctcccgacggccatgaacactacatcttctgcagcacccccctcactaggtgtagagttcatctctctgctggctatcatcctgctgtcagtggcgctggctgtggggcttcccggcaacagctttgtggtgtggagtatcctgaaaaggatgcagaagcgctctgtcactgccctgatggtgctgaacctggccctggccgacctggccgtattgctcactgctccctttttccttcacttcctggcccaaggcacctggagttttggactggctggttgccgcctgtgtcactatgtctgcggagtcagcatgtacgccagcgtcctgcttatcacggccatgagtctagaccgctcactggcggtggcccgcccctttgtgtcccagaagctacgcaccaaggcgatggcccggcgggtgctggcaggcatctgggtgttgtcctttctgctggccacacccgtcctcgcgtaccgcacagtagtgccctggaaaacgaacatgagcctgtgcttcccgcggtaccccagcgaagggcaccgggccttccatctaatcttcgaggctgtcacgggcttcctgctgcccttcctggctgtggtggccagctactcggacatagggcgtcggctacaggcccggcgcttccgccgcagccgccgcaccggccgcctggtggtgctcatcatcctgaccttcgccgccttctggctgccctaccacgtggtgaacctggctgaggcgggccgcgcgctggccggccaggccgccgggttagggctcgtggggaagcggctgagcctggcccgcaacgtgctcatcgcactcgccttcctgagcagcagcgtgaaccccgtgctgtacgcgtgcgccggcggcggcctgctgcgctcggcgggcgtgggcttcgtcgccaagctgctggagggcacgggctccgaggcgtccagcacgcgccgcgggggcagcctgggccagaccgctaggagcggccccgccgctctggagcccggcccttccgagagcctcactgcctccagccctctcaagttaaacgaactgaactaggcctggtggaaggaggcgcactttcctcctggcagaatgctagctctgagccagttcagtacctggaggaggagcaggggcgtggagggcgtggagggcgtgggagcgtgggaggcgggagtggagtggaagaagagggagaggtggagcaaagtgagggccgagtgagagcgtgctccagcctggctcccacaggcagctttaaccattaaaactgaagtctgaaatttggtcaaccttgtgagtggggtacatgtgctgtgggtatcggggtgctcgtgggcgccctggtggggcccctctcggtagttgagagtcacgtcctttagttccccatgatttacaattttggaagggacacaaagaaacatagacttcccccatcccagatgattccgagtacatagtctgcagataatacttagcaaaacgcagtctacagactcctaaagcagcttgtctaggaagaccacccatgtgggcttatcactccaggttctgtgacccgggaccttctgagaaaacagcactgctgtgaaatatcttccttgaagcctgtgataagtctccttgttagaatgactccaacttcctgccaataatctttgtcctctccataggagatgttctaggggatgccttccttccctccatttcacaaagaggccagacttgaggactaagtcattagatcttatcccttagaattttgcatatcagcatctgctaacctccacaacacaccctggcacagggtggggctgagggccccaggaaacaaagattcccaaaagtgagagggatgagtcattatttcctagagatgactgttgttttagagaaccttggtccaactctgttctgacaaggttttaggaagatggcaacaacagtggcagcagtgtactttttggatctttctcataaaaaaacaaaagagcaagtaagagagggaaaccaaatatccacatgcaacatccgcaacaaatctagtatgtcaaggtttgacatactcccatggaccccaaagtatgagccagtgagaatgagtcatcaatatctcaagacccatataccagcatctgtgcagaaggatgcagaaggaagcaaagggatgttggatggacctaagaagaggagatccccaagctgtctacagatccttactggaaggtatggtgcaccaatttgagaacagcagctgaaactgggagggacctaacggagtatttcccagtcctctcgcccattctgtatggtgagcacataataggtacttatttagtgtttgtcgaattaataaagttcaaatgacatttccctgg

SEQ ID NO: 9780 - protein, 352 aa, Homo sapiens; identical to SEQ ID NO: 1546

SEQ ID NO: 9781 - DNA, 3881 bp, Homo sapiens
gagacttaccttgccccctgaccatctgatcctccctgcaaaggccacctgacgtgaaaaggagccaggagcaagcactcagtcagggaagtttggaggttggccattggggtatgaggaatggcaggaatatttagaggacaggaataatttttcagagaagtgccacatattctttttctctttgccaagtctgggctccttctaagatgctgctagctattcctagcccgttccccaatacttctctgcccccaccttttggaatccttatctaggtctaaaaacggttctagatcctgacccctttgattgggggatgtagaatgggattcttttcaggggacatccacaagtacacatctgtggtcactaaggtgaccagctcatcccagttggcctggaactttcccagtttaagcactgaaaactccttgtcccagccctgccggtttcccaacaaactgagatggttggccgctcaagtggctaccctgaccatcaccccaggctctactttagcgactgctcacacctccctgcttcccagacagaagtcaaaacagcaaaagaaacccagtccccagggtcatgctagggctaccaaaactgggatgaactagcacctgtgaactagaacagcagggagtatgcttagagtgcctggtcctgggtgtggggaagaaaggccatcaaggtagatgcgggtggggaacagcttgagagaggaggcaaggacaacccagtttctgtctgaaggggcctctggttgaccctggagtttctgtccccaaacacaggcctcacgggattctttctgtcctcatgcactgggcagaggttccttaacttcctttgttgcacattgccattctctcacatcccgtgcggtcaggaagcccttcctgaactctgacttcagttcttgctgcggtttctgcccatttttttcatatcctctgacagctgcgaggtcatctctgctctggcttttctccaagcagaacaagtgggggctctggaaaggttaagggacctcagtggccaccattatactttgcatctttcctgagaagtgagagttgaaagggaagcaggaaggcccatggtcagattgaaggaaggactttttagtttcttttttttttttttttttttttgagatggagtctcgctctgtcattcaggctggagtgcagtggtgcgatctcagctcactgcagcctccacttcctgggttcacatgattctcctgcctcagcctcccaagtagctgagactacaggcacatgccactacacccagctatcttttgtatttttagtagagacggggtttcaccatgttggccaggctggtctcaaactgctaacatcaagtgatctgctcccctcagcctcccaaagtgctgggattaccggtatgaaccaccacaacctgccaggaatttttagtttttagcttttgcaggagacttcaaggaaaggagacattcctctgtccaggaaacgggtaaggggaccatttctgcattgctggtttcccctcttggcagggtgggcatgaggcatcactgttcctgctccctcactcctgctcctcatgctcagcctgccagctcggcctcaactttgtgtgtctaaagtggaactgaatagtaggctgtgagaagataggaaagaggtagtgccaatctccttgcccagatcataaatccagactcagcagggtaaccacatgggcaagcacaaggtaggtgcttggggaaaggggaagtaattggcattctgtgtgataccaaggagaccatttggattttggcttctaccaaagagaatggagaattggttgacctaaatggaaccagtccctttaagtaaggggaggaaagggggtgctggaagatggccctcttcccaccacctagatcatagcttgaactgaagccaaggacagagtgctgcccccttcggcatttactgatgtgccctctttaaatcatgatgttatctaacccaaacccagacccaggacctagtcacagctccaacctacacttcctattaatcttaaaacaaagcaaaacaaaacaaaaagatatcagcattgtagcctccaatctgagcccatttcccttctctggctaccatacctccttctcctatatgataccattcactactttgttcaattatccagtctagacctgcatcttgaggccacacccagccttctcactccccacacccctctttcctctctcactgctccttcctggtctcttctcatctggccccacctctaaggagtcctcctgccttctgggttgccctggaaaacagactatcccccctcctagtgaagggagtgggtaggggtttcagccccaccctcaggaagatgcgtcttccctgtcctctgctctgtggtacttcctctctggctgatttagcaaacagcacctagacctggggccaggcctttggcagtgggacagatccagggataggctacaccaccctgccctgaccctgggattggcatcagcttccaaccagttcctgccaaagcttgtcctcccgacggccatgaacactacatcttctgcagcacccccctcactaggtgtagagttcatctctctgctggctatcatcctgctgtcagtggcgctggctgtggggcttcccggcaacagctttgtggtgtggagtatcctgaaaaggatgcagaagcgctctgtcactgccctgatggtgctgaacctggccctggccgacctggccgtattgctcactgctccctttttccttcacttcctggcccaaggcacctggagttttggactggctggttgccgcctgtgtcactatgtctgcggagtcagcatgtacgccagcgtcctgcttatcacggccatgagtctagaccgctcactggcggtggcccgcccctttgtgtcccagaagctacgcaccaaggcgatggcccggcgggtgctggcaggcatctgggtgttgtcctttctgctggccacacccgtcctcgcgtaccgcacagtagtgccctggaaaacgaacatgagcctgtgcttcccgcggtaccccagcgaagggcaccgggccttccatctaatcttcgaggctgtcacgggcttcctgctgcccttcctggctgtggtggccagctactcggacatagggcgtcggctacaggcccggcgcttccgccgcagccgccgcaccggccgcctggtggtgctcatcatcctgaccttcgccgccttctggctgccctaccacgtggtgaacctggctgaggcgggccgcgcgctggccggccaggccgccgggttagggctcgtggggaagcggctgagcctggcccgcaacgtgctcatcgcactcgccttcctgagcagcagcgtgaaccccgtgctgtacgcgtgcgccggcggcggcctgctgcgctcggcgggcgtgggcttcgtcgccaagctgctggagggcacgggctccgaggcgtccagcacgcgccgcgggggcagcctgggccagaccgctaggagcggccccgccgctctggagcccggcccttccgagagcctcactgcctccagccctctcaagttaaacgaactgaactaggcctggtggaaggaggcgcactttcctcctggcagaatgctagctctgagccagttcagtacctggaggaggagcaggggcgtggagggcgtggagggcgtgggagcgtgggaggcgggagtggagtggaagaagagggagaggtggagcaaagtgagggccgagtgagagcgtgctccagcctggctcccacaggcagctttaaccattaaaactgaagtctgaaatttggtc

SEQ ID NO: 9782 - protein, 352 aa, Homo sapiens; identical to SEQ ID NO: 1546

SEQ ID NO: 9783 - DNA, 4972 bp, Homo sapiens
gagacttaccttgccccctgaccatctgatcctccctgcaaaggccacctgacgtgaaaaggagccaggagcaagcactcagtcagggaagtttggaggttggccattggggtatgaggaatggcaggaatatttagaggacaggaataatttttcagagaagtgccacatattctttttctctttgccaagtctgggctccttctaagatgctgctagctattcctagcccgttccccaatacttctctgcccccaccttttggaatccttatctaggtctaaaaacggttctagatcctgacccctttgattgggggatgtagaatgggattcttttcaggggacatccacaagtacacatctgtggtcactaaggtgaccagctcatcccagttggcctggaactttcccagtttaagcactgaaaactccttgtcccagccctgccggtttcccaacaaactgagatggttggccgctcaagtggctaccctgaccatcaccccaggctctactttagcgactgctcacacctccctgcttcccagacagaagtcaaaacagcaaaagaaacccagtccccagggtcatgctagggctaccaaaactgggatgaactagcacctgtgaactagaacagcagggagtatgcttagagtgcctggtcctgggtgtggggaagaaaggccatcaaggtagatgcgggtggggaacagcttgagagaggaggcaaggacaacccagtttctgtctgaaggggcctctggttgaccctggagtttctgtccccaaacacaggcctcacgggattctttctgtcctcatgcactgggcagaggttccttaacttcctttgttgcacattgccattctctcacatcccgtgcggtcaggaagcccttcctgaactctgacttcagttcttgctgcggtttctgcccatttttttcatatcctctgacagctgcgaggtcatctctgctctggcttttctccaagcagaacaagtgggggctctggaaaggttaagggacctcagtggccaccattatactttgcatctttcctgagaagtgagagttgaaagggaagcaggaaggcccatggtcagattgaaggaaggactttttagtttcttttttttttttttttttttttgagatggagtctcgctctgtcattcaggctggagtgcagtggtgcgatctcagctcactgcagcctccacttcctgggttcacatgattctcctgcctcagcctcccaagtagctgagactacaggcacatgccactacacccagctatcttttgtatttttagtagagacggggtttcaccatgttggccaggctggtctcaaactgctaacatcaagtgatctgctcccctcagcctcccaaagtgctgggattaccggtatgaaccaccacaacctgccaggaatttttagtttttagcttttgcaggagacttcaaggaaaggagacattcctctgtccaggaaacgggtaaggggaccatttctgcattgctggtttcccctcttggcagggtgggcatgaggcatcactgttcctgctccctcactcctgctcctcatgctcagcctgccagctcggcctcaactttgtgtgtctaaagtggaactgaatagtaggctgtgagaagataggaaagaggtagtgccaatctccttgcccagatcataaatccagactcagcagggtaaccacatgggcaagcacaaggtaggtgcttggggaaaggggaagtaattggcattctgtgtgataccaaggagaccatttggattttggcttctaccaaagagaatggagaattggttgacctaaatggaaccagtccctttaagtaaggggaggaaagggggtgctggaagatggccctcttcccaccacctagatcatagcttgaactgaagccaaggacagagtgctgcccccttcggcatttactgatgtgccctctttaaatcatgatgttatctaacccaaacccagacccaggacctagtcacagctccaacctacacttcctattaatcttaaaacaaagcaaaacaaaacaaaaagatatcagcattgtagcctccaatctgagcccatttcccttctctggctaccatacctccttctcctatatgataccattcactactttgttcaattatccagtctagacctgcatcttgaggccacacccagccttctcactccccacacccctctttcctctctcactgctccttcctggtctcttctcatctggccccacctctaaggagtcctcctgccttctgggttgccctggaaaacagactatcccccctcctagtgaagggagtgggtaggggtttcagccccaccctcaggaagatgcgtcttccctgtcctctgctctgtggtacttcctctctggctgatttagcaaacagcacctagacctggggccaggcctttggcagtgggacagatccagggataggctacaccaccctgccctgaccctgggattggcatcagcttccaaccagttcctgccaaagcttgtcctcccgacggccatgaacactacatcttctgcagcacccccctcactaggtgtagagttcatctctctgctggctatcatcctgctgtcagtggcgctggctgtggggcttcccggcaacagctttgtggtgtggagtatcctgaaaaggatgcagaagcgctctgtcactgccctgatggtgctgaacctggccctggccgacctggccgtattgctcactgctccctttttccttcacttcctggcccaaggcacctggagttttggactggctggttgccgcctgtgtcactatgtctgcggagtcagcatgtacgccagcgtcctgcttatcacggccatgagtctagaccgctcactggcggtggcccgcccctttgtgtcccagaagctacgcaccaaggcgatggcccggcgggtgctggcaggcatctgggtgttgtcctttctgctggccacacccgtcctcgcgtaccgcacagtagtgccctggaaaacgaacatgagcctgtgcttcccgcggtaccccagcgaagggcaccgggccttccatctaatcttcgaggctgtcacgggcttcctgctgcccttcctggctgtggtggccagctactcggacatagggcgtcggctacaggcccggcgcttccgccgcagccgccgcaccggccgcctggtggtgctcatcatcctgaccttcgccgccttctggctgccctaccacgtggtgaacctggctgaggcgggccgcgcgctggccggccaggccgccgggttagggctcgtggggaagcggctgagcctggcccgcaacgtgctcatcgcactcgccttcctgagcagcagcgtgaaccccgtgctgtacgcgtgcgccggcggcggcctgctgcgctcggcgggcgtgggcttcgtcgccaagctgctggagggcacgggctccgaggcgtccagcacgcgccgcgggggcagcctgggccagaccgctaggagcggccccgccgctctggagcccggcccttccgagagcctcactgcctccagccctctcaagttaaacgaactgaactaggcctggtggaaggaggcgcactttcctcctggcagaatgctagctctgagccagttcagtacctggaggaggagcaggggcgtggagggcgtggagggcgtgggagcgtgggaggcgggagtggagtggaagaagagggagaggtggagcaaagtgagggccgagtgagagcgtgctccagcctggctcccacaggcagctttaaccattaaaactgaagtctgaaatttggtcaaccttgtgagtggggtacatgtgctgtgggtatcggggtgctcgtgggcgccctggtggggcccctctcggtagttgagagtcacgtcctttagttccccatgatttacaattttggaagggacacaaagaaacatagacttcccccatcccagatgattccgagtacatagtctgcagataatacttagcaaaacgcagtctacagactcctaaagcagcttgtctaggaagaccacccatgtgggcttatcactccaggttctgtgacccgggaccttctgagaaaacagcactgctgtgaaatatcttccttgaagcctgtgataagtctccttgttagaatgactccaacttcctgccaataatctttgtcctctccataggagatgttctaggggatgccttccttccctccatttcacaaagaggccagacttgaggactaagtcattagatcttatcccttagaattttgcatatcagcatctgctaacctccacaacacaccctggcacagggtggggctgagggccccaggaaacaaagattcccaaaagtgagagggatgagtcattatttcctagagatgactgttgttttagagaaccttggtccaactctgttctgacaaggttttaggaagatggcaacaacagtggcagcagtgtactttttggatctttctcataaaaaaacaaaagagcaagtaagagagggaaaccaaatatccacatgcaacatccgcaacaaatctagtatgtcaaggtttgacatactcccatggaccccaaagtatgagccagtgagaatgagtcatcaatatctcaagacccatataccagcatctgtgcagaaggatgcagaaggaagcaaagggatgttggatggacctaagaagaggagatccccaagctgtctacagatccttactggaaggtatggtgcaccaatttgagaacagcagctgaaactgggagggacctaacggagtatttcccagtcctctcgcccattctgtatggtgagcacataataggtacttatttagtgtttgtcgaattaataaagttcaaatgacatttccctgg

SEQ ID NO: 9784 - protein, 352 aa, Homo sapiens; identical to SEQ ID NO: 1546

SEQ ID NO: 9785 - DNA, 1094 bp, Homo sapiens
gagacttcaaggaaaggagacattcctctgtccaggaaacgggcacctggagttttggactggctggttgccgcctgtgtcactatgtctgcggagtcagcatgtacgccagcgtcctgcttatcacggccatgagtctagaccgctcactggcggtggcccgcccctttgtgtcccagaagctacgcaccaaggcgatggcccggcgggtgctggcaggcatctgggtgttgtcctttctgctggccacacccgtcctcgcgtaccgcacagtagtgccctggaaaacgaacatgagcctgtgcttcccgcggtaccccagcgaagggcaccgggccttccatctaatcttcgaggctgtcacgggcttcctgctgcccttcctggctgtggtggccagctactcggacatagggcgtcggctacaggcccggcgcttccgccgcagccgccgcaccggccgcctggtggtgctcatcatcctgaccttcgccgccttctggctgccctaccacgtggtgaacctggctgaggcgggccgcgcgctggccggccaggccgccgggttagggctcgtggggaagcggctgagcctggcccgcaacgtgctcatcgcactcgccttcctgagcagcagcgtgaaccccgtgctgtacgcgtgcgccggcggcggcctgctgcgctcggcgggcgtgggcttcgtcgccaagctgctggagggcacgggctccgaggcgtccagcacgcgccgcgggggcagcctgggccagaccgctaggagcggccccgccgctctggagcccggcccttccgagagcctcactgcctccagccctctcaagttaaacgaactgaactaggcctggtggaaggaggcgcactttcctcctggcagaatgctagctctgagccagttcagtacctggaggaggagcaggggcgtggagggcgtggagggcgtgggagcgtgggaggcgggagtggagtggaagaagagggagaggtggagcaaagtgagggccgagtgagagcgtgctccagcctggctcccacaggcagctttaaccattaaaactgaagtctgaaatttggtc

SEQ ID NO: 9786 - protein, 252 aa, Homo sapiens [sequence omitted]

SEQ ID NO: 9787 - DNA, 2185 bp, Homo sapiens
gagacttcaaggaaaggagacattcctctgtccaggaaacgggcacctggagttttggactggctggttgccgcctgtgtcactatgtctgcggagtcagcatgtacgccagcgtcctgcttatcacggccatgagtctagaccgctcactggcggtggcccgcccctttgtgtcccagaagctacgcaccaaggcgatggcccggcgggtgctggcaggcatctgggtgttgtcctttctgctggccacacccgtcctcgcgtaccgcacagtagtgccctggaaaacgaacatgagcctgtgcttcccgcggtaccccagcgaagggcaccgggccttccatctaatcttcgaggctgtcacgggcttcctgctgcccttcctggctgtggtggccagctactcggacatagggcgtcggctacaggcccggcgcttccgccgcagccgccgcaccggccgcctggtggtgctcatcatcctgaccttcgccgccttctggctgccctaccacgtggtgaacctggctgaggcgggccgcgcgctggccggccaggccgccgggttagggctcgtggggaagcggctgagcctggcccgcaacgtgctcatcgcactcgccttcctgagcagcagcgtgaaccccgtgctgtacgcgtgcgccggcggcggcctgctgcgctcggcgggcgtgggcttcgtcgccaagctgctggagggcacgggctccgaggcgtccagcacgcgccgcgggggcagcctgggccagaccgctaggagcggccccgccgctctggagcccggcccttccgagagcctcactgcctccagccctctcaagttaaacgaactgaactaggcctggtggaaggaggcgcactttcctcctggcagaatgctagctctgagccagttcagtacctggaggaggagcaggggcgtggagggcgtggagggcgtgggagcgtgggaggcgggagtggagtggaagaagagggagaggtggagcaaagtgagggccgagtgagagcgtgctccagcctggctcccacaggcagctttaaccattaaaactgaagtctgaaatttggtcaaccttgtgagtggggtacatgtgctgtgggtatcggggtgctcgtgggcgccctggtggggcccctctcggtagttgagagtcacgtcctttagttccccatgatttacaattttggaagggacacaaagaaacatagacttcccccatcccagatgattccgagtacatagtctgcagataatacttagcaaaacgcagtctacagactcctaaagcagcttgtctaggaagaccacccatgtgggcttatcactccaggttctgtgacccgggaccttctgagaaaacagcactgctgtgaaatatcttccttgaagcctgtgataagtctccttgttagaatgactccaacttcctgccaataatctttgtcctctccataggagatgttctaggggatgccttccttccctccatttcacaaagaggccagacttgaggactaagtcattagatcttatcccttagaattttgcatatcagcatctgctaacctccacaacacaccctggcacagggtggggctgagggccccaggaaacaaagattcccaaaagtgagagggatgagtcattatttcctagagatgactgttgttttagagaaccttggtccaactctgttctgacaaggttttaggaagatggcaacaacagtggcagcagtgtactttttggatctttctcataaaaaaacaaaagagcaagtaagagagggaaaccaaatatccacatgcaacatccgcaacaaatctagtatgtcaaggtttgacatactcccatggaccccaaagtatgagccagtgagaatgagtcatcaatatctcaagacccatataccagcatctgtgcagaaggatgcagaaggaagcaaagggatgttggatggacctaagaagaggagatccccaagctgtctacagatccttactggaaggtatggtgcaccaatttgagaacagcagctgaaactgggagggacctaacggagtatttcccagtcctctcgcccattctgtatggtgagcacataataggtacttatttagtgtttgtcgaattaataaagttcaaatgacatttccctgg

SEQ ID NO: 9788 - protein, 252 aa, Homo sapiens [sequence omitted]

SEQ ID NO: 9789 - DNA, 2549 bp, Homo sapiens
tactgatgtgccctctttaaatcatgatgttatctaacccaaacccagacccaggacctagtcacagctccaacctacacttcctattaatcttaaaacaaagcaaaacaaaacaaaaagatatcagcattgtagcctccaatctgagcccatttcccttctctggctaccatacctccttctcctatatgataccattcactactttgttcaattatccagtctagacctgcatcttgaggccacacccagccttctcactccccacacccctctttcctctctcactgctccttcctggtctcttctcatctggccccacctctaaggagtcctcctgccttctgggttgccctggaaaacagactatcccccctcctagtgaagggagtgggtaggggtttcagccccaccctcaggaagatgcgtcttccctgtcctctgctctgtggtacttcctctctggctgatttagcaaacagcacctagacctggggccaggcctttggcagtgggacagatccagggataggctacaccaccctgccctgaccctgggattggcatcagcttccaaccagttcctgccaaagcttgtaagtaagtttcctgggagcggccgtggttgtggtggtggtgggacagtgtgcagccatgaaagaaggtgcaaaggaatctccaaagaaagcctgaccagcgtaaaaagttgggaggctttgtccttgtcacttgtccactaaactcctcccctccctgttattcctggttgaccctgggcatctctggggacagtaggcaggtgattgggaaagttaatgggattgaggggctgagggcctggcagggggcaaaaagactggcctttcaaggggtgcagcattggtaggaactctgtttggttctgggctttagggtctcctaaggggaggagactgaaaaggtctggaaatgctgctgctgctgtggtcactgtatattttgcaattgggtctgtggacaggaaggggccgcatgacccagttaggaaactagtctttgtactcaaccagatccctttaagttgtcagtctgcagcgatgggggcagtatatttcagggggacctctgatgctgctgaccctggagatagactagagttctcagcctaggtgtgtccatggcgtcaggaaacccttggtcctctactctcatgcgtgtgtccgccctcactctccaggtcctcccgacggccatgaacactacatcttctgcagcacccccctcactaggtgtagagttcatctctctgctggctatcatcctgctgtcagtggcgctggctgtggggcttcccggcaacagcttttggagtggaagaagagggagaggtggagcaaagtgagggccgagtgagagcgtgctccagcctggctcccacaggcagctttaaccattaaaactgaagtctgaaatttggtcaaccttgtgagtggggtacatgtgctgtgggtatcggggtgctcgtgggcgccctggtggggcccctctcggtagttgagagtcacgtcctttagttccccatgatttacaattttggaagggacacaaagaaacatagacttcccccatcccagatgattccgagtacatagtctgcagataatacttagcaaaacgcagtctacagactcctaaagcagcttgtctaggaagaccacccatgtgggcttatcactccaggttctgtgacccgggaccttctgagaaaacagcactgctgtgaaatatcttccttgaagcctgtgataagtctccttgttagaatgactccaacttcctgccaataatctttgtcctctccataggagatgttctaggggatgccttccttccctccatttcacaaagaggccagacttgaggactaagtcattagatcttatcccttagaattttgcatatcagcatctgctaacctccacaacacaccctggcacagggtggggctgagggccccaggaaacaaagattcccaaaagtgagagggatgagtcattatttcctagagatgactgttgttttagagaaccttggtccaactctgttctgacaaggttttaggaagatggcaacaacagtggcagcagtgtactttttggatctttctcataaaaaaacaaaagagcaagtaagagagggaaaccaaatatccacatgcaacatccgcaacaaatctagtatgtcaaggtttgacatactcccatggaccccaaagtatgagccagtgagaatgagtcatcaatatctcaagacccatataccagcatctgtgcagaaggatgcagaaggaagcaaagggatgttggatggacctaagaagaggagatccccaagctgtctacagatccttactggaaggtatggtgcaccaatttgagaacagcagctgaaactgggagggacctaacggagtatttcccagtcctctcgcccattctgtatggtgagcacataataggtacttatttagtgtttgtcgaattaataaagttcaaatgacatttccctgg

SEQ ID NO: 9790 - protein, 74 aa, Homo sapiens
MASGNPWSSTLMRVSALTLQVLPTAMNTTSSAAPPSLGVEFISLLAIILLSVALAVGLPGNSFWSGRRGRGGAK

SEQ ID NO: 9791 - DNA, 4249 bp, Homo sapiens
agagcgcagcggcgagcgtgactccgccatcaggtccccggctccctccccggacctagcccactccgctgcgccagcgccgcgggcagagctgacctcagacccgagcttcctgaccactgtgctgtgcgcgctgggcggcttctcgctgctgctgggcctcgcttcccgggagcagcgactgcagcgctggacgcgtcccctgtccggcttggtatgggtcgcgctgctagcgctaggccacgccttcctgttcaccgggggcgtggtgagcgcctgggaccagccccacttgggccttcggcttcccgcgccccgcccccaggtgtcctattttctcttcgtcatcttcacggcgtatgccatgctgcccttgggcatgcgggacgccgccgtcgcgggcctcgcctcctcactctcgcatctgctggtcctcgggctgtatcttgggccacagccggactcacggcctgcactgctgccgcagttggcagcaaacgcagtgctgttcctgtgcgggaacgtggcaggagtgtaccacaaggcgctgatggagcgcgccctgcgggccacgttccgggaggcactcagctccctgcactcacgccggcggctggacaccgagaagaagcaccaggaacaccttctcttgtccatccttcctgcctacctggcccgagagatgaaggcagagatcatggcacggctgcaggcaggacaggggtcacggccagagagcactaacaatttccacagcctctatgtcaagaggcaccagggagtcagcgtgctgtatgctgacatcgtgggcttcacgcggctggccagcgagtgttcccctaaggagctggtgctcatgctcaatgagctctttggcaagttcgaccagattgccaaggaaactgcgggcagccactggcgtggacatcaacatgcgtgtgggcgtgcactcaggcagcgtactgtgtggagtcatcgggctgcagaagtggcagtacgacgtttggtcacatgatgtcacactggctaaccacatggaggcaggcggtgtaccagggcgagtgcacatcacaggggctaccctggccctgctggcaggggcttatgctgtggaggacgcaggcatggagcatcgggacccctaccttcgggagctaggggagcctacctatctggtcatcgatccacgggcagaggaggaggatgagaagggcactgcaggaggcttgctgtcctcgcttgagggcctcaagatgcgtccatcactgctgatgacccgttacctggagtcctggggcgcagccaagccttttgcccacctgagccacggagacagccctgtgtccacctccacccctctcccggagaagaccctggcttccttcagcacccagtggagcctggatcggagccgtaccccccggggactagatgatgaactggacaccggggatgccaagttcttccaggtcattgagcagctcaactcgcagaaacagtggaagcagtcgaaggacttcaacccactgacactgtacttcagagagaaggagatggagaaagagtaccgactctctgcaatccccgccttcaaatactatgaagcctgcaccttcctggtttttctctccaacttcatcatccagatgctagtgacaaacaggcccccagctctggccatcacgtatagcatcaccttcctcctcttcctcctcatcctttttgtctgcttctcagaggacctgatgaggtgtgtcctgaaaggccccaagatgctgcactggctgcctgcactgtctggcctggtggccacacgaccaggactgagaatagccttgggcaccgccaccatcctccttgtctttgccatggccattaccagcctgttcttcttcccaacatcatcagactgccctttccaagctcccaatgtgtcctccatgatttccaacctctcctgggagctccctgggtctctgcctctcatcagtgtcccagtgagtgttcccacatgcccttaatctccttctgcacacccttcctcagcccaagcccacagccccctgagtggaggaacgctccattctgtggattagaacagacataagtcacacccagtgtgtatcagtgtgtatgatgccccctgtctcccagataggacctgggcctgggagggacaggaagggagccctcaggtgtcccccctctgcctatgggacatgcccactcctgacccctgcctggccccacagtactccatgcactgctgcacgctgggcttcctctcctgctccctctttctgcacatgagcttcgagctgaagctgctgctgctcctgctgtggctggcggcatcctgctccctcttcctgcactcccatgcctggctgtcggaatgcctcatcgtccgcctctatctgggccccttggactccaggtgtgcacagctgctggacagaggtgccgggccccctgggatggggtgagatgggatacagcagagctgtcctggcctcaccgacctgaatcacccacagggcaaagtgggagggaagcggaggcctacatgggggcagggagaaggccaggaagggggaaagcaaggggtcaccctgatccatggccccttcaggcccggagtgctgaaggagcccaaactgatgggtgctatctccttcttcatcttcttcttcaccctccttgtcctggctcgccaggtaagtcacccagctcagccccaccagggcccacctatgagtggcccccatatctgtgacttgatctttctaatctccagggttgaatgcccattggaagcttctaagcgagccttcctgcttcctttcttctccttcactccctgcccctcctttctcccacacccctatctgggaaagcccatgctttagaaaaagtctgctgccaattctctatccctagtctgaatctaatttcaaggatagtctctctccaagtatacttacaccttaagctctacttctaaactgggggtggggtgggggtggtttcaggcatcatggagttggggctgaacactcaggagctgggcttcccctgctctgtgtctccccatggccccgggtgaccctccccagaatgagtactactgccgcctggacttcctgtggaagaagaagctgaggcaggagagggaggagacagagacgatggagaacctgactcggctgctcttggagaacgtgctccctgcacacgtggccccccagttcattggccagaaccggcgcaacgaggatctctaccaccagtcctatgaatgcgtttgtgtcctcttcgcctcagtcccagacttcaaggagttctactctgaatccaacatcaatcatgagggcctagagtgtctgaggctgctcaatgagataattgctgattttgatgagctgctctccaagcccaagttcagtggggtggagaagatcaagaccatcggcagcacctacatggcagccacaggcttaaatgccacctctggacaggatgcacaacaggatgctgaacggagctgcagccaccttggcactatggtggaatttgccgtggccctggggtctaagctggacgtcatcaacaagcattcattcaacaacttccgcctgcgagtggggttgaaccatggacccgtagtagctggagttattggggcccagaagccgcaatatgacatttggggcaacacagtgaacgtggccagccgcatggagagtacaggagtccttggcaaaatccaagtgactgaggagacagcatgggccctacagtccctgggctacacctgctacagccggggtgtcatcaaggtgaaaggcaaagggcagctctgcacctacttcctgaacacagacttgacacgaactggacctccttcagctaccctaggctgagattgcactcgccttctaagaacctcaataaagagactctggggtgtctggagcccattgatgtctgaagctgctgatatagctggggatcaccttctcattgcccttcagtgggaattcttcttcttcccaggccaattttagtgcgagtgtgtgtgtgaatgtgtgtgcacatgcctgcacacatgcatgcatgtgagactaagcattttgaaagggagtgatttttttcacaagctcaggaagagaactccctcagcctctctgccaacttgattatagtattttgtacaccttggaagcataaagaatttagccacatgact

SEQ ID NO: 9792 - protein, 419 aa, Homo sapiens
MSRGTRESACCMLTSWASRGWPASVPLRSWCSCSMSSLASSTRLPRKLRAATGVDINMRVGVHSGSVLCGVIGLQKWQYDVWSHDVTLANHMEAGGVPGRVHITGATLALLAGAYAVEDAGMEHRDPYLRELGEPTYLVIDPRAEEEDEKGTAGGLLSSLEGLKMRPSLLMTRYLESWGAAKPFAHLSHGDSPVSTSTPLPEKTLASFSTQWSLDRSRTPRGLDDELDTGDAKFFQVIEQLNSQKQWKQSKDFNPLTLYFREKEMEKEYRLSAIPAFKYYEACTFLVFLSNFIIQMLVTNRPPALAITYSITFLLFLLILFVCFSEDLMRCVLKGPKMLHWLPALSGLVATRPGLRIALGTATILLVFAMAITSLFFFPTSSDCPFQAPNVSSMISNLSWELPGSLPLISVPVSVPTCP

SEQ ID NO: 9793 - DNA, 3678 bp, Homo sapiens
agagcgcagcggcgagcgtgactccgccatcaggtccccggctccctccccggacctagcccactccgctgcgccagcgccgcgggcaccagccccggggctcggggctggggagatcatggcccgcctcttcagcccccggccgccccccagcgaagacctcttctacgagacctactacagcctgagccagcagtacccgctgctgctgctgctgctggggatcgtgctctgtgcgctcgcggcgctgctcgcagtggcctgggccagcggcagggagctgacctcagacccgagcttcctgaccactgtgctgtgcgcgctgggcggcttctcgctgctgctgggcctcgcttcccgggagcagcgactgcagcgctggacgcgtcccctgtccggcttggtatgggtcgcgctgctagcgctaggccacgccttcctgttcaccgggggcgtggtgagcgcctgggaccaggtgtcctattttctcttcgtcatcttcacggcgtatgccatgctgcccttgggcatgcgggacgccgccgtcgcgggcctcgcctcctcactctcgcatctgctggtcctcgggctgtatcttgggccacagccggactcacggcctgcactgctgccgcagttggcagcaaacgcagtgctgttcctgtgcgggaacgtggcaggagtgtaccacaaggcgctgatggagcgcgccctgcgggccacgttccgggaggcactcagctccctgcactcacgccggcggctggacaccgagaagaagcaccaggaacaccttctcttgtccatccttcctgcctacctggcccgagagatgaaggcagagatcatggcacggctgcaggcaggacaggggtcacggccagagagcactaacaatttccacagcctctatgtcaagaggcaccagggagtcagcgtgctgtatgctgacatcgtgggcttcacgcggctggccagcgagtgttcccctaaggagctggtgctcatgctcaatgagctctttggcaagttcgaccagattgccaaggagcatgaatgcatgcggatcaagatcctgggggactgttactactgtgtctctgggctgccactctcactgccagaccatgccatcaactgcgtgcgcatgggcctggacatgtgccgggccatcaggaaactgcgggcagccactggcgtggacatcaacatgcgtgtgggcgtgcactcaggcagcgtactgtgtggagtcatcgggctgcagaagtggcagtacgacgtttggtcacatgatgtcacactggctaaccacatggaggcaggcggtgtaccagggcgagtgcacatcacaggggctaccctggccctgctggcaggggcttatgctgtggaggacgcaggcatggagcatcgggacccctaccttcgggagctaggggagcctacctatctggtcatcgatccacgggcagaggaggaggatgagaagggcactgcaggaggcttgctgtcctcgcttgagggcctcaagatgcgtccatcactgctgatgacccgttacctggagtcctggggcgcagccaagccttttgcccacctgagccacggagacagccctgtgtccacctccacccctctcccggagaagaccctggcttccttcagcacccagtggagcctggatcggagccgtaccccccggggactagatgatgaactggacaccggggatgccaagttcttccaggtcattgagcagctcaactcgcagaaacagtggaagcagtcgaaggacttcaacccactgacactgtacttcagagagaaggagatggagaaagagtaccgactctctgcaatccccgccttcaaatactatgaagcctgcaccttcctggtttttctctccaacttcatcatccagatgctagtgacaaacaggcccccagctctggccatcacgtatagcatcaccttcctcctcttcctcctcatcctttttgtctgcttctcagaggacctgatgaggtgtgtcctgaaaggccccaagatgctgcactggctgcctgcactgtctggcctggtggccacacgaccaggactgagaatagccttgggcaccgccaccatcctccttgtctttgccatggccattaccagcctgttcttcttcccaacatcatcagactgccctttccaagctcccaatgtgtcctccatgatttccaacctctcctgggagctccctgggtctctgcctctcatcagtgtcccatactccatgcactgctgcacgctgggcttcctctcctgctccctctttctgcacatgagcttcgagctgaagctgctgctgctcctgctgtggctggcggcatcctgctccctcttcctgcactcccatgcctggctgtcggaatgcctcatcgtccgcctctatctgggccccttggactccaggcccggagtgctgaaggagcccaaactgatgggtgctatctccttcttcatcttcttcttcaccctccttgtcctggctcgccagaatgagtactactgccgcctggacttcctgtggaagaagaagctgaggcaggagagggaggagacagagacgatggagaacctgactcggctgctcttggagaacgtgctccctgcacacgtggccccccagttcattggccagaaccggcgcaacgaggatctctaccaccagtcctatgaatgcgtttgtgtcctcttcgcctcagtcccagacttcaaggagttctactctgaatccaacatcaatcatgagggcctagagtgtctgaggctgctcaatgagataattgctgattttgatgagctgctctccaagcccaagttcagtggggtggagaagatcaagaccatcggcagcacctacatggcagccacaggcttaaatgccacctctggacaggatgcacaacaggatgctgaacggagctgcagccaccttggcactatggtggaatttgccgtggccctggggtctaagctggacgtcatcaacaagcattcattcaacaacttccgcctgcgagtggggttgaaccatggacccgtagtagctggagttattggggcccagaagccgcaatatgacatttggggcaacacagtgaacgtggccagccgcatggagagtacaggagtccttggcaaaatccaagtgactgaggagacagcatgggccctacagtccctgggctacacctgctacagccggggtgtcatcaaggtgaaaggcaaagggcagctctgcacctacttcctgaacacagacttgacacgaactggacctccttcagctaccctaggctgagattgcactcgccttctaagaacctcaataaagagactctggggtgtctggagcccattgatgtctgaagctgctgatatagctggggatcaccttctcattgcccttcagtgggaattcttcttcttcccaggccaattttagtgcgagtgtgtgtgtgaatgtgtgtgcacatgcctgcacacatgcatgcatgtgagactaagcattttgaaagggagtgatttttttcacaagctcaggaagagaactccctcagcctctctgccaacttgattatagtattttgtacaccttggaagcataaagaatttagccacatgact

SEQ ID NO: 9794 - protein, 1077 aa, Homo sapiens; identical to SEQ ID NO: 1548

SEQ ID NO: 9795 - DNA, 5498 bp, Homo sapiens
ccccgcccccaggtgtcctattttctcttcgtcatcttcacggcgtatgccatgctgcccttgggcatgcgggacgccgccgtcgcgggcctcgcctcctcactctcgcatctgctggtcctcgggctgtatcttgggccacagccggactcacggcctgcactgctgccgcaggtgagcacgcaagtagcacaggctgcgctcaggacggctctgccacgtgctagtaggctccttttagggggttgttgagctgtgactccaagtcaaggtgcaacgctgggcgcaggatacccaaccgtgctttcgcagagctggtacaacagtgtgatgcaatgcctgctgttaccagaagagggatccaggccacacggaagggagtcgtgtcgtggtttaccccggggacaacagatgtggttaatgaaaccttgacagagaatgaaaaaaaaaaaaaaaaagttttgtgcgatgggagtgggtagcgacagtggagtggtattccaagcacaagaaacctacctgcaaacgtttccagacctaagaggtcgtgttggtgaagcagccgagagtctggaggagggagcatctgggaagggaaacgtccctagggatgccacagtgtggcaccacttgtcccacaatagttaggtccctcactgtaaagcccagtcttccccagccagtctttgagaccaactccaactacacacgacaagcacccgggtcccgcgccctctgaggctggccttcacccacagttggcagcaaacgcagtgctgttcctgtgcgggaacgtggcaggagtgtaccacaaggcgctgatggagcgcgccctgcgggccacgttccgggaggcactcagctccctgcactcacgccggcggctggacaccgagaagaagcaccaggtcagccgggcctaggaaggtcagagcagcgctccgagggaggagttgcttagattacataacggggctcctccacaagttgagtgactctgggcaggtttcttgacctgtttcctcttttgtataaaatgtgggtattgcccatcttagaaggttgtgaggctcaaacaaaccaaagcttataaaaagcactttagagcattatgatattaagtgaactcccattcaggtgttgatactgggagtttagtcactaaaggtgatcagtgtaggatggagtgctggggccctgctgtgtgcagcgggaggacctgggggagcaccctggggagcacctaggatgggcagtgtgggctcctgagtgatttgggggacagggcctcctggctttagggtgcagaagagttggtgttcatggtgacctcttccaggaacaccttctcttgtccatccttcctgcctacctggcccgagagatgaaggcagagatcatggcacggctgcaggcaggacaggggtcacggccagagagcactaacaatttccacagcctctatgtcaagaggcaccagggagtcagcgtgctgtatgctgacatcgtgggcttcacgcggctggccagcgagtgttcccctaaggagctggtgctcatgctcaatgagctctttggcaagttcgaccagattgccaaggtcagagaagacttccctccccacccagggaccctcaaacatcccatcctgggtagccccttccaagggaaactcccaccttataagatcccaggcccacttcagtgcatgcaggcccccagatattccagtggaaggaggaaaccctctcaaacattcccagtcatgaagctgctcaccacacacctcaaacctacagagatccctcaatatcgccacagatgtcccaagtacaatgccccaaacatgctcagagcccccacatatgtgtctctggacactacaaccaaatctatagagacgttctgatattctaaccttaggaggcccttccaagagaaatttctgccctatgcaacctcagcccagcaacctgcttagactccagggatgcctccaagcaaccaattcttggattccccccaacctctcaatcctgagaccactaccacgtactcaactctgggtacccccttcaacatgccaaaagtggaaagagccacagccatccagcccttggggaaactcttctgagaaagagatctgtatgaaagacagttagccccatatcaagtgaaaggagtccctagatctgatctagacactaccccaccttggaagttcttcaggaataccccgctcgctgcccacttttcccaactccctcctacccttctgacctctaaccaggttcctctgcacacccacatacacactcccaggagcatgaatgcatgcggatcaagatcctgggggactgttactactgtgtctctgggctgccactctcactgccagaccatgccatcaactgcgtgcgcatgggcctggacatgtgccgggccatcaggtcagctcaggcggtggtcaagaggaatgctgagggtggatgtggggggcagcaggcagctgacagaagtcctctttgtgagaatctggggtgtctcacaggcagggctgagggtaggactcagattgtcccacacacacactgctcaggaaactgcgggcagccactggcgtggacatcaacatgcgtgtgggcgtgcactcaggcagcgtactgtgtggagtcatcgggctgcagaagtggcagtacgacgtttggtcacatgatgtcacactggctaaccacatggaggcaggcggtgtaccagggcgagtgcacatcacaggggctaccctggccctgctggcaggggcttatgctgtggaggacgcaggcatggagcatcgggacccctaccttcgggagctaggggagcctacctatctggtcatcgatccacgggcagaggaggaggatgagaagggcactgcaggaggcttgctgtcctcgcttgagggcctcaagatgcgtccatcactgctgatgacccgttacctggagtcctggggcgcagccaagccttttgcccacctgagccacggagacagccctgtgtccacctccacccctctcccggagaagaccctggcttccttcagcacccagtggagcctggatcggagccgtaccccccggggactagatgatgaactggacaccggggatgccaagttcttccaggtcattgagcagctcaactcgcagaaacagtggaagcagtcgaaggacttcaacccactgacactgtacttcagagagaaggagatggagaaagagtaccgactctctgcaatccccgccttcaaatactatgaagcctgcaccttcctggtttttctctccaacttcatcatccagatgctagtgacaaacaggcccccagctctggccatcacgtatagcatcaccttcctcctcttcctcctcatcctttttgtctgcttctcagaggacctgatgaggtgtgtcctgaaaggccccaagatgctgcactggctgcctgcactgtctggcctggtggccacacgaccaggactgagaatagccttgggcaccgccaccatcctccttgtctttgccatggccattaccagcctgttcttcttcccaacatcatcagactgccctttccaagctcccaatgtgtcctccatgatttccaacctctcctgggagctccctgggtctctgcctctcatcagtgtcccatactccatgcactgctgcacgctgggcttcctctcctgctccctctttctgcacatgagcttcgagctgaagctgctgctgctcctgctgtggctggcggcatcctgctccctcttcctgcactcccatgcctggctgtcggaatgcctcatcgtccgcctctatctgggccccttggactccaggcccggagtgctgaaggagcccaaactgatgggtgctatctccttcttcatcttcttcttcaccctccttgtcctggctcgccaggtaagtcacccagctcagccccaccagggcccacctatgagtggcccccatatctgtgacttgatctttctaatctccagggttgaatgcccattggaagcttctaagcgagccttcctgcttcctttcttctccttcactccctgcccctcctttctcccacacccctatctgggaaagcccatgctttagaaaaagtctgctgccaattctctatccctagtctgaatctaatttcaaggatagtctctctccaagtatacttacaccttaagctctacttctaaactgggggtggggtgggggtggtttcaggcatcatggagttggggctgaacactcaggagctgggcttcccctgctctgtgtctccccatggccccgggtgaccctccccagaatgagtactactgccgcctggacttcctgtggaagaagaagctgaggcaggagagggaggagacagagacgatggagaacctgactcggctgctcttggagaacgtgctccctgcacacgtggccccccagttcattggccagaaccggcgcaacgagaacccccagaagggtcacccaagcccttgtgcttgtcaagcgtctttgttttcacaacatcttagattctttctttggtgagcacaaaactgcatttcaaattcttacttggaaggcatgtcttctctaactcatgaccattccatacattccagaagcctaggcgttgatgggagctgtctggagcaggggtccccagcccccaggccgcagactgatactagtccatgacctgttgggaactgggctacacagcaggaggatctctaccaccagtcctatgaatgcgtttgtgtcctcttcgcctcagtcccagacttcaaggagttctactctgaatccaacatcaatcatgagggcctagagtgtctgaggctgctcaatgagataattgctgattttgatgagctgctctccaagcccaagttcagtggggtggagaagatcaagaccatcggcagcacctacatggcagccacaggcttaaatgccacctctggacaggatgcacaacaggatgctgaacggagctgcagccaccttggcactatggtggaatttgccgtggccctggggtctaagctggacgtcatcaacaagcattcattcaacaacttccgcctgcgagtggggttgaaccatggacccgtagtagctggagttattggggcccagaagccgcaatatgacatttggggcaacacagtgaacgtggccagccgcatggagagtacaggagtccttggcaaaatccaagtgactgaggagacagcatgggccctacagtccctgggctacacctgctacagccggggtgtcatcaaggtgaaaggcaaagggcagctctgcacctacttcctgaacacagacttgacacgaactggacctccttcagctaccctaggctgagattgcactcgccttctaagaacctcaataaagagactctggggtgtctggagcccattgatg

SEQ ID NO: 9796 - protein, 508 aa, Homo sapiens
MRVGVHSGSVLCGVIGLQKWQYDVWSHDVTLANHMEAGGVPGRVHITGATLALLAGAYAVEDAGMEHRDPYLRELGEPTYLVIDPRAEEEDEKGTAGGLLSSLEGLKMRPSLLMTRYLESWGAAKPFAHLSHGDSPVSTSTPLPEKTLASFSTQWSLDRSRTPRGLDDELDTGDAKFFQVIEQLNSQKQWKQSKDFNPLTLYFREKEMEKEYRLSAIPAFKYYEACTFLVFLSNFIIQMLVTNRPPALAITYSITFLLFLLILFVCFSEDLMRCVLKGPKMLHWLPALSGLVATRPGLRIALGTATILLVFAMAITSLFFFPTSSDCPFQAPNVSSMISNLSWELPGSLPLISVPYSMHCCTLGFLSCSLFLHMSFELKLLLLLLWLAASCSLFLHSHAWLSECLIVRLYLGPLDSRPGVLKEPKLMGAISFFIFFFTLLVLARQVSHPAQPHQGPPMSGPHICDLIFLISRVECPLEASKRAFLLPFFSFTPCPSFLPHPYLGKPML

SEQ ID NO: 9797 - DNA, 3382 bp, Homo sapiens
gtccccggctccctccccggacctagcccactccgctgcgccagcgccgcgggcaccagccccggggctcggggctggggagatcatggcccgcctcttcagcccccggccgccccccagcgaagacctcttctacgagacctactacagcctgagccagcagtacccgctgctgctgctgctgctggggatcgtgctctgtgcgctcgcggcgctgctcgcagtggcctgggccagcggcagggagctgacctcagacccgagcttcctgaccactgtgctgtgcgcgctgggcggcttctcgctgctgctgggcctcgcttcccgggagcagcgactgcagcgctggacgcgtcccctgtccggcttggtatgggtcgcgctgctagcgctaggccacgccttcctgttcaccgggggcgtggtgagcgcctgggaccaggtgtcctattttctcttcgtcatcttcacggcgtatgccatgctgcccttgggcatgcgggacgccgccgtcgcgggcctcgcctcctcactctcgcatctgctggtcctcgggctgtatcttgggccacagccggactcacggcctgcactgctgccgcagttggcagcaaacgcagtgctgttcctgtgcgggaacgtggcaggagtgtaccacaaggcgctgatggagcgcgccctgcgggccacgttccgggaggcactcagctccctgcactcacgccggcggctggacaccgagaagaagcaccaggaacaccttctcttgtccatccttcctgcctacctggcccgagagatgaaggcagagatcatggcacggctgcaggcaggacaggggtcacggccagagagcactaacaatttccacagcctctatgtcaagaggcaccagggagtcagcgtgctgtatgctgacatcgtgggcttcacgcggctggccagcgagtgttcccctaaggagctggtgctcatgctcaatgagctctttggcaagttcgaccagattgccaaggagcatgaatgcatgcggatcaagatcctgggggactgttactactgtgtctctgggctgccactctcactgccagaccatgccatcaactgcgtgcgcatgggcctggacatgtgccgggccatcaggaaactgcgggcagccactggcgtggacatcaacatgcgtgtgggcgtgcactcaggcagcgtactgtgtggagtcatcgggctgcagaagtggcagtacgacgtttggtcacatgatgtcacactggctaaccacatggaggcaggcggtgtaccagggcgagtgcacatcacaggggctaccctggccctgctggcaggggcttatgctgtggaggacgcaggcatggagcatcgggacccctaccttcgggagctaggggagcctacctatctggtcatcgatccacgggcagaggaggaggatgagaagggcactgcaggaggcttgctgtcctcgcttgagggcctcaagatgcgtccatcactgctgatgacccgttacctggagtcctggggcgcagccaagccttttgcccacctgagccacggagacagccctgtgtccacctccacccctctcccggagaagaccctggcttccttcagcacccagtggagcctggatcggagccgtaccccccggggactagatgatgaactggacaccggggatgccaagttcttccaggtcattgagcagctcaactcgcagaaacagtggaagcagtcgaaggacttcaacccactgacactgtacttcagagagaaggagatggagaaagagtaccgactctctgcaatccccgccttcaaatactatgaagcctgcaccttcctggtttttctctccaacttcatcatccagatgctagtgacaaacaggcccccagctctggccatcacgtatagcatcaccttcctcctcttcctcctcatcctttttgtctgcttctcagaggacctgatgaggtgtgtcctgaaaggccccaagatgctgcactggctgcctgcactgtctggcctggtggccacacgaccaggactgagaatagccttgggcaccgccaccatcctccttgtctttgccatggccattaccagcctgttcttcttcccaacatcatcagactgccctttccaagctcccaatgtgtcctccatgatttccaacctctcctgggagctccctgggtctctgcctctcatcagtgtcccatactccatgcactgctgcacgctgggcttcctctcctgctccctctttctgcacatgagcttcgagctgaagctgctgctgctcctgctgtggctggcggcatcctgctccctcttcctgcactcccatgcctggctgtcggaatgcctcatcgtccgcctctatctgggccccttggactccaggcccggagtgctgaaggagcccaaactgatgggtgctatctccttcttcatcttcttcttcaccctccttgtcctggctcgccagaatgagtactactgccgcctggacttcctgtggaagaagaagctgaggcaggagagggaggagacagagacgatggagaacctgactcggctgctcttggagaacgtgctccctgcacacgtggccccccagttcattggccagaaccggcgcaacgaggatctctaccaccagtcctatgaatgcgtttgtgtcctcttcgcctcagtcccagacttcaaggagttctactctgaatccaacatcaatcatgagggcctagagtgtctgaggctgctcaatgagataattgctgattttgatgagctgctctccaagcccaagttcagtggggtggagaagatcaagaccatcggcagcacctacatggcagccacaggcttaaatgccacctctggacaggatgcacaacaggatgctgaacggagctgcagccaccttggcactatggtggaatttgccgtggccctggggtctaagctggacgtcatcaacaagcattcattcaacaacttccgcctgcgagtggggttgaaccatggacccgtagtagctggagttattggggcccagaagccgcaatatgacatttggggcaacacagtgaacgtggccagccgcatggagagtacaggagtccttggcaaaatccaagtgactgaggagacagcatgggccctacagtccctgggctacacctgctacagccggggtgtcatcaaggtgaaaggcaaagggcagctctgcacctacttcctgaacacagacttgacacgaactggacctccttcagctaccctaggctgagattgcactcgccttctaagaacctcaataaagagactctggggtgtctggagcccattgatg

SEQ ID NO: 9798 - protein, 1077 aa, Homo sapiens; identical to SEQ ID NO: 1548

SEQ ID NO: 9799 - DNA, 643 bp, Homo sapiens
tacttacaccttaagctctacttctaaactgggggtggggtgggggtggtttcaggcatcatggagttggggctgaacactcaggagctgggcttcccctgctctgtgtctccccatggccccgggtgaccctccccagaatgagtactactgccgcctggacttcctgtggaagaagaagctgaggcaggagagggaggagacagagacgatggagaacctgactcggctgctcttggagaacgtgctccctgcacacgtggccccccagttcattggccagaaccggcgcaacgaggatctctaccaccagtcctatgaatgcgtttgtgtcctcttcgcctcagtcccagacttcaaggagttctactctgaatccaacatcaatcatgagggcctagagtgtctgaggctgctcaatgagataattgctgattttgatgagcctgatcctttaactccaaaggcttggggctgggcttctgggagaggtgatggagagagtaagagagactggggacaggactcttctctatatacagctgctctccaagcccaagttcagtggggtggagaagatcaagaccatcggcagcacctacatggcagccacaggcttaaatgccacctctggacaggatgc

SEQ ID NO: 9800 - protein, 175 aa, Homo sapiens
MAPGDPPQNEYYCRLDFLWKKKLRQEREETETMENLTRLLLENVLPAHVAPQFIGQNRRNEDLYHQSYECVCVLFASVPDFKEFYSESNINHEGLECLRLLNEIIADFDEPDPLTPKAWGWASGRGDGESKRDWGQDSSLYTAALQAQVQWGGEDQDHRQHLHGSHRLKCHLWTG

SEQ ID NO: 9801 - DNA, 926 bp, Homo sapiens
caggatccacccctttggacgagtcttcccctgactcatccctgggtcagctgaaacccagcacaagccaccactgtgcccaagaagctacctgcctcttcaactcctcatctcctctgcagttcttcttcccaacatcatcagactgccctttccaagctcccaatgtgtcctccatgatttccaacctctcctgggagctccctgggtctctgcctctcatcagtgtcccatactccatgcactgctgcacgctgggcttcctctcctgctccctctttctgcacatgagcttcgagctgaagctgctgctgctcctgctgtggctggcggcatcctgctccctcttcctgcactcccatgcctggctgtcggaatgcctcatcgtccgcctctatctgggccccttggactccaggtgtgcacagctgctggacagaggtgccgggccccctgggatggggtgagatgggatacagcagagctgtcctggcctcaccgacctgaatcacccacagggcaaagtgggagggaagcggaggcctacatgggggcagggagaaggccaggaagggggaaagcaaggggtcaccctgatccatggccccttcaggcccggagtgctgaaggagcccaaactgatgggtgctatctccttcttcatcttcttcttcaccctccttgtcctggctcgccaggtaagtcacccagctcagccccaccagggcccacctatgagtggcccccatatctgtgacttgatctttctaatctccagggttgaatgcccattggaagcttctaagcgagccttcctgcttcctttcttctccttcactccctgcccctcctttctcccacacccctatctgggaaagcccatgctttagaaaaagtctgctgccaattctctatccctagtctga

SEQ ID NO: 9802 - protein, 96 aa, Homo sapiens
MISNLSWELPGSLPLISVPYSMHCCTLGFLSCSLFLHMSFELKLLLLLLWLAASCSLFLHSHAWLSECLIVRLYLGPLDSRCAQLLDRGAGPPGMG

SEQ ID NO: 9803 - DNA, 1305 bp, Homo sapiens
cggcgagcgtgactccgccatcaggtccccggctccctccccggacctagcccactccgctgcgccagcgccgcgggcagtgagttcggggatcaggggaacccggggctccctcgcaccaaccccaaatcctgccctcctggcgatgaggcttttctagggcacctctacaatccgggtttgagggaggaggaggaaaggactgagggatcccctcatcgccagctgggagcgggctgggaggccgcagggagggcctgaaaaaggagacgggattgccacgaggttgggggcgcggggtggtagcggctttgagcgggtgagaaaagctcaggtggggcccgccgggccgaaggaggtaacccggcgcccggccctagccagccccggggctcggggctggggagatcatggcccgcctcttcagcccccggccgccccccagcgaagacctcttctacgagacctactacagcctgagccagcagtacccgctgctgctgctgctgctggggatcgtgctctgtgcgctcgcggcgctgctcgcagtggcctgggccagcggcagggagctgacctcagacccgagcttcctgaccactgtgctgtgcgcgctgggcggcttctcgctgctgctgggcctcgcttcccgggagcagcgactgcagcgctggacgcgtcccctgtccggcttggtatgggtcgcgctgctagcgctaggccacgccttcctgttcaccgggggcgtggtgagcgcctgggaccaggtgagaggggcggcaggcggggcagcggggacggcccgggcttcgatccctcaccaggccttgaatagccccacttgggccttcggcttcccgcgccccgcccccaggtgtcctattttctcttcgtcatcttcacggcgtatgccatgctgcccttgggcatgcgggacgccgccgtcgcgggcctcgcctcctcactctcgcatctgctggtcctcgggctgtatcttgggccacagccggactcacggcctgcactgctgccgcaggtgagcacgcaagtagcacaggctgcgctcaggacggctctgccacgtgctagtaggctccttttagggggttgttgagctgtgactccaagtcaaggtgcaacgctgggcgcaggatacccaaccgtgctttcgcagagctggtacaacagtgtgatgcaatgcctgctgttaccagaagagggatccaggccacacggaagggagtcgtgtcgtggtttaccccggggacaacagatgtggttaatgaaaccttgacagagaatgaa

SEQ ID NO: 9804 - protein, 209 aa, Homo sapiens
MARLFSPRPPPSEDLFYETYYSLSQQYPLLLLLLGIVLCALAALLAVAWASGRELTSDPSFLTTVLCALGGFSLLLGLASREQRLQRWTRPLSGLVWVALLALGHAFLFTGGVVSAWDQVRGAAGGAAGTARASIPHQALNSPTWAFGFPRPAPRCPIFSSSSSRRMPCCPWACGTPPSRASPPHSRICWSSGCILGHSRTHGLHCCRR

SEQ ID NO: 9805 - DNA, 842 bp, Homo sapiens
accgtccccagcccacccctgagttcccagacaacagattatggaccgagagactactcccttgggtttactctggctcatccaagtcatacccagcaaactcctcccatccctgcaggtaaaggatttcctgtctcagctcaggagcagcaataggagattttctatcccagagtcaggccaaggagggacagaaatggatggctttaggagaaccatagaaaaccagcactctcgtaatgatgtcatggtttctgagtggctaaacaaactgaatctagaggagcctcccagctctgttcctaaaaaatgcccgagccttaccaagaggagcagggcacaagaggagcaggttccacaagcctggacagcaggcacatcttcagattcgatggcccaacctccccagactccagagacaaggcatgaactggtcctgcaggaccccggagccaaatccagtaacagggcgaccgctcgttaacatatacaactgctctggggtgcaagttggagacaacaactacttgactatgcaacagacaactgccttgcccacatggggcttggcaccttcgggcaaggggaggggcttgcagcaccccccaccagtaggttcgcaagaaggccctaaagatcctgaagcctggagcaggccacagggttggtataatcatagcgggaaataaagcaccttccaagcttgcctccaagagttacgagttaaggaagagtgccaccccttgaggcccctgacttccttctagggcagtctggcctgcccacaaactgactttgtgacctgtcccccaggagtcaataaacatgatggaatgctagtc

SEQ ID NO: 9806 - protein, 147 aa, Homo sapiens
MDRETTPLGLLWLIQVIPSKLLPSLQVKDFLSQLRSSNRRFSIPESGQGGTEMDGFRRTIENQHSRNDVMVSEWLNKLNLEEPPSSVPKKCPSLTKRSRAQEEQVPQAWTAGTSSDSMAQPPQTPETRHELVLQDPGAKSSNRATAR

SEQ ID NO: 9807 - DNA, 1879 bp, Homo sapiens
tcaactcggaaaaagggtaacaacccggaaagtagactcaccgtcttggtctagagactgacccctgcacagacagaccccttcccctctctgcgaaaggaccaagccccagaagtcactccatctcctacggctcgcaatttccagaggccccctggcaccttccagcctgatgtcgtgcgtcaagttatggcccagcggtgcccccgcccccttggtgtccatcgaggaactggagaaccaggagctcgtcggcaaaggcgggttcggcacagtgttccgggcgcaacataggaagtggggctacgatgtggcggtcaagatcgtaaactcgaaggcgatatccagggaggtcaaggccatggcaagtctggataacgaattcgtgctgcgcctagaaggggttatcgagaaggtgaactgggaccaagatcccaagccggctctggtgactaaattcatggagaacggctccttgtcggggctgctgcagtcccagtgccctcggccctggccgctcctttgccgcctgctgaaagaagtggtgcttgggatgttttacctgcacgaccagaacccggtgctcctgcaccgggacctcaagccatccaacgtcctgctggacccagagctgcacgtcaagctggcagattttggcctgtccacatttcagggaggctcacagtcagggacagggtccggggagccagggggcaccctgggctacttggccccagaactgtttgttaacgtaaaccggaaggcctccacagccagtgacgtctacagcttcgggatcctaatgtgggcagtgcttgctggaagagaagttgagttgccaaccgaaccatcactcgtgtacgaagcagtgtgcaacaggcagaaccggccttcattggctgagctgccccaagccgggcctgagactcccggcttagaaggactgaaggagctaatgcagctctgctggagcagtgagcccaaggacagaccctccttccaggaatgcctaccaaaaactgatgaagtcttccagatggtggagaacaatatgaatgctgctgtctccacggtaaaggatttcctgtctcagctcaggagcagcaataggagattttctatcccagagtcaggccaaggagggacagaaatggatggctttaggagaaccatagaaaaccagcactctcgtaatgatgtcatggtttctgagtggctaaacaaactgaatctagaggagcctcccagctctgttcctaaaaaatgcccgagccttaccaagaggagcagggcacaagaggagcaggttccacaagcctggacagcaggcacatcttcagattcgatggcccaacctccccagactccagagacctcaactttcagaaaccagatgcccagccctacctcaactggaacaccaagtcctggaccccgagggaatcagggggctgagagacaaggcatgaactggtcctgcaggaccccggagccaaatccagtaacagggcgaccgctcgttaacatatacaactgctctggggtgcaagttggagacaacaactacttgactatgcaacagacaactgccttgcccacatggggcttggcaccttcgggcaaggggaggggcttgcagcaccccccaccagtaggttcgcaagaaggccctaaagatcctgaagcctggagcaggccacagggttggtataatcatagcgggaaataaagcaccttccaagcttgcctccaagagttacgagttaaggaagagtgccaccccttgaggcccctgacttccttctagggcagtctggcctgcccacaaactgactttgtgacctgtcccccaggagtcaataaacatgatggaatgcta

SEQ ID NO: 9808 - protein, 518 aa, Homo sapiens; identical to SEQ ID NO: 1550

SEQ ID NO: 9809 - DNA, 2677 bp, Homo sapiens
taagggaagttgttcagtcaactcggaaaaagggtaacaacccggaaagtagactcaccgtcttggtctagagactgacccctgcacagacagaccccttcccctctctgcgaaaggaccaagccccagaagtcactccatctcctacggctcgcaatttccagaggccccctggcaccttccagcctgatgtcgtgcgtcaagttatggcccagcggtgcccccgcccccttggtgtccatcgaggaactggagaaccaggagctcgtcggcaaaggcgggttcggcacagtgttccgggcgcaacataggaagtggggctacgatgtggcggtcaagatcgtaaactcgaaggcgatatccagggaggtcaaggccatggcaagtctggataacgaattcgtgctgcgcctagaaggggttatcgagaaggtgaactgggaccaagatcccaagccggctctggtgactaaattcatggagaacggctccttgtcggggctgctgcagtcccagtgccctcggccctggccgctcctttgccgcctgctgaaagaagtggtgcttgggatgttttacctgcacgaccagaacccggtgctcctgcaccgggacctcaagccatccaacgtcctgctggacccagagctgcacgtcaaggtcagctggtctacacccctctcagcctcaagacaaggccccagagctgctccagccaggcccgccggacactagacctccagagccctgtctattgaataggcgtagcctctctctctggacacagggctgccaggggacaaagcccagccaggagttttagctcctgcctaccaggtgatagaggccctgagccacacgagtcatttccaccagctgccccaccagcccctccaaagagtcatggctgacccagccctggagactcagaccttgacctagccctaccacaaggcacctagatctaccatccaagggaacctcttcccttgacctccacactccctttacaaagctgaacctgcaccttctgggggcaggggggttcctggaggctctctggcccccttgtcttccctacctcccacttctttccttcctttgcagctggcagattttggcctgtccacatttcagggaggctcacagtcagggacagggtccggggagccagggggcaccctgggctacttggccccagaactgtttgttaacgtaaaccggaaggcctccacagccagtgacgtctacaggtaaggatcccggcccaaacacacagccaggattcctacacttctctgggccctcccaggggatgatgtataggaaaggagtcttgccagtgattggaccgatcctcagctttgtgtctcctgcagcttcgggatcctaatgtgggcagtgcttgctggaagagaagttgagtgtaagactctaggaggattctgggatccttaaccccaggtgcccttctcttgaaagccccaaggcttccccttcccgctcacctacttagactgccctcctccctcctcgtgcccccacattacactccctgcctctttccatgatgaagcagataattcccttttaccctgaatgccttctcttctcaccctcctcccctactccagtgccaaccgaaccatcactcgtgtacgaagcagtgtgcaacaggcagaaccggccttcattggctgagctgccccaagccgggcctgagactcccggcttagaaggactgaaggagctaatgcagctctgctggagcagtgagcccaaggacagaccctccttccaggaatgcctaccaaaaactgatgaagtcttccagatggtggagaacaatatgaatgctgctgtctccacggtaaaggatttcctgtctcagctcaggagcagcaataggagattttctatcccagagtcaggccaaggagggacagaaatggatggctttaggagaaccatagaaaaccagcactctcgtaatgatgtcatggtttctgagtggctaaacaaactgaatctagaggagcctcccagctctgttcctaaaaaatgcccgagccttaccaagaggagcagggcacaagaggagcaggttccacaagcctggacagcaggcacatcttcagattcgatggcccaacctccccagactccagagacctcaactttcagaaaccagatgcccagccctacctcaactggaacaccaagtcctggaccccgagggaatcagggggctgagagacaaggcatgaactggtcctgcaggaccccggagccaaatccagtaacagggcgaccgctcgttaacatatacaactgctctggggtgcaagttggagacaacaactacttgactatgcaacagacaactgccttgcccacatggggcttggcaccttcgggcaaggggaggggcttgcagcaccccccaccagtaggttcgcaagaaggccctaaagatcctgaagcctggagcaggccacagggttggtataatcatagcgggaaataaagcaccttccaagcttgcctccaagagttacgagttaaggaagagtgccaccccttgaggcccctgacttccttctagggcagtctggcctgcccacaaactgactttgtgacctgtcccccaggagtcaataaacatgatggaatgcta

SEQ ID NO: 9810 - protein, 319 aa, Homo sapiens
MMKQIIPFYPECLLFSPSSPTPVPTEPSLVYEAVCNRQNRPSLAELPQAGPETPGLEGLKELMQLCWSSEPKDRPSFQECLPKTDEVFQMVENNMNAAVSTVKDFLSQLRSSNRRFSIPESGQGGTEMDGFRRTIENQHSRNDVMVSEWLNKLNLEEPPSSVPKKCPSLTKRSRAQEEQVPQAWTAGTSSDSMAQPPQTPETSTFRNQMPSPTSTGTPSPGPRGNQGAERQGMNWSCRTPEPNPVTGRPLVNIYNCSGVQVGDNNYLTMQQTTALPTWGLAPSGKGRGLQHPPPVGSQEGPKDPEAWSRPQGWYNHSGK

SEQ ID NO: 9811 - DNA, 1300 bp, Homo sapiens
atgtcgtgcgtcaagttatggcccagcggtgcccccgcccccttggtgtccatcgaggaactggagaaccaggagctcgtcggcaaaggcgggttcggcacagtgttccgggcgcaacataggaagtggggctacgatgtggcggtcaagatcgtaaactcgtgagtgaccccggttgaccccagccgcaatctggccaaaaaggtggagccactgtgctctggggcctgaatggcgaagggagggattttcccacgaccccggtgcgactccagctctctcctggagtgtaggaaggcgatatccagggaggtcaaggccatggcaagtctggataacgaattcgtgctgcgcctagaaggggttatcgagaaggtgaactgggaccaagatcccaagccggctctggtgactaaattcatggagaacggctccttgtcggggctgctgcagtcccagtgccctcggccctggccgctcctttgccgcctgctgaaagaagtggtgcttgggatgttttacctgcacgaccagaacccggtgctcctgcaccgggacctcaagccatccaacgtcctgctggacccagagctgcacgtcaaggtcagctggtctacacccctctcagcctcaagacaaggccccagagctgctccagccaggcccgccggacactagacctccagagccctgtctattgaataggcgtagcctctctctctggacacagggctgccaggggacaaagcccagccaggagttttagctcctgcctaccaggtgatagaggccctgagccacacgagtcatttccaccagctgccccaccagcccctccaaagagtcatggctgacccagccctggagactcagaccttgacctagccctaccacaaggcacctagatctaccatccaagggaacctcttcccttgacctccacactccctttacaaagctgaacctgcaccttctgggggcaggggggttcctggaggctctctggcccccttgtcttccctacctcccacttctttccttcctttgcagctggcagattttggcctgtccacatttcagggaggctcacagtcagggacagggtccggggagccagggggcaccctgggctacttggccccagaactgtttgttaacgtaaaccggaaggcctccacagccagtgacgtctacaggtaaggatcccggcccaaacacacagccaggattcctacacttctctgggccctcccaggggatgatgtataggaaaggagtcttgccagtgattggaccgatc

SEQ ID NO: 9812 - protein, 54 aa, Homo sapiens [sequence omitted]

SEQ ID NO: 9813 - DNA, 1116 bp, Homo sapiens
aaggaggactcggtccactccgttacgtgtacatccaacaagatcggcgttaaggttctttttcttcaggatcaggcacagagactgactgaatggctccaattatcaggatttgaaaacccagtatcagaatctaccactttgtatggaggaggggaggagacgagtggggaccagcttgacatccagtcttcacctggacatatggaaagaacaaatgtgcgatctgctcgttccctctgaaggtctctgttacgtatttcctcctctcctccagagcataataaccaatgactgctctcagaaagaacaggcctgagggagagggaaaagcggatacccacctgtgtcgctgtttgcgtgccaagtccaggaacagtccatacagccctgctgcatcccacgacgctgtcacaaagcaggagttcatccgaggccaagatgttaattattcatactgcatgactgaggattttggaggcagagagagattcatctgcaatatttggaacaccaatggaggtctacgtcaacacagaatttatacagcagctggtgctagtcagagctaatgacagaatttcagtttaataaaaagacccccaactgagcacaccatcttgaaaaaagtatacttatcaaacagctttcaatcagttcaagagagacaccttaattggggagaggaagaattgcagagtagtttgtaatcatgccaattccagatcaataactgcatgtctgttctttggtagaaatagcttttgctttatattaagtaatcacatatatattctctctatttggataaggaaaccttcgctttatttgacaatgtataatgatatactcttctaattcacctctgtgtcttcacaataaacatgagtaaaatttagacaagtgatggtaaaggtcaatataattatttatttttaaaataaattttgtatctaacaggaaagcagttcttatgaaatttttatattttcaaaaattgttttgttcaaataaaattttatgagtaaagttaaatgatggtggtttaattataagaagagtatactgaacactgataatctgatttgtatgcaattacttcggggaaggctgtac

SEQ ID NO: 9814 - protein, 93 aa, Homo sapiens
MTALRKNRPEGEGKADTHLCRCLRAKSRNSPYSPAASHDAVTKQEFIRGQDVNYSYCMTEDFGGRERFICNIWNTNGGLRQHRIYTAAGASQS

SEQ ID NO: 9815 - DNA, 2070 bp, Homo sapiens
tttcacattaagaactagaagtgacactgctgttttctcaccagcagaatactaacttttcaagtcccattcatattacgacaaaaaagaatggcttcacaaatctcattcattttataagtagcatcatcttcatcttaaaaatataagtcatctaattgtttacagtgttacacactgttcaaagaaccacatagctctgattccttccttccaaaaatttacattccaaggaagatatactgatgtgaagactcaccaaatgcagacaagaactattaaaagtaccccatggatggacctccaaatgagtttagggtaattgcgcttaaaatattaggaccaaagtacatttattttatagatggaggaggggaggagacgagtggggaccagcttgacatccagtcttcacctggacatatggaaagaacaaatgtgcgatctgctcgttccctctgaaggtctctgttacgtatttcctcctctcctccagagcataataaccaatgactgctctcagaaaggtactgtgaccaccacttgcttggctctccaacttcctcccccatttccctcttgactcctgtttgccataacaccttctgtcccctagccttgcctcaggtccccgacgaatcctgcccttaatctgtgggggtggtaggtggcactggtttgaagagcttactggatctccctcagtgagtcagcctggagttgtgtttgaaaaccacaggccctgactgtggctgtcagacctcccagacaccacctgctgctgcctatcatcatcttcaggtgctgggctcccctgtgggcctcgtctgcccgccctctgctgcagctgtcccatgggcgcccgccctctctgacaccacaagagagcccatctagattccaggaaaaaactcatctttatttgccttcttcccactgaaggtaaaagcaacattaataaccacaacaaatacttagtgagtgcttactattattcatttaattgttggcccttccatccctggccatgatgagagacatgccatagcttactcctaaagagacctgaggacacacgtgcacaaacatattgggcatatcatcaatggcatcaaaactgattttccctgtctacccagaacaggcctgagggagagggaaaagcggatacccacctgtgtcgctgtttgcgtgccaagtccaggaacagtccatacagccctgctgcatcccacgacgctgtcacaaagcaggagttcatccgaggccaagatggagaaactgaggcccagaaattgatgtccagaatgctttgctcttagccactgtactattatggcatattttatctttatgtattgcatcatttcatggattcaagtttatcaatgtcctttgacaagtttaaaaatctgtctgctaaaatctatccaatacattaaggaaaagtcccacttggcacatctcccacaccagatgttaattattcatactgcatgactgaggattttggaggcagagagagattcatctgcaatatttggaacaccaatggaggtctacgtcaacacagaatttatacagcagctggtgctagtcagagctaatgacagaatttcagtttaataaaaagacccccaactgagcacaccatcttgaaaaaagtatacttatcaaacagctttcaatcagttcaagagagacaccttaattggggagaggaagaattgcagagtagtttgtaatcatgccaattccagatcaataactgcatgtctgttctttggtagaaatagcttttgctttatattaagtaatcacatatatattctctctatttggataaggaaaccttcgctttatttgacaatgtataatgatatactcttctaattcacctctgtgtcttcacaataaacatgagtaaaatttagacaagtgatggtaaaggtcaatataattatttatttttaaaataaattttgtatctaacaggaaagcagttcttatgaaatttttatattttcaaaaattgttttgttcaaataaaattttatgagtaaagttaaa

SEQ ID NO: 9816 - protein, 54 aa, Homo sapiens
MAYFIFMYCIISWIQVYQCPLTSLKICLLKSIQYIKEKSHLAHLPHQMLIIHTA

SEQ ID NO: 9817 - DNA, 1735 bp, Homo sapiens
gggagctgtgggcaggagaggaaggaaagcagctctctcagctagcgagggggtcagggactgggccaagctcagaagcggggagaagagcgagacagagatgctctgagcaggggagacagggatcccgggctgctgccgctaccaacaagggtacacactgcggtcctcaaggccaggaggggggtgggggcagggaatgcctcagccaacagggcagcggctcggccctgctgctggcccggtgggaagtagcctggggccccgcgactgaaatccgagccaggcctgggcagtctccgctagaaacgctctgggcgcgcactcctggagacgcggaggcccgggcgctccagaccagtgtccttgtaggaggcttcttcacgaagcttagagtttggcctttcatagggaaagacttgctcgggagcaagtctaagggattttaagggattttaaatcttcctgggccagggctagggagctctagtgacagtgtcttggtctggaatccaactctccaattttgaggccgcagggaggaattctgagactttagaggccgcacagccttcagcgcgctcaccgcgtccaggcgtcagtgaggggctatctcgaggcgcgagtgcacaaaaggtagcgcgagtctcttctcaggcgatccagataagaggaaatgagagccgggttttctgacttccaactcattagggaccaggttctttttcttcaggatcaggcacagagactgactgaatggctccaattatcaggatttgaaaacccagtatcagaatctaccactttgtgcctgagggagagggaaaagcggatacccacctgtgtcgctgtttgcgtgccaagtccaggaacagtccatacagccctgctgcatcccacgacgctgtcacaaagcaggagttcatccgaggccaagatggagaaactgaggcccagaaattgatgtccagaatgctttgctcttagccactgtactattatggcatattttatctttatgtattgcatcatttcatggattcaagtttatcaatgtcctttgacaagtttaaaaatctgtctgctaaaatctatccaatacattaaggaaaagtcccacttggcacatctcccacaccagatgttaattattcatactgcatgactgaggattttggaggcagagagagattcatctgcaatatttggaacaccaatggaggtctacgtcaacacagaatttatacagcagctggtgctagtcagagctaatgacagaatttcagtttaataaaaagacccccaactgagcacaccatcttgaaaaaagtatacttatcaaacagctttcaatcagttcaagagagacaccttaattggggagaggaagaattgcagagtagtttgtaatcatgccaattccagatcaataactgcatgtctgttctttggtagaaatagcttttgctttatattaagtaatcacatatatattctctctatttggataaggaaaccttcgctttatttgacaatgtataatgatatactcttctaattcacctctgtgtcttcacaataaacatgagtaaaatttagacaagtgatggtaaaggtcaatataattatttatttttaaaataaattttgtatctaacaggaaagcagttcttatgaaatttttatattttcaaaaattgttttgttcaaataaaattttatgagtaaagttaaa

SEQ ID NO: 9818 - protein, 95 aa, Homo sapiens
MRAGFSDFQLIRDQVLFLQDQAQRLTEWLQLSGFENPVSESTTLCLREREKRIPTCVAVCVPSPGTVHTALLHPTTLSQSRSSSEAKMEKLRPRN

SEQ ID NO: 9819 - DNA, 1531 bp, Homo sapiens
gggagctgtgggcaggagaggaaggaaagcagctctctcagctagcgagggggtcagggactgggccaagctcagaagcggggagaagagcgagacagagatgctctgagcaggggagacagggatcccgggctgctgccgctaccaacaagggtacacactgcggtcctcaaggccaggaggggggtgggggcagggaatgcctcagccaacagggcagcggctcggccctgctgctggcccggtgggaagtagcctggggccccgcgactgaaatccgagccaggcctgggcagtctccgctagaaacgctctgggcgcgcactcctggagacgcggaggcccgggcgctccagaccagtgtccttgtaggaggcttcttcacgaagcttagagtttggcctttcatagggaaagacttgctcgggagcaagtctaagggattttaagggattttaaatcttcctgggccagggctagggagctctagtgacagtgtcttggtctggaatccaactctccaattttgaggccgcagggaggaattctgagactttagaggccgcacagccttcagcgcgctcaccgcgtccaggcgtcagtgaggggctatctcgaggcgcgagtgcacaaaaggtagcgcgagtctcttctcaggcgatccagataagaggaaatgagagccgggttttctgacttccaactcattagggaccaggttctttttcttcaggatcaggcacagagactgactgaatggctccaattatcaggatttgaaaacccagtatcagaatctaccactttgtgcctgagggagagggaaaagcggatacccacctgtgtcgctgtttgcgtgccaagtccaggaacagtccatacagccctgctgcatcccacgacgctgtcacaaagcaggagttcatccgaggccaagatgttaattattcatactgcatgactgaggattttggaggcagagagagattcatctgcaatatttggaacaccaatggaggtctacgtcaacacagaatttatacagcagctggtgctagtcagagctaatgacagaatttcagtttaataaaaagacccccaactgagcacaccatcttgaaaaaagtatacttatcaaacagctttcaatcagttcaagagagacaccttaattggggagaggaagaattgcagagtagtttgtaatcatgccaattccagatcaataactgcatgtctgttctttggtagaaatagcttttgctttatattaagtaatcacatatatattctctctatttggataaggaaaccttcgctttatttgacaatgtataatgatatactcttctaattcacctctgtgtcttcacaataaacatgagtaaaatttagacaagtgatggtaaaggtcaatataattatttatttttaaaataaattttgtatctaacaggaaagcagttcttatgaaatttttatattttcaaaaattgttttgttcaaataaaattttatgagtaaagttaaa

SEQ ID NO: 9820 - protein, 94 aa, Homo sapiens; identical to SEQ ID NO: 1552

SEQ ID NO: 9821 - DNA, 1403 bp, Homo sapiens
gggagctgtgggcaggagaggaaggaaagcagctctctcagctagcgagggggtcagggactgggccaagctcagaagcggggagaagagcgagacagagatgctctgagcaggggagacagggatcccgggctgctgccgctaccaacaagggtacacactgcggtcctcaaggccaggaggggggtgggggcagggaatgcctcagccaacagggcagcggctcggccctgctgctggcccggtgggaagtagcctggggccccgcgactgaaatccgagccaggcctgggcagtctccgctagaaacgctctgggcgcgcactcctggagacgcggaggcccgggcgctccagaccagtgtccttgtaggaggcttcttcacgaagcttagagtttggcctttcatagggaaagacttgctcgggagcaagtctaagggattttaagggattttaaatcttcctgggccagggctagggagctctagtgacagtgtcttggtctggaatccaactctccaattttgaggccgcagggaggaattctgagactttagaggccgcacagccttcagcgcgctcaccgcgtccaggcgtcagtgaggggctatctcgaggcgcgagtgcacaaaaggtagcgcgagtctcttctcaggcgatccagataagaggaaatgagagccgggttttctgacttccaactcattagggaccaggttctttttcttcaggatcaggcacagagactgactgaatggctccaattatcaggatttgaaaacccagtatcagaatctaccactttgtatgttaattattcatactgcatgactgaggattttggaggcagagagagattcatctgcaatatttggaacaccaatggaggtctacgtcaacacagaatttatacagcagctggtgctagtcagagctaatgacagaatttcagtttaataaaaagacccccaactgagcacaccatcttgaaaaaagtatacttatcaaacagctttcaatcagttcaagagagacaccttaattggggagaggaagaattgcagagtagtttgtaatcatgccaattccagatcaataactgcatgtctgttctttggtagaaatagcttttgctttatattaagtaatcacatatatattctctctatttggataaggaaaccttcgctttatttgacaatgtataatgatatactcttctaattcacctctgtgtcttcacaataaacatgagtaaaatttagacaagtgatggtaaaggtcaatataattatttatttttaaaataaattttgtatctaacaggaaagcagttcttatgaaatttttatattttcaaaaattgttttgttcaaataaaattttatgagtaaagttaaa

SEQ ID NO: 9822 - protein, 87 aa, Homo sapiens
MRAGFSDFQLIRDQVLFLQDQAQRLTEWLQLSGFENPVSESTTLYVNYSYCMTEDFGGRERFICNIWNTNGGLRQHRIYTAAGASQS

SEQ ID NO: 9823 - DNA, 1254 bp, Homo sapiens
gctagcgagggggtcagggactgggccaagctcagaagcggggagaagagcgagacagagatgctctgagcaggggagacagggatcccgggctgctgccgctaccaacaagggtacacactgcggtcctcaaggccaggaggggggtgggggcagggaatgcctcagccaacagggcagcggctcggccctgctgctggcccggtgggaagtagcctggggccccgcgactgaaatccgagccaggcctgggcagtctccgctagaaacgctctgggcgcgcactcctggagacgcggaggcccgggcgctccagaccagtgtccttgtaggaggcttcttcacgaagcttagagtttggcctttcatagggaaagacttgctcgggagcaagtctaagggattttaagggattttaaatcttcctgggccagggctagggagctctagtgacagtgtcttggtctggaatccaactctccaattttgaggccgcagggaggaattctgagactttagaggccgcacagccttcagcgcgctcaccgcgtccaggcgtcagtgaggggctatctcgaggcgcgagtgcacaaaaggtagcgcgagtctcttctcaggcgatccagataagaggaaatgagagccgggttttctgacttccaactcattagggaccaggttctttttcttcaggatcaggcacagagactgactgaatggctccaattatcaggatttgaaaacccagtatcagaatctaccactttgtgcctgagggagagggaaaagcggatacccacctgtgtcgctgtttgcgtgccaagtccaggaacagtccatacagccctgctgcatcccacgacgctgtcacaaagcaggagttcatccgaggccaaggtgttgtcatgagaatattcgttaaagtagggacgctgactttgttcttgggcagattctcttcctgtggagtatccagcctgtttgcctagttttcctgttcttctggggtctgatctctatctgttttactgcagtccagttaccaaagtggtataagtaaaattgaaagaattctaaataccttttccccccacgttagctgcctcacgttaatgtggtcttacggtctgcaaataagtgttttgatgatttggcgactgcagttacccatactagctctcctaccactcactactgacagttaattattatcgaatatccacccacccagggtgagttataagttataccagg

SEQ ID NO: 9824 - protein, 90 aa, Homo sapiens
MRAGFSDFQLIRDQVLFLQDQAQRLTEWLQLSGFENPVSESTTLCLREREKRIPTCVAVCVPSPGTVHTALLHPTTLSQSRSSSEAKVLS

SEQ ID NO: 9825 - DNA, 2343 bp, Homo sapiens
gaaacttaaaggtgtttaccttgtcatcagcatgtaagctaattatctcgggcaagatgtaggcttctattgtcttgttgctttagcgcttacgccccgcctctggtggctgcctaaaacctggcgccgggctaaaacaaacgcgaggcagcccccgagcctccactcaagccaattaaggaggactcggtccactccgttacgtgtacatccaacaagatcggcgttaaggtaacaccagaatatttggcaaagggagaaaaaaaaagcagcgaggcttcgccttccccctctcccttttttttcctcctcttccttcctcctccagccgccgccgaatcatgtcgatgagtccaaagcacacgactccgttctcagtgtctgacatcttgagtcccctggaggaaagctacaagaaagtgggcatggagggcggcggcctcggggctccgctggcggcgtacaggcagggccaggcggcaccgccaacagcggccatgcagcagcacgccgtggggcaccacggcgccgtcaccgccgcctaccacatgacggcggcgggggtgccccagctctcgcactccgccgtggggggctactgcaacggcaacctgggcaacatgagcgagctgccgccgtaccaggacaccatgaggaacagcgcctctggccccggatggtacggcgccaacccagacccgcgcttccccgccatctcccgcttcatgggcccggcgagcggcatgaacatgagcggcatgggcggcctgggctcgctgggggacgtgagcaagaacatggccccgctgccaagcgcgccgcgcaggaagcgccgggtgctcttctcgcaggcgcaggtgtacgagctggagcgacgcttcaagcaacagaagtacctgtcggcgccggagcgcgagcacctggccagcatgatccacctgacgcccacgcaggtcaagatctggttccagaaccaccgctacaaaatgaagcgccaggccaaggacaaggcggcgcagcagcaactgcagcaggacagcggcggcggcgggggcggcgggggcaccgggtgcccgcagcagcaacaggctcagcagcagtcgccgcgacgcgtggcggtgccggtcctggtgaaagacggcaaaccgtgccaggcgggtgcccccgcgccgggcgccgccagcctacaaggccacgcgcagcagcaggcgcagcaccaggcgcaggccgcgcaggcggcggcagcggccatctccgtgggcagcggtggcgccggccttggcgcacacccgggccaccagccaggcagcgcaggccagtctccggacctggcgcaccacgccgccagccccgcggcgctgcagggccaggtatccagcctgtcccacctgaactcctcgggctcggactacggcaccatgtcctgctccaccttgctatacggtcggacctggtgagaggacgccgggccggccctagcccagcgctctgcctcaccgcttccctcctgcccgccacacagaccaccatccaccgctgctccacgcgcttcgacttttcttaacaacctggccgcgtttagaccaaggaacaaaaaaaccacaaaggccaaactgctggacgtctttctttttttccccccctaaaatttgtgggtttttttttttaaaaaaagaaaatgaaaaacaaccaagcgcatccaatctcaaggaatctttaagcagagaagggcataaaacagctttggggtgtctttttttggtgattcaaatgggttttccacgctagggcggggcacagattggagagggctctgtgctgacatggctctggactctaaagaccaaacttcactctgggcacactctgccagcaaagaggactcgcttgtaaataccaggatttttttttttttttgaagggaggacgggagctggggagaggaaagagtcttcaacataacccacttgtcactgacacaaaggaagtgccccctccccggcaccctctggccgcctaggctcagcggcgaccgccctccgcgaaaatagtttgtttaatgtgaacttgtagctgtaaaacgctgtcaaaagttggactaaatgcctagtttttagtaatctgtacattttgttgtaaaaagaaaaaccactcccagtccccagcccttcacattttttatgggcattgacaaatctgtgtatattatttggcagtttggtatttgcggcgtcagtctttttctgttgtaacttatgtagatatttggcttaaatatagttcctaagaagcttctaataaattatacaaattaaaaagattctttttctgattaaaaccctc

SEQ ID NO: 9826 - protein, 371 aa, Homo sapiens; identical to SEQ ID NO: 1554

SEQ ID NO: 9827 - DNA, 2242 bp, Homo sapiens
gcccgatgtggtccggaggcagtgggaaggcgcggggctgggaggccgcggcgggagggaggagcagccccggcaggctcagcgcttacgccccgcctctggtggctgcctaaaacctggcgccgggctaaaacaaacgcgaggcagcccccgagcctccactcaagccaattaaggaggactcggtccactccgttacgtgtacatccaacaagatcggcgttaagccgccgccgaatcatgtcgatgagtccaaagcacacgactccgttctcagtgtctgacatcttgagtcccctggaggaaagctacaagaaagtgggcatggagggcggcggcctcggggctccgctggcggcgtacaggcagggccaggcggcaccgccaacagcggccatgcagcagcacgccgtggggcaccacggcgccgtcaccgccgcctaccacatgacggcggcgggggtgccccagctctcgcactccgccgtggggggctactgcaacggcaacctgggcaacatgagcgagctgccgccgtaccaggacaccatgaggaacagcgcctctggccccggatggtacggcgccaacccagacccgcgcttccccgccatctcccgcttcatgggcccggcgagcggcatgaacatgagcggcatgggcggcctgggctcgctgggggacgtgagcaagaacatggccccgctgccaagcgcgccgcgcaggaagcgccgggtgctcttctcgcaggcgcaggtgtacgagctggagcgacgcttcaagcaacagaagtacctgtcggcgccggagcgcgagcacctggccagcatgatccacctgacgcccacgcaggtcaagatctggttccagaaccaccgctacaaaatgaagcgccaggccaaggacaaggcggcgcagcagcaactgcagcaggacagcggcggcggcgggggcggcgggggcaccgggtgcccgcagcagcaacaggctcagcagcagtcgccgcgacgcgtggcggtgccggtcctggtgaaagacggcaaaccgtgccaggcgggtgcccccgcgccgggcgccgccagcctacaaggccacgcgcagcagcaggcgcagcaccaggcgcaggccgcgcaggcggcggcagcggccatctccgtgggcagcggtggcgccggccttggcgcacacccgggccaccagccaggcagcgcaggccagtctccggacctggcgcaccacgccgccagccccgcggcgctgcagggccaggtatccagcctgtcccacctgaactcctcgggctcggactacggcaccatgtcctgctccaccttgctatacggtcggacctggtgagaggacgccgggccggccctagcccagcgctctgcctcaccgcttccctcctgcccgccacacagaccaccatccaccgctgctccacgcgcttcgacttttcttaacaacctggccgcgtttagaccaaggaacaaaaaaaccacaaaggccaaactgctggacgtctttctttttttccccccctaaaatttgtgggtttttttttttaaaaaaagaaaatgaaaaacaaccaagcgcatccaatctcaaggaatctttaagcagagaagggcataaaacagctttggggtgtctttttttggtgattcaaatgggttttccacgctagggcggggcacagattggagagggctctgtgctgacatggctctggactctaaagaccaaacttcactctgggcacactctgccagcaaagaggactcgcttgtaaataccaggatttttttttttttttgaagggaggacgggagctggggagaggaaagagtcttcaacataacccacttgtcactgacacaaaggaagtgccccctccccggcaccctctggccgcctaggctcagcggcgaccgccctccgcgaaaatagtttgtttaatgtgaacttgtagctgtaaaacgctgtcaaaagttggactaaatgcctagtttttagtaatctgtacattttgttgtaaaaagaaaaaccactcccagtccccagcccttcacattttttatgggcattgacaaatctgtgtatattatttggcagtttggtatttgcggcgtcagtctttttctgttgtaacttatgtagatatttggcttaaatatagttcctaagaagcttctaataaattatacaaattaaaaagattctttttctgattaaaaccctc

SEQ ID NO: 9828 - protein, 371 aa, Homo sapiens; identical to SEQ ID NO: 1554

SEQ ID NO: 9829 - DNA, 2077 bp, Homo sapiens
agtgcggccccagggttcgtccccagactcgctcgctcatttgttggcgactggggctccagccgccgccgaatcatgtcgatgagtccaaagcacacgactccgttctcagtgtctgacatcttgagtcccctggaggaaagctacaagaaagtgggcatggagggcggcggcctcggggctccgctggcggcgtacaggcagggccaggcggcaccgccaacagcggccatgcagcagcacgccgtggggcaccacggcgccgtcaccgccgcctaccacatgacggcggcgggggtgccccagctctcgcactccgccgtggggggctactgcaacggcaacctgggcaacatgagcgagctgccgccgtaccaggacaccatgaggaacagcgcctctggccccggatggtacggcgccaacccagacccgcgcttccccgccatctcccgcttcatgggcccggcgagcggcatgaacatgagcggcatgggcggcctgggctcgctgggggacgtgagcaagaacatggccccgctgccaagcgcgccgcgcaggaagcgccgggtgctcttctcgcaggcgcaggtgtacgagctggagcgacgcttcaagcaacagaagtacctgtcggcgccggagcgcgagcacctggccagcatgatccacctgacgcccacgcaggtcaagatctggttccagaaccaccgctacaaaatgaagcgccaggccaaggacaaggcggcgcagcagcaactgcagcaggacagcggcggcggcgggggcggcgggggcaccgggtgcccgcagcagcaacaggctcagcagcagtcgccgcgacgcgtggcggtgccggtcctggtgaaagacggcaaaccgtgccaggcgggtgcccccgcgccgggcgccgccagcctacaaggccacgcgcagcagcaggcgcagcaccaggcgcaggccgcgcaggcggcggcagcggccatctccgtgggcagcggtggcgccggccttggcgcacacccgggccaccagccaggcagcgcaggccagtctccggacctggcgcaccacgccgccagccccgcggcgctgcagggccaggtatccagcctgtcccacctgaactcctcgggctcggactacggcaccatgtcctgctccaccttgctatacggtcggacctggtgagaggacgccgggccggccctagcccagcgctctgcctcaccgcttccctcctgcccgccacacagaccaccatccaccgctgctccacgcgcttcgacttttcttaacaacctggccgcgtttagaccaaggaacaaaaaaaccacaaaggccaaactgctggacgtctttctttttttccccccctaaaatttgtgggtttttttttttaaaaaaagaaaatgaaaaacaaccaagcgcatccaatctcaaggaatctttaagcagagaagggcataaaacagctttggggtgtctttttttggtgattcaaatgggttttccacgctagggcggggcacagattggagagggctctgtgctgacatggctctggactctaaagaccaaacttcactctgggcacactctgccagcaaagaggactcgcttgtaaataccaggatttttttttttttttgaagggaggacgggagctggggagaggaaagagtcttcaacataacccacttgtcactgacacaaaggaagtgccccctccccggcaccctctggccgcctaggctcagcggcgaccgccctccgcgaaaatagtttgtttaatgtgaacttgtagctgtaaaacgctgtcaaaagttggactaaatgcctagtttttagtaatctgtacattttgttgtaaaaagaaaaaccactcccagtccccagcccttcacattttttatgggcattgacaaatctgtgtatattatttggcagtttggtatttgcggcgtcagtctttttctgttgtaacttatgtagatatttggcttaaatatagttcctaagaagcttctaataaattatacaaattaaaaagattctttttctgattaaaaccctc

SEQ ID NO: 9830 - protein, 371 aa, Homo sapiens; identical to SEQ ID NO: 1554

SEQ ID NO: 9831 - DNA, 2174 bp, Homo sapiens
gaccaacagtgcggccccagggttcgtccccagactcgctcgctcatttgttggcgactggggctcagcgcagcgaagcccgatgtggtccggaggcagtgggaaggcgcggggctgggaggccgcggcgggagggaggagcagccccggcaggctcagccgccgccgaatcatgtcgatgagtccaaagcacacgactccgttctcagtgtctgacatcttgagtcccctggaggaaagctacaagaaagtgggcatggagggcggcggcctcggggctccgctggcggcgtacaggcagggccaggcggcaccgccaacagcggccatgcagcagcacgccgtggggcaccacggcgccgtcaccgccgcctaccacatgacggcggcgggggtgccccagctctcgcactccgccgtggggggctactgcaacggcaacctgggcaacatgagcgagctgccgccgtaccaggacaccatgaggaacagcgcctctggccccggatggtacggcgccaacccagacccgcgcttccccgccatctcccgcttcatgggcccggcgagcggcatgaacatgagcggcatgggcggcctgggctcgctgggggacgtgagcaagaacatggccccgctgccaagcgcgccgcgcaggaagcgccgggtgctcttctcgcaggcgcaggtgtacgagctggagcgacgcttcaagcaacagaagtacctgtcggcgccggagcgcgagcacctggccagcatgatccacctgacgcccacgcaggtcaagatctggttccagaaccaccgctacaaaatgaagcgccaggccaaggacaaggcggcgcagcagcaactgcagcaggacagcggcggcggcgggggcggcgggggcaccgggtgcccgcagcagcaacaggctcagcagcagtcgccgcgacgcgtggcggtgccggtcctggtgaaagacggcaaaccgtgccaggcgggtgcccccgcgccgggcgccgccagcctacaaggccacgcgcagcagcaggcgcagcaccaggcgcaggccgcgcaggcggcggcagcggccatctccgtgggcagcggtggcgccggccttggcgcacacccgggccaccagccaggcagcgcaggccagtctccggacctggcgcaccacgccgccagccccgcggcgctgcagggccaggtatccagcctgtcccacctgaactcctcgggctcggactacggcaccatgtcctgctccaccttgctatacggtcggacctggtgagaggacgccgggccggccctagcccagcgctctgcctcaccgcttccctcctgcccgccacacagaccaccatccaccgctgctccacgcgcttcgacttttcttaacaacctggccgcgtttagaccaaggaacaaaaaaaccacaaaggccaaactgctggacgtctttctttttttccccccctaaaatttgtgggtttttttttttaaaaaaagaaaatgaaaaacaaccaagcgcatccaatctcaaggaatctttaagcagagaagggcataaaacagctttggggtgtctttttttggtgattcaaatgggttttccacgctagggcggggcacagattggagagggctctgtgctgacatggctctggactctaaagaccaaacttcactctgggcacactctgccagcaaagaggactcgcttgtaaataccaggatttttttttttttttgaagggaggacgggagctggggagaggaaagagtcttcaacataacccacttgtcactgacacaaaggaagtgccccctccccggcaccctctggccgcctaggctcagcggcgaccgccctccgcgaaaatagtttgtttaatgtgaacttgtagctgtaaaacgctgtcaaaagttggactaaatgcctagtttttagtaatctgtacattttgttgtaaaaagaaaaaccactcccagtccccagcccttcacattttttatgggcattgacaaatctgtgtatattatttggcagtttggtatttgcggcgtcagtctttttctgttgtaacttatgtagatatttggcttaaatatagttcctaagaagcttctaataaattatacaaattaaaaagattctttttctgattaaaaccctc

SEQ ID NO: 9832 - protein, 401 aa, Homo sapiens
MWSGGSGKARGWEAAAGGRSSPGRLSRRRIMSMSPKHTTPFSVSDILSPLEESYKKVGMEGGGLGAPLAAYRQGQAAPPTAAMQQHAVGHHGAVTAAYHMTAAGVPQLSHSAVGGYCNGNLGNMSELPPYQDTMRNSASGPGWYGANPDPRFPAISRFMGPASGMNMSGMGGLGSLGDVSKNMAPLPSAPRRKRRVLFSQAQVYELERRFKQQKYLSAPEREHLASMIHLTPTQVKIWFQNHRYKMKRQAKDKAAQQQLQQDSGGGGGGGGTGCPQQQQAQQQSPRRVAVPVLVKDGKPCQAGAPAPGAASLQGHAQQQAQHQAQAAQAAAAAISVGSGGAGLGAHPGHQPGSAGQSPDLAHHAASPAALQGQVSSLSHLNSSGSDYGTMSCSTLLYGRTW

SEQ ID NO: 9833 - DNA, 1737 bp, Homo sapiens
agacactgagaacggagtcgtgtgctttggactcatcgacatgattcggcggcggctggaggaggaaggaagaggaggaaaaaaaagggagagggggaaggcgaagcctcgctgctttttttttctccctttgccaaatattctggtgttaccttaacgccgatcttgttggatgtacacgtaacggagtggaccgagtcctccttaattggcttgagtggaggctcgggggctgcctcgcgtttgttttagcccggcgccaggttttaggcagccaccagaggcggggcgtaagcgctaaagcaacaagacaatagaagcctacatcttgcccgagataattagcttacatgctgatgacaagggtaaagaaagctcaggacaccctccgccctcccacctgcgcccgcgtttttgtgcggtccccacggcagagctggggaggccaccctacgtttgcgcagggagacgcgctcgccgctggtgttgcgaaagaccagagcgaagcccggctccttgcccttccttcccaggggcttctctggggggcgctctcaggccccgacgaactgagcattgatcactgtggtggctaagcaaggaggggaggcgacgccgggcttaagcgaaccacagaggagaactggcaacgctgaatacagaccttgtctgcaggcgcgacctggccgggcctgagtcccgaatggggtctaattgcgaaggcggggtgggtttcccagtcacccagcttctttctctcactcgccattatttcatagttgtttgtaagtttaaggaacaccaagtgtagaatgttgtacatctcttccagtctcaacgccatttagaaatggagatcaatcttcacaaggtttttgtgagattcaagtaagatgaagcacatcaaaatgctttgaaagctttgaatgtttttcagctcagtgccagcactggagattgcggtagttattatcatgactatccccaccccctcttaggtcccaagacctgagtaaaaggaagagttgggtgaatcttccacagcccctaggtcctgtcttctcggccttcgtcccttggcagcttttcaacctctcagcaggccacaggcgcacgtggctggcagctccccggcctccggctctgacagtccgggggcaaccaggcctgcagttctcgaggaaacccccagccccccacgtctcgttctggaccaggaaccccctccccaacaaccgcgcagcaagtggcgactctgggagctgaactggagtggagctcgaagtggctggggcgggcaaagactcccgcttcactctgggacacaactgggacggcgcttcaacctctgcctgcaggcgtgcttctcgcgcgcaccagcaagctctctatccacctcgcctgggcctttgcagcgccctgccgcccaggctccagcgcctctactaccctagccccttctcaacacgcggctctgccttcttccccagtaccactgcactgccgaaaataagcccggagactaacgcaccttgtagggaagagaaggacatctgtatctccaagcttatccaagcaaaggcctccagagtccctcccatggcccgaaacacctccctctgaccgaagagcgtcctttctttccgccgcctcctggactcatcctaaatagggcagacccgggctaaaccagtgatttttttttccatgaatacgaagaaccccgattgcactttg

SEQ ID NO: 9834 - protein, 81 aa, Homo sapiens
MLMTRVKKAQDTLRPPTCARVFVRSPRQSWGGHPTFAQGDALAAGVAKDQSEARLLALPSQGLLWGALSGPDELSIDHCGG

SEQ ID NO: 9835 - DNA, 1802 bp, Homo sapiens
ccggacctcggctttcaaagcggcctgggtgggaagagctgtttatataaacagagattccgctgtaaatgcgctaatatcccggctgccagcgcatggcgagcgcctcccacgcccatccgtaggagcggcgtcccggccgcccctccgttcccagcctgccctgcccccgcctccttcccctcctcggccatggccacctctggacgcctgagcttcaccgtgcgcagccttctagatttacccgagcaggacgcgcaacacctgccgaggcgggagccagaaccacgcgccccccagcccgacccctgcgccgcctggctggattcggagcgcggccactacccttcctcggacgagagcagcctggagaccagcccgccagactcgtcgcagcggccgtccgctaggcccgcgtctccgggctcggacgccgagaaaaggaagaagcggcgggtgctattctccaaggcgcagacgctggagttggagcggcgcttccggcagcagcggtacctgtctgcgcccgagcgcgagcagctggcgagcctgcttcgcctcacgcccacgcaggtcaagatctggttccagaatcatcgctacaagctgaagcgcgctcgcgctccaggggcggcggagtcgcctgacctggcagcatccgccgagctgcacgccgcgcccggcctgctgcgtcgcgtggtggtgccggtgcttgttcgcgacgggcagccgtgcggcggcggcggcggtggcgaggtgggaaccgccgcggcccaggagaagtgcggcgcccctccagccgccgcctgccctctgccgggctaccctgccttcggtcccggctcggcgcttggcctcttccccgcctaccagcacttagcatcccccgccctggtctcctggaactggtgaggccgcagggcggcacctggggctaccctcgactttggagcgcgctctgcgattggagcagggccggagccgaacgcctggaacgctctccgtccgcctccctgcagccccatctccttgggcgccagggtccctggcgcgccctcatcagccgtcgcgcaagcacacacgagggacgtgtgccagagccccctccctcaccttccctccaccgccagccccagagttagattttatgcttgggccttatttgtatatttttaaatagcgatttgtataggaagcaagttatttttttaaaaaatagagtatttttcctcgtagttcgagaataaaatgtgtggggttgggtcccctgcgcgcctgcggggaacgtaggcgggagtcgtgccccccagaccggtgttcgcatcgctggctcgccccttgactggctaagtggggcccggccccagctggatcgaagggcgggttgcagtcccgacacggctttaggaagatacctgggggatggaggggtggtgatgtcagggttgggcgcgggaagaaaaggagaggaggaagctgaggcaactttgggattcttgtcagcgggaggcgtcactggccccagagtgactccgactctccgctgggctcccagagctgctggcgtttcgaataccgaaaagtcaaccctgtggaccacgacagggcagaaggagtttctccggagatgagccggcgaggccaggtgcggggcgcgctgcaccggagcagcccaggccgggccgcaagctgtttccagagtgcaggagccaagtgctcggggaccctttgaaaagtgcctggggacctgaagagcaccggggaatttgtaacccctatttaagcctgcaagtgcctaagtt

SEQ ID NO: 9836 - protein, 239 aa, Homo sapiens; identical to SEQ ID NO: 1557

SEQ ID NO: 9837 - DNA, 1242 bp, Homo sapiens
ctggagacccggacctcggctttcaaagcggcctgggtgggaagagctgtttatataaacagagattccgctgtaaatgcgctaatatcccggctgccagcgcatggcgagcgcctcccacgcccatccgtaggagcggcgtcccggccgcccctccgttcccagcctgccctgcccccgcctccttcccctcctcggccatggccacctctggacgcctgagcttcaccgtgcgcagccttctagatttacccgagcaggacgcgcaacacctgccgaggcgggagccagaaccacgcgccccccagcccgacccctgcgccgcctggctggattcggagcgcggccactacccttcctcggacgagagcagcctggagaccagcccgccagactcgtcgcagcggccgtccgctaggcccgcgtctccgggctcggacgccgagaaaaggaagaagcggcgggtgctattctccaaggcgcagacgctggagttggagcggcgcttccggcagcagcggtacctgtctgcgcccgagcgcgagcagctggcgagcctgcttcgcctcacgcccacgcaggtcaagatctggttccagaatcatcgctacaagctgaagcgcgctcgcgctccaggggcggcggagtcgcctgacctggcagcatccgccgagctgcacgccgcgcccggcctgctgcgtcgcgtggtggtgccggtgcttgttcgcgacgggcagccgtgcggcggcggcggcggtggcgaggtgggaaccgccgcggcccaggagaagtgcggcgcccctccagccgccgcctgccctctgccgggctaccctgccttcggtcccggctcggcgcttggcctcttccccgcctaccagcacttagcatcccccgccctggtctcctggaactggtgaggccgcagggcggcacctggggctaccctcgactttggagcgcgctctgcgattggagcagggccggagccgaacgcctggaacgctctccgtccgcctccctgcagccccatctccttgggcgccagggtccctggcgcgccctcatcagccgtcgcgcaagcacacacgagggacgtgtgccagagccccctccctcaccttccctccaccgccagccccagagttagattttatgcttgggccttatttgtatatttttaaatagcgatttgtataggaagcaagttatttttttaaaaaatagagtatttttcctcgt

SEQ ID NO: 9838 - protein, 239 aa, Homo sapiens; identical to SEQ ID NO: 1557

SEQ ID NO: 9839 - DNA, 496 bp, Homo sapiens
taaaaatgatgatgtgatgacaacctcaagttgggcattagatgcagatttagtttactgaataaaaagaatgcctaatctgggggattcatacagattgccaaggaaatgtcatttaaagccttccattttaagactatgtgcagtacctggtaattgcttgtattaatttgcatttcaatcagtattgaaaaaaatctcactaggcagtggcctttagctaaattgtcttattctgttaaagccaacattaatgaataaaatgtttaacttatcacaaacacaccaaatgctagtattagaaaagggaaagaaggagagaaggaaggaaggaaggaaggaaggaaggaaggaaggaaggaaggaaggaaggaaggaaggaaggaagagggtgggagaggtgggaaggagggagagagtgggggagggaggatactactgagcaaaaacaaacatcagaatcagattcaaatgtgaaacagatgttggtactatc

SEQ ID NO: 9840 - protein, 62 aa, Homo sapiens
MNKMFNLSQTHQMLVLEKGKKERRKEGRKEGRKEGRKEGRKEGRKRVGEVGRRERVGEGGYY

SEQ ID NO: 9841 - DNA, 3780 bp, Homo sapiens
ggaccgcgggccacgcccctggggtccggaaggcgcgggagcggacgcgggggttctgtgaacttggaacctggcggtgcgaggttctcgccggggatgcggcggcggcagctgcttcctggtttgaagctcgccgagtgggggagagcgtgagccttcggaggcgggggcaggaggagaagcaagaggaggcgggggaagagacgcttggggctggggctcaccggacgggtaggtccggctctccagggagaggagctgcccggccctggagaaggggcgagtcctgcgcgagtccccgggaggcgccgcgcgcttggaagggacggtcgggcttccccggcccgctgagggctcggcggcgggctcccctcctttccacctcgggagggagggaaggaggggagggaaaagtcccacggaggaggcagaatggccagtcgaggggcgcttaggcgctgcctttccccagggctgcctcgactcctgcacctgtcccgagggctggcctgagacgggactcccggttctcccgctgcgaagcagcgcggccccccggggccggggcagcggcgccggcatgtcgtctggcaccatgaagttcaatggctatttgagggtccgcatcggtgaggcagtggggctgcagcccacccgctggtccctgcgccactcgctcttcaagaagggccaccagctgctggacccctatctgacggtgagcgtggaccaggtgcgcgtgggccagaccagcaccaagcagaagaccaacaaacccacgtacaacgaggagttttgcgctaacgtcaccgacggcggccacctcgagttggccgtcttccacgagacgcccctgggctacgaccacttcgtggccaactgcaccctgcagttccaggagctgctgcgcacgaccggcgcctcggacaccttcgagggttgggtggatctcgagccagaggggaaagtatttgtggtaataacccttaccgggagtttcactgaagctactctccagagagaccggatcttcaaacattttaccaggaagcgccaaagggctatgcgaaggcgagtccaccagatcaatggacacaagttcatggccacgtatctgaggcagcccacctactgctctcactgcagggagtttatctggggagtgtttgggaaacagggttatcagtgccaagtgtgcacctgtgtcgtccataaacgctgccatcatctaattgttacagcctgtacttgccaaaacaatattaacaaagtggattcaaagattgcagaacagaggttcgggatcaacatcccacacaagttcagcatccacaactacaaagtgccaacattctgcgatcactgtggctcactgctctggggaataatgcgacaaggacttcagtgtaaaatatgtaaaatgaatgtgcatattcgatgtcaagcgaacgtggcccctaactgtggggtaaatgcggtggaacttgccaagaccctggcagggatgggtctccaacccggaaatatttctccaacctcgaaactcgtttccagatcgaccctaagacgacagggaaaggagagcagcaaagaaggaaatgggattggggttaattcttccaaccgacttggtatcgacaactttgagttcatccgagtgttggggaaggggagttttgggaaggtgatgcttgcaagagtaaaagaaacaggagacctctatgctgtgaaggtgctgaagaaggacgtgattctgcaggatgatgatgtggaatgcaccatgaccgagaaaaggatcctgtctctggcccgcaatcaccccttcctcactcagttgttctgctgctttcagacccccgatcgtctgttttttgtgatggagtttgtgaatgggggtgacttgatgttccacattcagaagtctcgtcgttttgatgaagcacgagctcgcttctatgctgcagaaatcatttcggctctcatgttcctccatgataaaggaatcatctatagagatctgaaactggacaatgtcctgttggaccacgagggtcactgtaaactggcagacttcggaatgtgcaaggaggggatttgcaatggtgtcaccacggccacattctgtggcacgccagactatatcgctccagagatcctccaggaaatgctgtacgggcctgcagtagactggtgggcaatgggcgtgttgctctatgagatgctctgtggtcacgcgccttttgaggcagagaacgaagatgacctctttgaggccatactgaatgatgaggtggtctaccctacctggctccatgaagatgccacagggatcctaaaatctttcatgaccaagaaccccaccatgcgcttgggcagcctgactcagggaggcgagcacgccatcttgagacatcctttttttaaggaaatcgactgggcccagctgaaccatcgccaaatagaaccgcctttcagacccagaatcaaatcccgagaagatgtcagtaattttgaccctgacttcataaaggaagagccagttttaactccaattgatgagggacatcttccaatgattaaccaggatgagtttagaaacttttcctatgtgtctccagaattgcaaccatagccttatggggagtgagagagagggcacgagaacccaaagggaatagagattctccaggaatttcctctatgggaccttcccagcatcagccttagaacaagaaccttaccttcaaggagcaagtgaagaactctgtgaaggatggaactttcagatatcaactatttagagtccagagggagccatggcactagaaatagttgataatgaaatgagattttatgaagtataccgctccacctatgagcgtctgtctctgtgggcttgggatgttaacaggagccaaaaggagggaaagtgtgaagaataaagtagatctgagaaattctgagccaatcaggcttcttaattcaagagacaaaccaagacgttctgtcaactgtgctgtgctcttctttaagccaatgaaccccaattcctggcagtctacaagaagtctcttaatgctaatgaagaatttaaaggtctttttaaggaaatgaagggctttccaaatagaatgatttactctgaagaaacaaacaatggtatctctgaaactcacaacctaaagcccaatcttgaaaatatgttgtgcaccaagacgactgcttcagcttcttctcttatccttactttctttaatagatatttattaaactgtccagtgaaaaggtgccacaatgcccagtattgtaaacaacaggtttgcattcatgaagctttcattcattctggagtctactaatttacctgaatggtgtttgcattctgtgaaatgcctctccacgttgcatatgtcacacttttgtctgcacataactcttttttcacaagaagggtcactgccacaacagcacagtcagcgggtgaattacaggtgcctgctgcctgcctacctgggtaatctgatcttgtctgtatcgccgtgtgctcatcactgaagaattgcaggccactcatgtcagtgaccagatttgtggcttataaacattagcagtttatttatgttttaagatgcaaagatgtgtgtttgatattcactttaataattagaaatggatcttgtaaacagggcatatatcaaagatgaccttataatatgtacccgaatatacagttcaagaattttgtctgactggaaataaatgcattttgtagcaaaagga

SEQ ID NO: 9842 - protein, 683 aa, Homo sapiens; identical to SEQ ID NO: 1559

SEQ ID NO: 9843 - DNA, 269 bp, Homo sapiens
aggtgcacagacagagccttctggaatacagtgcggggtatgctatcatagaagtataaactgggcaccctaggagcagagttgatattgctatgactgtctggggacatcaggacagacttcatagagcagagatctgaaactggacaatgtcctgttggaccacgagggtcactgtaaactggcagacttcggaatgtgcaaggaggggatttgcaatggtgtcaccacggccacattctgtggcacgccagactatatcgctccag

SEQ ID NO: 9844 - protein, 39 aa, Homo sapiens
MSCWTTRVTVNWQTSECARRGFAMVSPRPHSVARQTISL

SEQ ID NO: 9845 - DNA, 1923 bp, Homo sapiens
agtcacaagctcttaagcaactgcgggtcaacgcttgagaccgttttggatttctgttagcacttgtttctgttgcccaagaagatcctttccaagacttcagcaggcatactggcttcgggaaaattcagaaactcagtgaccttgtttggaaatagatctgaaactggacaatgtcctgttggaccacgagggtcactgtaaactggcagacttcggaatgtgcaaggaggggatttgcaatggtgtcaccacggccacattctgtggcacgccagactatatcgctccagagatcctccaggaaatgctgtacgggcctgcagtagactggtgggcaatgggcgtgttgctctatgagatgctctgtggtcacgcgccttttgaggcagagaacgaagatgacctctttgaggccatactgaatgatgaggtggtctaccctacctggctccatgaagatgccacagggatcctaaaatctttcatgaccaagaaccccaccatgcgcttgggcagcctgactcagggaggcgagcacgccatcttgagacatcctttttttaaggaaatcgactgggcccagctgaaccatcgccaaatagaaccgcctttcagacccagaatcaaatcccgagaagatgtcagtaattttgaccctgacttcataaaggaagagccagttttaactccaattgatgagggacatcttccaatgattaaccaggatgagtttagaaacttttcctatgtgtctccagaattgcaaccatagccttatggggagtgagagagagggcacgagaacccaaagggaatagagattctccaggaatttcctctatgggaccttcccagcatcagccttagaacaagaaccttaccttcaaggagcaagtgaagaactctgtgaaggatggaactttcagatatcaactatttagagtccagagggagccatggcactagaaatagttgataatgaaatgagattttatgaagtataccgctccacctatgagcgtctgtctctgtgggcttgggatgttaacaggagccaaaaggagggaaagtgtgaagaataaagtagatctgagaaattctgagccaatcaggcttcttaattcaagagacaaaccaagacgttctgtcaactgtgctgtgctcttctttaagccaatgaaccccaattcctggcagtctacaagaagtctcttaatgctaatgaagaatttaaaggtctttttaaggaaatgaagggctttccaaatagaatgatttactctgaagaaacaaacaatggtatctctgaaactcacaacctaaagcccaatcttgaaaatatgttgtgcaccaagacgactgcttcagcttcttctcttatccttactttctttaatagatatttattaaactgtccagtgaaaaggtgccacaatgcccagtattgtaaacaacaggtttgcattcatgaagctttcattcattctggagtctactaatttacctgaatggtgtttgcattctgtgaaatgcctctccacgttgcatatgtcacacttttgtctgcacataactcttttttcacaagaagggtcactgccacaacagcacagtcagcgggtgaattacaggtgcctgctgcctgcctacctgggtaatctgatcttgtctgtatcgccgtgtgctcatcactgaagaattgcaggccactcatgtcagtgaccagatttgtggcttataaacattagcagtttatttatgttttaagatgcaaagatgtgtgtttgatattcactttaataattagaaatggatcttgtaaacagggcatatatcaaagatgaccttataatatgtacccgaatatacagttcaagaattttgtctgactggaaataaatgcattttgtagcaaaagga

SEQ ID NO: 9846 - protein, 184 aa, Homo sapiens
MCKEGICNGVTTATFCGTPDYIAPEILQEMLYGPAVDWWAMGVLLYEMLCGHAPFEAENEDDLFEAILNDEVVYPTWLHEDATGILKSFMTKNPTMRLGSLTQGGEHAILRHPFFKEIDWAQLNHRQIEPPFRPRIKSREDVSNFDPDFIKEEPVLTPIDEGHLPMINQDEFRNFSYVSPELQP

SEQ ID NO: 9847 - DNA, 2752 bp, Homo sapiens
gtaatgagggccacagcaggaaggggaacataaaatgagtccctgagttcttgacccttctctttcccctgctctccagtcagtttgagacttacacttggggtagaatccagattttccaccctggtcccctcactcactctgtgcagcttataaagtgcttttcttggccctagaaaacattctgcttcctttagtaaatgtgtgcagaatatttcatgaagtcacattattttcctctttggccgactttccctcttggatcacagtcagggagaaagtcagctgaggtgaggcaacttttcagtgtgaccttaaatgtggatgaaagtgatggccccgaggagcacaattgttaacttactggcatttgggtcccattagggacataagcaaataatgaaagttttctgcaaaaggattatgctgtcaccattcacagcagtaggaacagagagtttagggaaaggcctgtgcccagcctaggatggcaagctatccacctccaactccacaccatctgcaccaacgtgaactgtgaaagatttcaggcctgggactaatgttaaatgttcccttaactcctcatctccacatcactggacgggggtagtggtagaagggccaccccaccaccaccacaacacacaaagcttctacccccttagtatcaccccggaccctccttctcccggtcctggtttctgtttcatggtattcatcctcctctggcctcttcatggcatcctccagctgccactctggctgcttctcaccctacaccaggggtcaggagccatgaaagtccgtgagtgataccagccaggtgggaggtgatagggagtggtggggcatgtgactgactgggcatctggtgccccatgaaaagcagaagcccctgctcaactccaggccgtttctatgagaggagtgcaggcccagtgttcccgagtatctcattttccacgagaagttggaaaacctgacttttcatgtgatgtgacatttcctagcgtttaaatatttgagaagtaattaaaattatttcaaaacacactaggtaggccaaataaaatgtgtctgagacctagggctggtatcagttctagtctgtctctgtcactttccacaatctaacctgccctcccagcttcagtggttactcaaatttcaatgtctctgagcgttagatggccagccctggcctgcaccccagatttaccctagaattcatctgcatgtgggtgcccacacacctccaatgcaaagcggagcccatcagcctcccagatttggcagactgtaggatctcattcatgaccaagaaccccaccatgcgcttgggcagcctgactcagggaggcgagcacgccatcttgagacatcctttttttaaggaaatcgactgggcccagctgaaccatcgccaaatagaaccgcctttcagacccagaatcaaatcccgagaagatgtcagtaattttgaccctgacttcataaaggaagagccagttttaactccaattgatgagggacatcttccaatgattaaccaggatgagtttagaaacttttcctatgtgtctccagaattgcaaccatagccttatggggagtgagagagagggcacgagaacccaaagggaatagagattctccaggaatttcctctatgggaccttcccagcatcagccttagaacaagaaccttaccttcaaggagcaagtgaagaactctgtgaaggatggaactttcagatatcaactatttagagtccagagggagccatggcactagaaatagttgataatgaaatgagattttatgaagtataccgctccacctatgagcgtctgtctctgtgggcttgggatgttaacaggagccaaaaggagggaaagtgtgaagaataaagtagatctgagaaattctgagccaatcaggcttcttaattcaagagacaaaccaagacgttctgtcaactgtgctgtgctcttctttaagccaatgaaccccaattcctggcagtctacaagaagtctcttaatgctaatgaagaatttaaaggtctttttaaggaaatgaagggctttccaaatagaatgatttactctgaagaaacaaacaatggtatctctgaaactcacaacctaaagcccaatcttgaaaatatgttgtgcaccaagacgactgcttcagcttcttctcttatccttactttctttaatagatatttattaaactgtccagtgaaaaggtgccacaatgcccagtattgtaaacaacaggtttgcattcatgaagctttcattcattctggagtctactaatttacctgaatggtgtttgcattctgtgaaatgcctctccacgttgcatatgtcacacttttgtctgcacataactcttttttcacaagaagggtcactgccacaacagcacagtcagcgggtgaattacaggtgcctgctgcctgcctacctgggtaatctgatcttgtctgtatcgccgtgtgctcatcactgaagaattgcaggccactcatgtcagtgaccagatttgtggcttataaacattagcagtttatttatgttttaagatgcaaagatgtgtgtttgatattcactttaataattagaaatggatcttgtaaacagggcatatatcaaagatgaccttataatatgtacccgaatatacagttcaagaattttgtctgactggaaataaatgcattttgtagcaaaagga

SEQ ID NO: 9848 - protein, 137 aa, Homo sapiens
MASPGLHPRFTLEFICMWVPTHLQCKAEPISLPDLADCRISFMTKNPTMRLGSLTQGGEHAILRHPFFKEIDWAQLNHRQIEPPFRPRIKSREDVSNFDPDFIKEEPVLTPIDEGHLPMINQDEFRNFSYVSPELQP

SEQ ID NO: 9849 - DNA, 914 bp, Homo sapiens
atgtcgctggttctcagccacaatttgagtagcaagagccctggacaactttcaggaagacagttctggtctgtagcaattaacacatggtcatcctcagaaaaaggtcctctcaattatttcccagagatacccataacttaaaatgcaggaaccaagagatttgagcctagacatttggatgaaaagcgatttccacctggagaaagtcactgcccttctgtgcagagtaccattgtgtcttgaatccagcttggccataaggaaatggggcgagactttgtcatgtatgtcgctgaagttcagctatgcaaaaatgttcacctatccttgatcaaccagtccaggaaccatcaaagaagaaaatgagattcgacttagaagacctgttctttataaacccctgcacagccctaatgatcaacaccacttccagtgctcataaattactgcttcaataattgttctgcaattctgcctattctcattgaatgcttcgtataatccctttatttactttgggctacgattcatttttatcagtgagtattgtacttgtttcatctcaaaaatcattctccttgagaaaaaaaaaaagaacagagttgaggaatcctgctttctctttcatccacaaatgctctattgtcagaagggggcttatatttcttgtgaacttcttgtgctgattttaactttgtaaagttttcctgttttccacgtatgaatgagcatgagaactatgaaaggcaatcaggtataagatattgtcaagtatgtgacttgagggacaagtgatctatgtgagcctgaagggaatcctgggattgagagagcatgcagagaaggcacataggtgtgctagggcatgcaggttgtacagagatggacagggagaaaattcgagtgacaga

SEQ ID NO: 9850 - protein, 62 aa, Homo sapiens
MQEPRDLSLDIWMKSDFHLEKVTALLCRVPLCLESSLAIRKWGETLSCMSLKFSYAKMFTYP

SEQ ID NO: 9851 - DNA, 5103 bp, Homo sapiens
gacagttagatcttggaactgagtccagcagcactgaggtcagagagatggctaaagctaaaagcaaactggatgctgttcaggaggttctcctttgtcatttttatctccaaatagaagacctctgttttcccagaagattaaatagtagaaaagaagtagcccaaggacataccatgccttttacagatatttataggacaatttccctcctgagagtgcccaagcatgggggatggtgaggaagatgactgaaggagaaagcaggaaaagggggtgtctgcatgtatgaggattggaagccctggacaactttcaggaagacagttctggtctgtagcaattaacacatggtcatcctcagaaaaaggtcctctcaattatttcccagagatacccataacttaaaatgcaggaaccaagagatttgagcctagacatttggatgaaaagcgatttccacctggagaaagtcactgcccttctgtgcagaggtaggtgccctgatacttgcctgacagctggaaagcgtggctcagaagaggtaggtgggagaagaggccacatagtatctccctgggcctcctggtgaaaaacttgtgtgtgatttttcaggcctgaccacaaacttggggaaagctgacccctaccccagacttggggcacagcccatgcgtggcagtctctggagggagctctcaaggtctcaggtctctctggctggtcgtagtcatcacatatttgcattcctagcccctgagccttcattcctgggtttatcagaagccttggggagaggtgttctttaggcgcctctgctgaggccttctttgggtggggcagggaagggagagaaatcttgaagccgcttttccccacaatgactcagaatctagtacttccactcctagccttccccctcccttgctctcggccccagagtccataaaacttccagagccttttgttcagggctctgtcagcagtgagaccaccccaacccgacattcctgctgatctacttgaccctgggcccctgtgtgttccatgggggaaatggaacagggagagtccacgctttctctggtttcagatacttgcttataccattgcaggacatgactgaaagcttgactcttttgttttgggcttgttgccttaattgactattgtgacacctggcagctcagcgctccctctcccagttcaactgagctcctgacagagggactccaccttcaacttgccagggacaggcactcaaaggacgggcttcatttctgttgaaggctctggcttctcctaatatgtttctaattcatttctagattcagatctctctctacctctccatatcacacattcacaaacaataactgcctgaggaccaggagaagcacagggcctgcctcgttattcctcccctgcatgctgactcttccactggggctgggcagagtcagcacatgcaggaggggaatcatgagccaggccctggccagatccagatttctagacatgagaactacccaaaccccagagacccagttcttccatctactttactgaggaggaaccagagagtctgaaaagtaagtgacttggccaaggtcacccaactggaacccagggcctaacctttgggttcaaactctgatcatgaccagactgcctccttgaatcttctttctactttcccggtacagtttctgtgcagagctgagtccttgggtgcccaggactacactaagccctctcaagtcagtactttctaggaggctgtagcctaactggagagagaggtgagaccaggggttctcagacttgagcagatgttagaatcagctggtgggctagttaaaacacagatctgctggccccaccccaggttgctgattcagtaggcctgggatggggtctgagaatttgtacttctaacaagtttccaagtatggctgataagaaccactggacttaaccataaacaaccaaaagtaacagaggcagtgaatggaaaccgagcaaaggcaggtagagaaaggagagaaatgagggtgacattgtttctaagggcaggaaatgaactccaggggctggtccttgggaggtccttctcttccctctaccttcatctaccctgacttcgggtgtatctagaagtttcacagtagcatataaattccccctctctgctggagggctctggccaacaggtgaagccaaaaccatcacctgtaggaggttacttagagctggctcctgtcccaacaccctcctctcggcttccccgttcacatcgctgcagccggcacagctgcctgcctcccatggagcctgggggcacctgtcctaaaggctcaaggatgaagagtcgcggagggtggttgtggccatctcacccacctctcccttgattcctccatgtactcacacaagccctggaaggccaaggacactgacactcagaaagctaagggagtgggtacattacaaaaggattgggagagggggagtggtaaaaactccacagctcacattcattgactcagctcatctttcaaggccccagttctcctgagtcatcagtgagcatggccttgctttcatagtcactaaggctgaatgtgggtcattgagatctaaactggtgtttaaatgtaaccgcacagaggtgagtcagacacacacaaggagaaaaagagcaaaagagagagagaagaaagaaggagacttagctctctcttaagtgggggtgaaaatccaggagcgaatctgaaatgatccacctctccaaatccgtccactgtttaattggctccatgtagctatagggaaattgaggcataactgctgtgtccactagcccaaagctgttccagggacagcagcaacctcaggaggaggccagagattggccaatggaaaggcagaaagcagggactctccacccaggtggaggcaccacagggcccgtggagggaatggacagctggcattacggtccccctaccttttcccaagactcttccagctgacctactaaggctgccccttgaccttgagtacaaatggcactcatgcccaaacagccgcttgaccagagccaaccgacaacctcctgtgagtttctcagccccaggctggatctgcaggtaagagacagacattatgttgaggcaaatgtaacccatgccaagcagtgtgtagagatttctacctagctttattgttgtgaactccagacaagagacttagaaaccatgtatgattttctacatcaaaagcctgagtctgaggcttaggggtctctcatcccttttccaactccctttgtgtgttgcggggtggggggtggggcggaatggagagtctgccatggagtccccacctctgtcccttccagaagagcctgtatatggctagtgggcatttccctccctggagaggaggtgggggaggcccttcatgtgcttcctggagccacaaggaaagaggaggctgctgattcaccagcagctgcttcctggaatggcagttccgggctggcaggcaaacagtatttttccaaggtgatctagggctgttacaacattcccgctctgcccccatcagaccttcctgtaagtcaaaccagaaagttacccagaccacgcattcctgagcagtcaagcacaagattccagacacagtgtttccaacatgtctcgctatctctcctgggacctgggatccagtcatccccacagcccctgtgcttcctcagccaaggccatgcatttgtcgcactggccatggagtcacatggaagccactgtgtggctccaagtcagctgggaggggaaggcctgccctgattcccctaatggtctgctgagaaagagcagagccctgagctagctttgtccctgcgtttcacaaagccactttctctggtcctgcccagctttctgagacagaaagctaccatgtcccagactgaatcagtctcactttttttttttttttccccagaaataaggcacaggtttggaagtgcctctgtttgaccctggtgtttggttctctccctcacatacagggaacatgaaggagaacccacctctgctgcttttgaagtgcagtggctttcacttggaatggacatctttacgggtggcactgggggctgtgcagagaggaccagggagaaattccagacttctcaggttctgcctctgagacagacagtggtgggaaacacaaacaataaaaatccttggttccactttcctcatcccttccgggcaaatggaatcaaatgagggtgagggtggctggggaataaagcagggtgagtgaagagatgggggactgctcttagaagcagtgtctgaactccaccccctccaggatgaactggaaagtgcttcttctcctccctcccttgactgatggctatgggaactttagatggggaaatacggatatactgatctctcaaccaaatgtaatttgtattaagaattaagagttcacaagttattctctgtctctctctctttttttttttttaaagaaacagccttgccctgtcacccaggctggagtgctgtggtgctatcatagctcactgcagcctcaaaatcctgggcttaagtgattctcccacctcagcctcctgagcagctagtactacaggcacacactaccataactgaccaatttttctgttttctgaagagatgaggtttcgctctgttgactagactgatgtcaaattcttggcctaacgtgattttctccctgggcctcccaaagtgctgagattaggagtgtgagccaatgcacccagccaacttatccttttttatcttcatcacaatcttatgagtaccattgtgtcttgaatccagcttggccataaggaaatggggcgagactttgtcatgtatgtcgctgaagttcagctatgcaaaaatgttcacctatccttgatcaaccagtccaggaaccatcaaagaagaaaatgagattcgacttagaagacctgttctttataaacccctgcacagccctaatgatcaacaccacttccagtgctcataaattactgcttcaataatt

SEQ ID NO: 9852 - protein, 64 aa, Homo sapiens
MAKAKSKLDAVQEVLLCHFYLQIEDLCFPRRLNSRKEVAQGHTMPFTDIYRTISLLRVPKHGGW

SEQ ID NO: 9853 - DNA, 1452 bp, Homo sapiens
tagagacctcacccacctgtttgcagagtcacccaccttgggctacttcttttctactatttaatcttctgggaaaacagaggtcttctatttggagataaaaatgacaaaggagaacctcctgaacagcatccagtttgcttttagctttagccatctctctgacctcagtgctgctggactcagttccaagatctaactgtcaaatgctttaggggaaacgggaagagaagtccctggagtaacccatgtgcgcagcctggcactgttttcacttgcctttggaaatgaaggtgcagaaaccatgggaggaacctgatgaaatgcctggtctaacaggaggatgcagagaaagttatgaagagaggatcctgaggaatttgctcctgggccatgaagatgggaagctgagtcagagtgcagttcttcacccaatcccacagccacacgtgcctgcttgctcacgggatcttcccactctcctcgggaaggcttccgagctgcttcctcaggatgtcctgtgatagcagcctgacctgtcaaagccatgcgaataccatctgttcagttatataacttgagatctgggaagaattctcaacgtaggatttgctgcccaaatcaaatcattttcagaaaggagattaagcattctttgctgggaaaaggagaaattaccagaaaaaattatcatttcactgagtataaacaaacctttgtccaaaatacacaaatgaaaatgacaaatttgcttcattaatatttgcttgcattaaaaatatacacagggctatgtatggttcaatatcttaagtgcaaagtaaaatcttaattaggaacaatggaattgttaatttaatgaatcttaattttgtttagatcattagcctgcagtataatgtcccaagcagaatttggggtggggagcttggtggtggaagaggaagtgctcatttctacagacatgacaagattattaacactaaagaatgacttttctttcatgggaggggaagatatctgacccaccagcagtcagacagaaaccctgacttgtgattttaacattaccttatatgacccatggtcaccttgtatgaccaaagaaaaccatttatgaaatagctgtccggagttcaagatttaaatggtaactttgtagactaggttttctctcatcatctaatttacttgccttaacgcttgtttctttgcccttattcctactggctctcgagtataatatcctgagaatttatgttgaacagcactaattttttcacttggagctagcacatgtttatgactagtacaagtttataactacaaaaaacagagattttgtcatcttaaactgaatttactgggaataaaatcagtcaattcagaaaagtataacaaaggaaataaaaatcaccacaactcctactacctgaagattaaatggttaaa

SEQ ID NO: 9854 - protein, 91 aa, Homo sapiens
MCAAWHCFHLPLEMKVQKPWEEPDEMPGLTGGCRESYEERILRNLLLGHEDGKLSQSAVLHPIPQPHVPACSRDLPTLLGKASELLPQDVL

SEQ ID NO: 9855 - DNA, 1600 bp, Homo sapiens
gttgctttgcggcgttttccgcggggaaactgtgtaaagggtggggaaacttgaaagttggatgctgcagacccggcatgggtagcaagaaactaaaacgagtgggtttatcacaagagctgtgtgaccgtctgagtagacatcagatccttacctgtcaggactttttatgtctttccccactggagcttatgaaggtgactggtctgagttatcgaggtgtccatgaacttctatgtatggtcagcagggcctgtgccccaaagatgcaaacggcttatgggataaaagcacaaaggtctgctgatttctcaccagcattcttatctactaccctttctgctttggacgaagccctgcatggtggtgtggcttgtggatccctcacagagattacaggtccaccaggttgtggaaaaactcagttttgtataatgatgagcattttggctacattacccaccaacatgggaggattagaaggagctgtggtgtacattgacacagagtctgcatttagtgctgaaagactggttgaaatagcagaatcccgttttcccagatattttaacactgaagaaaagttacttttgacaagtagtaaagttcatctttatcgggaactcacctgtgatgaagttctacaaaggattgaatctttggaagaagaaattatctcaaaaggaattaaacttgtgattcttgactctgttgcttctgtggtcagaaaggagtttgatgcacaacttcaaggcaatctcaaagaaagaaacaagttcttggcaagagaggcatcctccttgaagtatttggctgaggagttttcaatcccagttatcttgacgaatcagattacaacccatctgagtggagccctggcttctcaggcagacctggtgtctccagctgatgatttgtccctgtctgaaggcacttctggatccagctgtgtgatagccgcactaggaaatacctggagtcacagtgtgaatacccggctgatcctccagtaccttgattcagagagaagacagattcttattgccaagtcccctctggctcccttcacctcatttgtctacaccatcaaggaggaaggcctggttcttcaagaattttggcacatttgcatatctggtttctcaatccagaacagactaaaagaaaatgagtcctgagattgctacagatgagacccacccatcggagccaggctttgaaggaactgaccgcagtgtgcatgaggaagtacttcacggtgatgaccctcgccaccctctcaggaaaacacagtgacctctcccccaacatccccttcccactcccaggtcccccggcaaaggcagaagaaccaagcaagcctttccaccaaagcagccatgaaccccattctcatcctttccaagaactctctgctataccagataggggtttggggttctgttttccattttttaaaaaaatcatttcaagactcttgaacagtgtgtcggtttacactattctatcttcttaagccaccatatcaacatattcactctgcttcctttcttttcatttggcagatgccacacttttaatggcagcaataaaaggtgtt

SEQ ID NO: 9856 - protein, 366 aa, Homo sapiens
MGSKKLKRVGLSQELCDRLSRHQILTCQDFLCLSPLELMKVTGLSYRGVHELLCMVSRACAPKMQTAYGIKAQRSADFSPAFLSTTLSALDEALHGGVACGSLTEITGPPGCGKTQFCIMMSILATLPTNMGGLEGAVVYIDTESAFSAERLVEIAESRFPRYFNTEEKLLLTSSKVHLYRELTCDEVLQRIESLEEEIISKGIKLVILDSVASVVRKEFDAQLQGNLKERNKFLAREASSLKYLAEEFSIPVILTNQITTHLSGALASQADLVSPADDLSLSEGTSGSSCVIAALGNTWSHSVNTRLILQYLDSERRQILIAKSPLAPFTSFVYTIKEEGLVLQEFWHICISGFSIQNRLKENES

SEQ ID NO: 9857 - DNA, 471 bp, Homo sapiens
aaattcatgtgggggtggacatctccagagacctcactcacctgtgatttgggggataatagcatcactcatgtgttcacgtgccaggcctgtcaccccggaacattagtcaaagggctgtgttgacagtgatttcaactcttgaattatacgaaggacctggccgcaagaaggcattgagccccgaggaggacaacaggcctcagacctctccagagtccgatgtccttctgcacaagtccttgttgtccagtctgtggcccaaacacccacagggcatggtggaggcctgagacagtgctggttttgctggggccatcagaaaagcttacgaagcaggctcggccattggctggaagtcactagcccctgctgggctcatgcaatactcatggaactggtgtgggctcctgcgggttccctatgagcaatgcctcacccatttaaagctcgtcaaaggacttgttcaat

SEQ ID NO: 9858 - protein, 47 aa, Homo sapiens
MSFCTSPCCPVCGPNTHRAWWRPETVLVLLGPSEKLTKQARPLAGSH

SEQ ID NO: 9859 - DNA, 1996 bp, Homo sapiens
tgagaaggaaagaacggccgctatagccctatcggctgctacaacaccaaaacgcatccacctaactggctgacgctacaccttggtctttccgggtccttgcacgcttcgctccaactcctgcagagctgagccggaggggaatccggaagggacacgctgaacaggaacagaaatgaataaaagtcgctggcagagtagaagacgacatgggagaagaagccaccagcagaacccttggttcagactccgtgattctgaagacaggtctgactcccgggcagcacagcccgctcacgattccggccacggtgatgacgagtctccgtcaacctcgtctggcacagctgggacctcctctgtgccagagctacctgggttttactttgaccctgaaaagaaacgctacttccgcttgctccctggacataacaactgcaaccccctgacgaaagagagcatccggcagaaggagatggagagcaagagactgcggctgctccaggaagaagacagacggaaaaaggcagataccaacagtgaccggctcttcacagtgaacgatgttaaagttggaggctccaagtatggtatcatcaacctgcaaagtctgaagacccctacgctcaaggtgttcatgcacgaaaacctctacttcaccaaccggaaggctcctctgctgtttaatggctgccgctctggggaaatctttgccattgatctgcgttgtggaaatcaaggcaagggatggaaggccacccgcctgtttcatgattcagcagtgacctctgtgcggatcctccaagatgagcaatacctgatggcttcagacatggctggaaagatcaagctgtgggacctgaggaccacgaagtgcgtaaggcagtacgaaggccacgtgaatgagtacgcctacctgcccctgcatgtgcacgaggaagaaggaatcctggtggcagtgggccaggactgctacacgagaatctggagcctccacgatgcccgcctactgagaaccataccctccccgtaccctgcctccaaggccgacattcccagtgtggccttctcgtcgcggctggggggctcccggggcgcgccggggctgctcatggctgtcgggcaggacctttactgttactcctacagctaattctgcagggcacagcccagagccatgtggatttgacttacgggagtaaagcgtaactttttactgcatctaatgagggtgttttaagtgacactcagtgtacacagatcccatcctctggctgctaggagagaagtgctgaatgttccgtgtggagatgctcaggaaagttatttgagttaaattgctggctgagagagcttggaagtccttttcataaaaggtacctctttccttttcttattgaattcttagaacttagttaaccctccctgccttttcttaacaaaaaggacttttctaaggactgaagattggcaaaaacgaaaagcttcttcctccaagagcccattgaagaagcccagtgatgagacggtgagatggtttgagtcctcggtgcctgggtagcaggaagaaagacctgcatcctgcatctgtacttggggaagccagcggagaggacggggaggttacttctctaagtttctgcagaaatattgaaggctggagtttggaatccttaaacttggccttctcaaactcagcagcagatctccgggattctgctgttattatccaaaggcgttggaaggaaagatggatcttcttacatgctagaagttttaaacggtccttaacatgcctttgttcaagcaccttccagaatgtaaggttcagcagctctggtttctattacggtgacttgaatgtcagattcaagggcccggcgtcaaaggaaattggttttgactttttgtaatctaggagcgacagttcgtgagatgtttattcagtgttaaagagcctgtttttctaccaaacaataaaaccaagagaagaatc

SEQ ID NO: 9860 - protein, 325 aa, Homo sapiens; identical to SEQ ID NO: 1569

SEQ ID NO: 9861 - DNA, 2506 bp, Homo sapiens
tgagaaggaaagaacggccgctatagccctatcggctgctacaacaccaaaacgcatccacctaactggctgacgctacaccttggtctttccgggtccttgcacgcttcgctccaactcctgcagagctgagccggaggggaatccggaagggacacgctgaacaggaacagaaatgaataaaagtcgctggcagagtagaagacgacatgggagaagaagccaccagcagaacccttggttcagactccgtgattctgaagacaggtctgactcccgggcagcacagcccgctcacgattccggccacggtgatgacgagtctccgtcaacctcgtctggcacagctgggacctcctctgtgccagagctacctgggttttactttgaccctgaaaagaaacgctacttccgcttgctccctggacataacaactgcaaccccctgacgaaagagagcatccggcagaaggagatggagagcaagagactgcggctgctccaggaagaagacagacggaaaaagattgccaggatgggatttaatgcatcttccatgctacgaaaaagccagctgggttttctcaacgtcaccaattactgccatttagcccacgagctgcgtctcagctgcatggagaggaaaaaggtccagattcgaagcatggatccctccgccttggcaagcgaccgatttaacctcatactggcagataccaacagtgaccggctcttcacagtgaacgatgttaaagttggaggctccaagtatggtatcatcaacctgcaaagtctgaagacccctacgctcaaggtgttcatgcacgaaaacctctacttcaccaaccggaaggtgaattcggtgtgctgggcctcgctgaatcacttggattcccacattctgctatgcctcatgggactcgcagagactccaggctgtgccaccctgctcccagcatcactgttcgtcaatagtcacccaggaatagaccggcctggcatgctctgcagtttccggatccctggtgcctggtcctgtgcctggtccctgaatatccaagcaaataactgcttcagtacaggcttgtctcggcgggtcctgttgaccaacgtggtgacgggacaccggcagtcctttgggaccaacagtgatgtcttggcccagcagtttgctctcatggctcctctgctgtttaatggctgccgctctggggaaatctttgccattgatctgcgttgtggaaatcaaggcaagggatggaaggccacccgcctgtttcatgattcagcagtgacctctgtgcggatcctccaagatgagcaatacctgatggcttcagacatggctggaaagatcaagctgtgggacctgaggaccacgaagtgcgtaaggcagtacgaaggccacgtgaatgagtacgcctacctgcccctgcatgtgcacgaggaagaaggaatcctggtggcagtgggccaggactgctacacgagaatctggagcctccacgatgcccgcctactgagaaccataccctccccgtaccctgcctccaaggccgacattcccagtgtggccttctcgtcgcggctggggggctcccggggcgcgccggggctgctcatggctgtcgggcaggacctttactgttactcctacagctaattctgcagggcacagcccagagccatgtggatttgacttacgggagtaaagcgtaactttttactgcatctaatgagggtgttttaagtgacactcagtgtacacagatcccatcctctggctgctaggagagaagtgctgaatgttccgtgtggagatgctcaggaaagttatttgagttaaattgctggctgagagagcttggaagtccttttcataaaaggtacctctttccttttcttattgaattcttagaacttagttaaccctccctgccttttcttaacaaaaaggacttttctaaggactgaagattggcaaaaacgaaaagcttcttcctccaagagcccattgaagaagcccagtgatgagacggtgagatggtttgagtcctcggtgcctgggtagcaggaagaaagacctgcatcctgcatctgtacttggggaagccagcggagaggacggggaggttacttctctaagtttctgcagaaatattgaaggctggagtttggaatccttaaacttggccttctcaaactcagcagcagatctccgggattctgctgttattatccaaaggcgttggaaggaaagatggatcttcttacatgctagaagttttaaacggtccttaacatgcctttgttcaagcaccttccagaatgtaaggttcagcagctctggtttctattacggtgacttgaatgtcagattcaagggcccggcgtcaaaggaaattggttttgactttttgtaatctaggagcgacagttcgtgagatgtttattcagtgttaaagagcctgtttttctaccaaacaataaaaccaagagaagaatc

SEQ ID NO: 9862 - protein, 495 aa, Homo sapiens; identical to SEQ ID NO: 1565

SEQ ID NO: 9863 - DNA, 2406 bp, Homo sapiens
tgagaaggaaagaacggccgctatagccctatcggctgctacaacaccaaaacgcatccacctaactggctgacgctacaccttggtctttccgggtccttgcacgcttcgctccaactcctgcagagctgagccggaggggaatccggaagggacacgctgaacaggtctgactcccgggcagcacagcccgctcacgattccggccacggtgatgacgagtctccgtcaacctcgtctggcacagctgggacctcctctgtgccagagctacctgggttttactttgaccctgaaaagaaacgctacttccgcttgctccctggacataacaactgcaaccccctgacgaaagagagcatccggcagaaggagatggagagcaagagactgcggctgctccaggaagaagacagacggaaaaagattgccaggatgggatttaatgcatcttccatgctacgaaaaagccagctgggttttctcaacgtcaccaattactgccatttagcccacgagctgcgtctcagctgcatggagaggaaaaaggtccagattcgaagcatggatccctccgccttggcaagcgaccgatttaacctcatactggcagataccaacagtgaccggctcttcacagtgaacgatgttaaagttggaggctccaagtatggtatcatcaacctgcaaagtctgaagacccctacgctcaaggtgttcatgcacgaaaacctctacttcaccaaccggaaggtgaattcggtgtgctgggcctcgctgaatcacttggattcccacattctgctatgcctcatgggactcgcagagactccaggctgtgccaccctgctcccagcatcactgttcgtcaatagtcacccaggaatagaccggcctggcatgctctgcagtttccggatccctggtgcctggtcctgtgcctggtccctgaatatccaagcaaataactgcttcagtacaggcttgtctcggcgggtcctgttgaccaacgtggtgacgggacaccggcagtcctttgggaccaacagtgatgtcttggcccagcagtttgctctcatggctcctctgctgtttaatggctgccgctctggggaaatctttgccattgatctgcgttgtggaaatcaaggcaagggatggaaggccacccgcctgtttcatgattcagcagtgacctctgtgcggatcctccaagatgagcaatacctgatggcttcagacatggctggaaagatcaagctgtgggacctgaggaccacgaagtgcgtaaggcagtacgaaggccacgtgaatgagtacgcctacctgcccctgcatgtgcacgaggaagaaggaatcctggtggcagtgggccaggactgctacacgagaatctggagcctccacgatgcccgcctactgagaaccataccctccccgtaccctgcctccaaggccgacattcccagtgtggccttctcgtcgcggctggggggctcccggggcgcgccggggctgctcatggctgtcgggcaggacctttactgttactcctacagctaattctgcagggcacagcccagagccatgtggatttgacttacgggagtaaagcgtaactttttactgcatctaatgagggtgttttaagtgacactcagtgtacacagatcccatcctctggctgctaggagagaagtgctgaatgttccgtgtggagatgctcaggaaagttatttgagttaaattgctggctgagagagcttggaagtccttttcataaaaggtacctctttccttttcttattgaattcttagaacttagttaaccctccctgccttttcttaacaaaaaggacttttctaaggactgaagattggcaaaaacgaaaagcttcttcctccaagagcccattgaagaagcccagtgatgagacggtgagatggtttgagtcctcggtgcctgggtagcaggaagaaagacctgcatcctgcatctgtacttggggaagccagcggagaggacggggaggttacttctctaagtttctgcagaaatattgaaggctggagtttggaatccttaaacttggccttctcaaactcagcagcagatctccgggattctgctgttattatccaaaggcgttggaaggaaagatggatcttcttacatgctagaagttttaaacggtccttaacatgcctttgttcaagcaccttccagaatgtaaggttcagcagctctggtttctattacggtgacttgaatgtcagattcaagggcccggcgtcaaaggaaattggttttgactttttgtaatctaggagcgacagttcgtgagatgtttattcagtgttaaagagcctgtttttctaccaaacaataaaaccaagagaagaatc

SEQ ID NO: 9864 - protein, 395 aa, Homo sapiens; identical to SEQ ID NO: 1567

SEQ ID NO: 9865 - DNA, 2354 bp, Homo sapiens
gcttagtaagtcctgaattgaacagctacacatcaagtcttatggtcactttgaagagaataaagccagagggattcctggtgtgtctccgttcttccctgccagggagttagtggttctgagttggccacggtgagtgtgcaactcaccaaacatccctcttcctccttcctttcactcccttctcagagcatgatggaagcctgcgttttcatttcagactgatgggtttctgaaggacaacaacaatgctgcccagcgcctgttggacgggatgaacttcatggctcagtcggtgtccgagcttagccttggacccaccaaggctgtgacttcctggctgacagaccagatcgcccctgcctactggaggcccaactcccagattctgagctgcaacaagtgtgcgacgtcctttaaagataacgacactaagcatcactgccgagcctgtggggagggcttctgtgacagctgttcatcaaagactcggccagtgcctgagcggggctggggccctgcgccagtgcgggtctgtgacaactgctacgaagccaggaacgtccagttagctgttaccgaggcacaagtggacgatgaaggtggaacgctcattgctcggaaggtgggcgaggccgtgcagaacactctgggagccgtggtgacagccattgacataccactaggtctggtaaaggacgcggccaggcctgcgtactgggtgcctgaccacgaaatcctccactgccacaactgccggaaggagttcagcatcaagctctccaagcaccactgccgggcctgcggacagggcttctgtgatgagtgctcccatgaccgccgggctgttccttctcgtggctgggaccatcccgtccgagtctgcttcaactgcaataaaaagcccggtgacctttaaccccagccccctctccgagtccttcacaattccttaggttctcagggttagaaacagtcttgcgaggtaggccctcctcccagtcacctgctgtggtgtgtgtcctctcctctccgcatccagggccactttccctcagtgggggtgagcctggcggcaggcccgaaggtgtggacccctcagggcaggggaccttgcaacttatcgcaaaggggaatgaacctgaatccgttgcatttatttcagttaaaaataatgaatatatatgtgtatatctctctctcatatatacatatgaaaggcactcggggcgtatcgaggctgctgctggctgtgaagacttcgcacagtctcctccgcacagggtgaggtggcagtggcagcacgtcttcctcatgagccgagccaggtccatggccaccacgtggctggccccttcctctgctgctcttggagccttggaagcctctcctgtccttggctcttccctccatgcctgtcagctgcctggggagtgagcctccctggtccttcctgcctgaaacagcctgaagggaattctccctaggtctcctgggagtcgagtcccaattcttggcttaagcctgttttagtcagagaccacccaacttagcgtgcaggtcaccggagtgggtggagggtcagaggtcgggtcttcggccctgagaagtagaaatgcaggggccgtgctgtccctggtcccccagggaacagcaaggaaggaactgagccttctccagcagggcttcctgtcccgatgcttctgtctccactcggctttcccaaaaggcggcacccagctcctcaatcgaagcatctgcctcccacccctcggccccctcaagcccaccatctgcttctgagtgtcgcactaggattttcattgcttattttaaagtgtcttaatcctttgttcccagacacacaacccctctagctctcggaggggcgatcatgagaaaccttccagggaaactgagcacaggatgaactgttagttgtttttaaaagtctatataaatatttcaacagatcgtaaagaaaaaatttatctctttggtccttgcaagagaagtcaaaggaacttttgtttctcctcaagagcctggacatctctgtctgtcatgactggaaagggcccgttgtgctgaaatcctatcatcatggtggatttgatcttcagtggccaaacacgaattaaagtataattcttaactgaactggtgggtgggttgagctttagggaagtatatggcggtcattcctggtgcgcctatcggtgtgacatgagccctggagtgtgtcgtccctctcagccctgctcctcctgcctcctggggtccagtgactgggaccctactctagaactgtgtaccatccaattcgccatcataaaggaatcttcctgcatctc

SEQ ID NO: 9866 - protein, 214 aa, Homo sapiens
MNFMAQSVSELSLGPTKAVTSWLTDQIAPAYWRPNSQILSCNKCATSFKDNDTKHHCRACGEGFCDSCSSKTRPVPERGWGPAPVRVCDNCYEARNVQLAVTEAQVDDEGGTLIARKVGEAVQNTLGAVVTAIDIPLGLVKDAARPAYWVPDHEILHCHNCRKEFSIKLSKHHCRACGQGFCDECSHDRRAVPSRGWDHPVRVCFNCNKKPGDL

SEQ ID NO: 9867 - DNA, 2632 bp, Homo sapiens
gcctttctcttctagctttgggatctcaggaggaggagaacccaagaaactgtggaatgatgtgaggcactaagtgaccgcttcagcggtgagatccccgatgaccagatggcgcacagctccttttttccagatgagtatttcacctgctcctccttgtgcctcagctgtggggttggatgtaagaaaagcatgaatcatgggaaggaaggagtgcctcatgaagccaagagccgctgcagatactcccaccagtatgacaaccgagtgtatacctgcaaggcctgctatgagagaggcgaggaagtcagtgtagtgcccaaaacatctgcttccactgactccccctggatgggtctcgcaaaatatgcctggtctgggtatgtgatcgaatgtcctaactgtggcgtggtctatcgtagtcggcagtactggtttggaaaccaagatcctgtggatacggtggtgcggacagagattgtgcatgtgtggcctggaactgatgggtttctgaaggacaacaacaatgctgcccagcgcctgttggacgggatgaacttcatggctcagtcggtgtccgagcttagccttggacccaccaaggctgtgacttcctggctgacagaccagatcgcccctgcctactggaggcccaactcccagattctgagctgcaacaagtgtgcgacgtcctttaaagataacgacactaagcatcactgccgagcctgtggggagggcttctgtgacagctgttcatcaaagactcggccagtgcctgagcggggctggggccctgcgccagtgcgggtctgtgacaactgctacgaagccaggaacgtccagttagctgttaccgaggcacaagtggacgatgaaggtggaacgctcattgctcggaaggtgggcgaggccgtgcagaacactctgggagccgtggtgacagccattgacataccactaggtctggtaaaggacgcggccaggcctgcgtactgggtgcctgaccacgaaatcctccactgccacaactgccggaaggagttcagcatcaagctctccaagcaccactgccgggcctgcggacagggcttctgtgatgagtgctcccatgaccgccgggctgttccttctcgtggctgggaccatcccgtccgagtctgcttcaactgcaataaaaagcccggtgacctttaaccccagccccctctccgagtccttcacaattccttaggttctcagggttagaaacagtcttgcgaggtaggccctcctcccagtcacctgctgtggtgtgtgtcctctcctctccgcatccagggccactttccctcagtgggggtgagcctggcggcaggcccgaaggtgtggacccctcagggcaggggaccttgcaacttatcgcaaaggggaatgaacctgaatccgttgcatttatttcagttaaaaataatgaatatatatgtgtatatctctctctcatatatacatatgaaaggcactcggggcgtatcgaggctgctgctggctgtgaagacttcgcacagtctcctccgcacagggtgaggtggcagtggcagcacgtcttcctcatgagccgagccaggtccatggccaccacgtggctggccccttcctctgctgctcttggagccttggaagcctctcctgtccttggctcttccctccatgcctgtcagctgcctggggagtgagcctccctggtccttcctgcctgaaacagcctgaagggaattctccctaggtctcctgggagtcgagtcccaattcttggcttaagcctgttttagtcagagaccacccaacttagcgtgcaggtcaccggagtgggtggagggtcagaggtcgggtcttcggccctgagaagtagaaatgcaggggccgtgctgtccctggtcccccagggaacagcaaggaaggaactgagccttctccagcagggcttcctgtcccgatgcttctgtctccactcggctttcccaaaaggcggcacccagctcctcaatcgaagcatctgcctcccacccctcggccccctcaagcccaccatctgcttctgagtgtcgcactaggattttcattgcttattttaaagtgtcttaatcctttgttcccagacacacaacccctctagctctcggaggggcgatcatgagaaaccttccagggaaactgagcacaggatgaactgttagttgtttttaaaagtctatataaatatttcaacagatcgtaaagaaaaaatttatctctttggtccttgcaagagaagtcaaaggaacttttgtttctcctcaagagcctggacatctctgtctgtcatgactggaaagggcccgttgtgctgaaatcctatcatcatggtggatttgatcttcagtggccaaacacgaattaaagtataattcttaactgaactggtgggtgggttgagctttagggaagtatatggcggtcattcctggtgcgcctatcggtgtgacatgagccctggagtgtgtcgtccctctcagccctgctcctcctgcctcctggggtccagtgactgggaccctactctagaactgtgtaccatccaattcgccatcataaaggaatcttcctgcatctc

SEQ ID NO: 9868 - protein, 362 aa, Homo sapiens; identical to SEQ ID NO: 1573

SEQ ID NO: 9869 - DNA, 4375 bp, Homo sapiens
cgccttcctgttagtccgagctgggagaagttcactccgatcagctgatcccaactgacaacaggagaggaggaagcccgggaggcaacgaaggaggagggtggcggagatggagatgaggatggatctgccggtgtcctgaggaatagcctctgcccccactggcgccctgcggccccccgacgccgccttgctgcggccgagcttctcagtggtatcccctgaaatactgacttcaggtcgaattatattgaaaagctcctgaccactttctttcattaccaaaactttgtagctgatgtccaaccgatgaacccaccaccgtgaacccatcagacctctctcagatagccataaaagacccttccaagtcaattttgaccacatctttgcttgcactttatggaggatgaaaccatcaaaccaaatcaacgttgctgctaatacaagagtcttagaggcagcaaattaaaaatttgaacatttgtttgtgaagaactataacaggacatgaaaggtgttcttttttaaagtgttcagaaccctgtggaagtttcgtgcagtcttcagactcaaatcttcgtcttcacccccggggcaagctcagtgactattatatggtgggtgtgtttccttaccagcgtgagtatgagtgcccagacttccccagcagagaagggcctgaatccggggctgatgtgccaggaaagttacgcttgcagcgggactgatgaagctatctttgagtgtgatgagtgctgcagtctgcagtgtctccgctgcgaggaggagctccatcggcaggagcgcctgagaaaccatgagcggataagactcaaacctggccatgtcccttactgtgacctctgcaagggtctcagtgggcatttaccaggtgttaggcagagggcaatagtgaggtgccagacctgcaaaattaacttgtgcctggagtgccagaagaggactcattctgggggtaacaaaaggagacaccctgttactgtgtacaatgtcagtaatctccaggagtcactggaggcagaagagatggatgaggagaccaagaggaagaagatgactgagaaggttgtgagtttcctcctagtagacgaaaatgaagaaattcaggtaacaaatgaagaagactttattagaaaattggactgcaaacctgatcagcatctgaaagtggtttccatttttggaaatactggtgatggaaagtctcatactctcaaccacactttcttttatggtcgtgaagtctttaaaacctccccgacccaggagtcctgcactgtgggagtgtgggcagcctatgacccagttcacaaagtagcagtgatcgatacggaagggctcctgggggccaccgtgaatctaagccagagaacacggctgctgcttaaggtcctggccatctcagacctcgtcatctatcgaactcatgcagaccggctgcataacgacctcttcaaattccttggggatgcctcagaagcttatctgaagcacttcaccaaggagctcaaggccaccactgctcgctgtggcctggatgtccctttatccacactgggccctgcagttatcatcttccatgagaccgtgcacacccagctactgggctctgatcatccctcagaggtgccagagaagctcatccaggaccggttccggaagctgggccgtttccctgaagcctttagttccattcactacaagggaacgaggacttacaaccctcccacggacttttctgggcttcggcgtgctttggagcagctactagagaataacaccacccgttctccccggcacccgggagtcatcttcaaagccctgaaggcactaagtgaccgcttcagcggtgagatccccgatgaccagatggcgcacagctccttttttccagatgagtatttcacctgctcctccttgtgcctcagctgtggggttggatgtaagaaaagcatgaatcatgggaaggaaggagtgcctcatgaagccaagagccgctgcagatactcccaccagtatgacaaccgagtgtatacctgcaaggcctgctatgagagaggcgaggaagtcagtgtagtgcccaaaacatctgcttccactgactccccctggatgggtctcgcaaaatatgcctggtctggtcggcagtactggtttggaaaccaagatcctgtggatacggtggtgcggacagagattgtgcatgtgtggcctggaactgatgggtttctgaaggacaacaacaatgctgcccagcgcctgttggacgggatgaacttcatggctcagtcggtgtccgagcttagccttggacccaccaaggctgtgacttcctggctgacagaccagatcgcccctgcctactggaggcccaactcccagattctgagctgcaacaagtgtgcgacgtcctttaaagataacgacactaagcatcactgccgagcctgtggggagggcttctgtgacagctgttcatcaaagactcggccagtgcctgagcggggctggggccctgcgccagtgcgggtctgtgacaactgctacgaagccaggaacgtccagttagctgttaccgaggcacaagtggacgatgaaggtggaacgctcattgctcggaaggtgggcgaggccgtgcagaacactctgggagccgtggtgacagccattgacataccactaggtctggtaaaggacgcggccaggcctgcgtactgggtgcctgaccacgaaatcctccactgccacaactgccggaaggagttcagcatcaagctctccaagcaccactgccgggcctgcggacagggcttctgtgatgagtgctcccatgaccgccgggctgttccttctcgtggctgggaccatcccgtccgagtctgcttcaactgcaataaaaagcccggtgacctttaaccccagccccctctccgagtccttcacaattccttaggttctcagggttagaaacagtcttgcgaggtaggccctcctcccagtcacctgctgtggtgtgtgtcctctcctctccgcatccagggccactttccctcagtgggggtgagcctggcggcaggcccgaaggtgtggacccctcagggcaggggaccttgcaacttatcgcaaaggggaatgaacctgaatccgttgcatttatttcagttaaaaataatgaatatatatgtgtatatctctctctcatatatacatatgaaaggcactcggggcgtatcgaggctgctgctggctgtgaagacttcgcacagtctcctccgcacagggtgaggtggcagtggcagcacgtcttcctcatgagccgagccaggtccatggccaccacgtggctggccccttcctctgctgctcttggagccttggaagcctctcctgtccttggctcttccctccatgcctgtcagctgcctggggagtgagcctccctggtccttcctgcctgaaacagcctgaagggaattctccctaggtctcctgggagtcgagtcccaattcttggcttaagcctgttttagtcagagaccacccaacttagcgtgcaggtcaccggagtgggtggagggtcagaggtcgggtcttcggccctgagaagtagaaatgcaggggccgtgctgtccctggtcccccagggaacagcaaggaaggaactgagccttctccagcagggcttcctgtcccgatgcttctgtctccactcggctttcccaaaaggcggcacccagctcctcaatcgaagcatctgcctcccacccctcggccccctcaagcccaccatctgcttctgagtgtcgcactaggattttcattgcttattttaaagtgtcttaatcctttgttcccagacacacaacccctctagctctcggaggggcgatcatgagaaaccttccagggaaactgagcacaggatgaactgttagttgtttttaaaagtctatataaatatttcaacagatcgtaaagaaaaaatttatctctttggtccttgcaagagaagtcaaaggaacttttgtttctcctcaagagcctggacatctctgtctgtcatgactggaaagggcccgttgtgctgaaatcctatcatcatggtggatttgatcttcagtggccaaacacgaattaaagtataattcttaactgaactggtgggtgggttgagctttagggaagtatatggcggtcattcctggtgcgcctatcggtgtgacatgagccctggagtgtgtcgtccctctcagccctgctcctcctgcctcctggggtccagtgactgggaccctactctagaactgtgtaccatccaattcgccatcataaaggaatcttcctgcatctc

SEQ ID NO: 9870 - protein, 763 aa, Homo sapiens
MSAQTSPAEKGLNPGLMCQESYACSGTDEAIFECDECCSLQCLRCEEELHRQERLRNHERIRLKPGHVPYCDLCKGLSGHLPGVRQRAIVRCQTCKINLCLECQKRTHSGGNKRRHPVTVYNVSNLQESLEAEEMDEETKRKKMTEKVVSFLLVDENEEIQVTNEEDFIRKLDCKPDQHLKVVSIFGNTGDGKSHTLNHTFFYGREVFKTSPTQESCTVGVWAAYDPVHKVAVIDTEGLLGATVNLSQRTRLLLKVLAISDLVIYRTHADRLHNDLFKFLGDASEAYLKHFTKELKATTARCGLDVPLSTLGPAVIIFHETVHTQLLGSDHPSEVPEKLIQDRFRKLGRFPEAFSSIHYKGTRTYNPPTDFSGLRRALEQLLENNTTRSPRHPGVIFKALKALSDRFSGEIPDDQMAHSSFFPDEYFTCSSLCLSCGVGCKKSMNHGKEGVPHEAKSRCRYSHQYDNRVYTCKACYERGEEVSVVPKTSASTDSPWMGLAKYAWSGRQYWFGNQDPVDTVVRTEIVHVWPGTDGFLKDNNNAAQRLLDGMNFMAQSVSELSLGPTKAVTSWLTDQIAPAYWRPNSQILSCNKCATSFKDNDTKHHCRACGEGFCDSCSSKTRPVPERGWGPAPVRVCDNCYEARNVQLAVTEAQVDDEGGTLIARKVGEAVQNTLGAVVTAIDIPLGLVKDAARPAYWVPDHEILHCHNCRKEFSIKLSKHHCRACGQGFCDECSHDRRAVPSRGWDHPVRVCFNCNKKPGDL

SEQ ID NO: 9871 - DNA, 4417 bp, Homo sapiens
cgccttcctgttagtccgagctgggagaagttcactccgatcagctgatcccaactgacaacaggagaggaggaagcccgggaggcaacgaaggaggagggtggcggagatggagatgaggatggatctgccggtgtcctgaggaatagcctctgcccccactggcgccctgcggccccccgacgccgccttgctgcggccgagcttctcagtggtatcccctgaaatactgacttcaggtcgaattatattgaaaagctcctgaccactttctttcattaccaaaactttgtagctgatgtccaaccgatgaacccaccaccgtgaacccatcagacctctctcagatagccataaaagacccttccaagtcaattttgaccacatctttgcttgcactttatggaggatgaaaccatcaaaccaaatcaacgttgctgctaatacaagagtcttagaggcagcaaattaaaaatttgaacatttgtttgtgaagaactataacaggacatgaaaggtgttcttttttaaagtgttcagaaccctgtggaagtttcgtgcagtcttcagactcaaatcttcgtcttcacccccggggcaagctcagtgactattatatggtgggtgtgtttccttaccagcgtgagtatgagtgcccagacttccccagcagagaagggcctgaatccggggctgatgtgccaggaaagttacgcttgcagcgggactgatgaagctatctttgagtgtgatgagtgctgcagtctgcagtgtctccgctgcgaggaggagctccatcggcaggagcgcctgagaaaccatgagcggataagactcaaacctggccatgtcccttactgtgacctctgcaagggtctcagtgggcatttaccaggtgttaggcagagggcaatagtgaggtgccagacctgcaaaattaacttgtgcctggagtgccagaagaggactcattctgggggtaacaaaaggagacaccctgttactgtgtacaatgtcagtaatctccaggagtcactggaggcagaagagatggatgaggagaccaagaggaagaagatgactgagaaggttgtgagtttcctcctagtagacgaaaatgaagaaattcaggtaacaaatgaagaagactttattagaaaattggactgcaaacctgatcagcatctgaaagtggtttccatttttggaaatactggtgatggaaagtctcatactctcaaccacactttcttttatggtcgtgaagtctttaaaacctccccgacccaggagtcctgcactgtgggagtgtgggcagcctatgacccagttcacaaagtagcagtgatcgatacggaagggctcctgggggccaccgtgaatctaagccagagaacacggctgctgcttaaggtcctggccatctcagacctcgtcatctatcgaactcatgcagaccggctgcataacgacctcttcaaattccttggggatgcctcagaagcttatctgaagcacttcaccaaggagctcaaggccaccactgctcgctgtggcctggatgtccctttatccacactgggccctgcagttatcatcttccatgagaccgtgcacacccagctactgggctctgatcatccctcagaggtgccagagaagctcatccaggaccggttccggaagctgggccgtttccctgaagcctttagttccattcactacaagggaacgaggacttacaaccctcccacggacttttctgggcttcggcgtgctttggagcagctactagagaataacaccacccgttctccccggcacccgggagtcatcttcaaagccctgaaggcactaagtgaccgcttcagcggtgagatccccgatgaccagatggcgcacagctccttttttccagatgagtatttcacctgctcctccttgtgcctcagctgtggggttggatgtaagaaaagcatgaatcatgggaaggaaggagtgcctcatgaagccaagagccgctgcagatactcccaccagtatgacaaccgagtgtatacctgcaaggcctgctatgagagaggcgaggaagtcagtgtagtgcccaaaacatctgcttccactgactccccctggatgggtctcgcaaaatatgcctggtctgggtatgtgatcgaatgtcctaactgtggcgtggtctatcgtagtcggcagtactggtttggaaaccaagatcctgtggatacggtggtgcggacagagattgtgcatgtgtggcctggaactgatgggtttctgaaggacaacaacaatgctgcccagcgcctgttggacgggatgaacttcatggctcagtcggtgtccgagcttagccttggacccaccaaggctgtgacttcctggctgacagaccagatcgcccctgcctactggaggcccaactcccagattctgagctgcaacaagtgtgcgacgtcctttaaagataacgacactaagcatcactgccgagcctgtggggagggcttctgtgacagctgttcatcaaagactcggccagtgcctgagcggggctggggccctgcgccagtgcgggtctgtgacaactgctacgaagccaggaacgtccagttagctgttaccgaggcacaagtggacgatgaaggtggaacgctcattgctcggaaggtgggcgaggccgtgcagaacactctgggagccgtggtgacagccattgacataccactaggtctggtaaaggacgcggccaggcctgcgtactgggtgcctgaccacgaaatcctccactgccacaactgccggaaggagttcagcatcaagctctccaagcaccactgccgggcctgcggacagggcttctgtgatgagtgctcccatgaccgccgggctgttccttctcgtggctgggaccatcccgtccgagtctgcttcaactgcaataaaaagcccggtgacctttaaccccagccccctctccgagtccttcacaattccttaggttctcagggttagaaacagtcttgcgaggtaggccctcctcccagtcacctgctgtggtgtgtgtcctctcctctccgcatccagggccactttccctcagtgggggtgagcctggcggcaggcccgaaggtgtggacccctcagggcaggggaccttgcaacttatcgcaaaggggaatgaacctgaatccgttgcatttatttcagttaaaaataatgaatatatatgtgtatatctctctctcatatatacatatgaaaggcactcggggcgtatcgaggctgctgctggctgtgaagacttcgcacagtctcctccgcacagggtgaggtggcagtggcagcacgtcttcctcatgagccgagccaggtccatggccaccacgtggctggccccttcctctgctgctcttggagccttggaagcctctcctgtccttggctcttccctccatgcctgtcagctgcctggggagtgagcctccctggtccttcctgcctgaaacagcctgaagggaattctccctaggtctcctgggagtcgagtcccaattcttggcttaagcctgttttagtcagagaccacccaacttagcgtgcaggtcaccggagtgggtggagggtcagaggtcgggtcttcggccctgagaagtagaaatgcaggggccgtgctgtccctggtcccccagggaacagcaaggaaggaactgagccttctccagcagggcttcctgtcccgatgcttctgtctccactcggctttcccaaaaggcggcacccagctcctcaatcgaagcatctgcctcccacccctcggccccctcaagcccaccatctgcttctgagtgtcgcactaggattttcattgcttattttaaagtgtcttaatcctttgttcccagacacacaacccctctagctctcggaggggcgatcatgagaaaccttccagggaaactgagcacaggatgaactgttagttgtttttaaaagtctatataaatatttcaacagatcgtaaagaaaaaatttatctctttggtccttgcaagagaagtcaaaggaacttttgtttctcctcaagagcctggacatctctgtctgtcatgactggaaagggcccgttgtgctgaaatcctatcatcatggtggatttgatcttcagtggccaaacacgaattaaagtataattcttaactgaactggtgggtgggttgagctttagggaagtatatggcggtcattcctggtgcgcctatcggtgtgacatgagccctggagtgtgtcgtccctctcagccctgctcctcctgcctcctggggtccagtgactgggaccctactctagaactgtgtaccatccaattcgccatcataaaggaatcttcctgcatctc

SEQ ID NO: 9872 - protein, 777 aa, Homo sapiens; identical to SEQ ID NO: 1571

SEQ ID NO: 9873 - DNA, 754 bp, Homo sapiens
gatcctgtggatacggtggtgcggacagagattgtgcatgtgtggcctggaactgatgggtttctgaaggacaacaacaatgctgcccagcgcctgttggacgggatgaacttcatggctcagtcggtgtccgagcttagccttggacccaccaaggctgtgacttcctggctgacagaccagatcgcccctgcctactggaggcccaactcccagattctgagctgcaacaagtgtgcgacgtcctttaaagataacgacactaagcatcactgccgagcctgtggggagggcttctgtgacagctgttcatcaaagactcggccagtgcctgagcggggctggggccctgcgccagtgcgggtctgtgacaactgctacgaagccaggaacgtccagttagctgttaccgaggcacaagtggacgatgaaggtggaacgctcattgctcggaaggtgggcgaggccgtgcagaacactctgggagccgtggtgacagccattgacataccactaggtctggtaaaggacgcggccaggcctgcgtactgggtgcctgaccacgaaatcctccactgccacaactgccggaaggagttcagcatcaagctctccaagcaccactgccgggcctgcggacagggcttctgtgatgagtgctcccatgaccgccgggctgttccttctcgtggctgggaccatcccgtccgagtctgcttcaactgcaataaaaagcccggtgacctttaacccc

SEQ ID NO: 9874 - protein, 214 aa, Homo sapiens; identical to SEQ ID NO: 9866

SEQ ID NO: 9875 - DNA, 2986 bp, Homo sapiens
cgccttcctgttagtccgagctgggagaagttcactccgatcagctgatcccaactgacaacaggagaggaggaagcccgggaggcaacgaaggaggagggtggcggagatggagatgaggatggatctgccggtgtcctgaggaatagcctctgcccccactggcgccctgcggccccccgacgccgccttgctgcggccgagcttctcagtggtatcccctgaaatactgacttcaggtcgaattatattgaaaagctcctgaccactttctttcattaccaaaactttgtagctgatgtccaaccgatgaacccaccaccgtgaacccatcagacctctctcagatagccataaaagacccttccaagtcaattttgaccacatctttgcttgcactttatggaggatgaaaccatcaaaccaaatcaacgttgctgctaatacaagagtcttagaggcagcaaattaaaaatttgaacatttgtttgtgaagaactataacaggacatgaaaggtgttcttttttaaagtgttcagaaccctgtggaagtttcgtgcagtcttcagactcaaatcttcgtcttcacccccggggcaagctcagtgactattatatggtgggtgtgtttccttaccagcgtgagtatgagtgcccagacttccccagcagagaagggcctgaatccggggctgatgtgccaggaaagttacgcttgcagcgggactgatgaagctatctttgagtgtgatgagtgctgcagtctgcagtgtctccgctgcgaggaggagctccatcggcaggagcgcctgagaaaccatgagcggataagactcaaacctggccatgtcccttactgtgacctctgcaagggtctcagtgggcatttaccaggtgttaggcagagggcaatagtgaggtgccagacctgcaaaattaacttgtgcctggagtgccagaagaggactcattctgggggtaacaaaaggagacaccctgttactgtgtacaatgtcagtaatctccaggagtcactggaggcagaagagatggatgaggagaccaagaggaagaagatgactgagaaggttgtgagtttcctcctagtagacgaaaatgaagaaattcaggtaacaaatgaagaagactttattagaaaattggactgcaaacctgatcagcatctgaaagtggtttccatttttggaaatactggtgatggaaagtctcatactctcaaccacactttcttttatggtcgtgaagtctttaaaacctccccgacccaggagtcctgcactgtgggagtgtgggcagcctatgacccagttcacaaagtagcagtgatcgatacggaagggctcctgggggccaccgtgaatctaagccagagaacacggctgctgcttaaggtcctggccatctcagacctcgtcatctatcgaactcatgcagaccggctgcataacgacctcttcaaattccttggggatgcctcagaagcttatctgaagcacttcaccaaggagctcaaggccaccactgctcgctgtggcctggatgtccctttatccacactgggccctgcagttatcatcttccatgagaccgtgcacacccagctactgggctctgatcatccctcagaggtgccagagaagctcatccaggaccggttccggaagctgggccgtttccctgaagcctttagttccattcactacaagggaacgaggacttacaaccctcccacggacttttctgggcttcggcgtgctttggagcagctactagagaataacaccacccgttctccccggcacccgggagtcatcttcaaagccctgaaggcactaagtgaccgcttcagcggtgagatccccgatgaccagatggcgcacagctccttttttccagatgagtatttcacctgctcctccttgtgcctcagctgtggggttggatgtaagaaaagcatgaatcatgggaaggaaggagtgcctcatgaagccaagagccgctgcagatactcccaccagtatgacaaccgagtgtatacctgcaaggcctgctatgagagaggcgaggaagtcagtgtagtgcccaaaacatctgcttccactgactccccctggatgggtctcgcaaaatatgcctggtctgggtatgtgatcgaatgtcctaactgtggcgtggtctatcgtagtcggcagtactggtttggaaaccaagatcctgtggatacggtggtgcggacagagattgtgcatgtgtggcctggaactgatgggtttctgaaggacaacaacaatgctgcccagcgcctgttggacgggatgaacttcatggctcagtcggtgtccgagcttagccttggacccaccaaggctgtgacttcctggctgacagaccagatcgcccctgcctactggaggcccaactcccagattctgagctgcaacaagtgtgcgacgtcctttaaagataacgacactaagcatcactgccgagcctgtggggagggcttctgtgacagctgttcatcaaagactcggccagtgcctgagcggggctggggccctgcgccagtgcgggtctgtgacaactgctacgaagccaggaacgtccagttagctgttaccgaggcacaagtggacgatgaaggtggaacgctcattgctcggaaggtgggcgaggccgtgcagaacactctgggagccgtggtgacagccattgacataccactaggtctggtaaaggacgcggccaggcctgcgtactgggtgcctgaccacgaaatcctccactgccacaactgccggaaggagttcagcatcaagctctccaagcaccactgccgggcctgcggacagggcttctgtgatgagtgctcccatgaccgccgggctgttccttctcgtggctgggaccatcccgtccgagtctgcttcaactgcaataaaaagcccggtgacctttaacccc

SEQ ID NO: 9876 - protein, 777 aa, Homo sapiens; identical to SEQ ID NO: 1571

SEQ ID NO: 9877 - DNA, 910 bp, Homo sapiens
agtgcacgccgggcaagaggaagacctccatcagctcgccgcgcagcgcggctgtatttgcggcctgtgcgagtaggcgcttgggcactcagtctccctggcgagcgacgggcagaaatctcgaaccagtggagcgcactcgtaacctggatcccagaaggtcgcgaaggcagtaccgtttcctcagcggcggactgctgcagtaagaatgtcttttccacctcatttgaatcgccctcccatgggaatcccagcactcccaccagggatcccacccccgcagtttccaggatttcctccacctgtacctccagggaccccaatgattcctgtaccaatgagcattatggctcctgctccaactgtcttagtacccactgtgtctatggttggaaagcatttgggcgcaagaaaggatcatccaggcttaaaggctaaagaaaatgatgaaaattgtggtcctactaccactgtttttgttggcaacatttccgagaaagcttcagacatgcttataagacaactcttagctaaatgtggtttggttttgagctggaagagagtacaaggtgcttccggaaagcttcaagccttcggattctgtgagtacaaggagccagaatctaccctccgtgcactcagattattacatgacctgcaaattggagagaaaaagctactcgttaaagttgatgcaaagacaaaggcacagctggatgaatggaaagcaaagaagaaagcttctaatgggaatgcaaggccagaaactgtcactaatgacgatgaagaagccttggatgaagaaacaaagaggagagatcagatgattaaaggggctattgaagttttaattcgtgaatactccagtgagctaaatgccccctcacaggaatctgattctcaccccagg

SEQ ID NO: 9878 - protein, 233 aa, Homo sapiens
MSFPPHLNRPPMGIPALPPGIPPPQFPGFPPPVPPGTPMIPVPMSIMAPAPTVLVPTVSMVGKHLGARKDHPGLKAKENDENCGPTTTVFVGNISEKASDMLIRQLLAKCGLVLSWKRVQGASGKLQAFGFCEYKEPESTLRALRLLHDLQIGEKKLLVKVDAKTKAQLDEWKAKKKASNGNARPETVTNDDEEALDEETKRRDQMIKGAIEVLIREYSSELNAPSQESDSHP

SEQ ID NO: 9879 - DNA, 1054 bp, Homo sapiens
agtgcacgccgggcaagaggaagacctccatcagctcgccgcgcagcgcggctgtatttgcggcctgtgcgagtaggcgcttgggcactcagtctccctggcgagcgacgggcagaaatctcgaaccagtggagcgcactcgtaacctggatcccagaaggtcgcgaaggcagtaccgtttcctcagcggcggactgctgcagtaagaatgtcttttccacctcatttgaatcgccctcccatgggaatcccagcactcccaccagggatcccacccccgcagtttccaggatttcctccacctgtacctccagggaccccaatgattcctgtaccaatgagcattatggctcctgctccaactgtcttagtacccactgtgtctatggttggaaagcatttgggcgcaagaaaggatcatccaggcttaaaggctaaagaaaatgatgaaaattgtggtcctactaccactgtttttgttggcaacatttccgagaaagcttcagacatgcttataagacaactcttagctaaatgtggtttggttttgagctggaagagagtacaaggtgcttccggaaagcttcaagccttcggattctgtgagtacaaggagccagaatctaccctccgtgcactcagattattacatgacctgcaaattggagagaaaaagctactcgttaaagttgatgcaaagacaaaggcacagctggatgaatggaaagcaaagaagaaagcttctaatgggaatgcaaggccagaaactgtcactaatgacgatgaagaagccttggatgaagaaacaaagaggagagatcagatgattaaaggggctattgaagttttaattcgtgaatactccagtgagctaaatgccccctcacaggaatctgattctcaccccaggaagaagaagaaggaaaagaaggaggacattttccgcagatttccagtggccccactgatcccttatccactcatcactaaggaggatataaatgctatagaaatggaagaagacaaaagagacctgatatctcgagagatcagc

SEQ ID NO: 9880 - protein, 281 aa, Homo sapiens
MSFPPHLNRPPMGIPALPPGIPPPQFPGFPPPVPPGTPMIPVPMSIMAPAPTVLVPTVSMVGKHLGARKDHPGLKAKENDENCGPTTTVFVGNISEKASDMLIRQLLAKCGLVLSWKRVQGASGKLQAFGFCEYKEPESTLRALRLLHDLQIGEKKLLVKVDAKTKAQLDEWKAKKKASNGNARPETVTNDDEEALDEETKRRDQMIKGAIEVLIREYSSELNAPSQESDSHPRKKKKEKKEDIFRRFPVAPLIPYPLITKEDINAIEMEEDKRDLISREI

SEQ ID NO: 9881 - DNA, 6876 bp, Homo sapiens
agtgcacgccgggcaagaggaagacctccatcagctcgccgcgcagcgcggctgtatttgcggcctgtgcgagtaggcgcttgggcactcagtctccctggcgagcgacgggcagaaatctcgaaccagtggagcgcactcgtaacctggatcccagaaggtcgcgaaggcagtaccgtttcctcagcggcggactgctgcagtaagaatgtcttttccacctcatttgaatcgccctcccatgggaatcccagcactcccaccagggatcccacccccgcagtttccaggatttcctccacctgtacctccagggaccccaatgattcctgtaccaatgagcattatggctcctgctccaactgtcttagtacccactgtgtctatggttggaaagcatttgggcgcaagaaaggatcatccaggcttaaaggctaaagaaaatgatgaaaattgtggtcctactaccactgtttttgttggcaacatttccgagaaagcttcagacatgcttataagacaactcttagctaaatgtggtttggttttgagctggaagagagtacaaggtgcttccggaaagcttcaagccttcggattctgtgagtacaaggagccagaatctaccctccgtgcactcagattattacatgacctgcaaattggagagaaaaagctactcgttaaagttgatgcaaagacaaaggcacagctggatgaatggaaagcaaagaagaaagcttctaatgggaatgcaaggccagaaactgtcactaatgacgatgaagaagccttggatgaagaaacaaagaggagagatcagatgattaaaggggctattgaagttttaattcgtgaatactccagtgagctaaatgccccctcacaggaatctgattctcaccccaggaagaagaagaaggaaaagaaggaggacattttccgcagatttccagtggccccactgatcccttatccactcatcactaaggaggatataaatgctatagaaatggaagaagacaaaagagacctgatatctcgagagatcagcaaattcagagacacacataaggtagtattcttgtcttttcacttgataccaatctagactttttacagaatccaaagcaaagagacaaaaaaaatcaaccttaaattagaatataattttaaatgttttttataggtttaattgatatttagatagaaaaaagaaacagaagaccaataccatattaaagtggtccttgacatgttgtgcttagttttttcagttactgactattctgcagtcatctcactttaatatgaatagaagctaattttatttttagatttcaacataaacatcaaggtcagacttaaattagattcagggggcagcaggataacatacactgtagtgtatttctgggggcagttatttaacttgatcttaggaataccttttctttagagctgagattaaaatttacattttatatttgtatagatttaagttgagtgggggagattttaaacagtaggtcagtggttaccagacttaccaaattttagatgcatggaagaactgtaaattcccataaagctaatctattcattgacccccaccattatgatagagatcatatggtgactaatgcaagatgaaactctcagcttggaaagtaacaaggaataggatgtaagtatgagcttctgttttttattatatttatggatgccccctcagaaaaatatgcaaaggggtaactggcttggaaatgggtatttatgcatagtaaatcccactcacgagttttgcctatttgaagcttctctcaatgacagtgcatctgtgaatgttcgctggtgttgaaaatgatgcttttgaacggtgcaatgcaaacactgcatgaaatgtattttgatggtcgagataataaggtgttgctggttcttactgatagactgagagatctttaactcagtgaaatgttaaatgttcattttctcttttattcttactttttcccattgctttcaaaatctgcagttcacaaataatgccaatgaatcagtgctgctgaacacttactatccagatgcccagcccttgctcacaaacacaatgctttttcaagaattaaatgtgtctaagagcacaaacataattctcccaaaattaattttgagagttgaaaaggtggtctatgggaaatcattttagatgaataattttggttaggtataatactgaaattcaggaccgagtaagcttaaaaatggtatatggttgtgtgtgtggtttaccccctttttgtttttatttatttgttaaaccctgtcatgttattggtaaattatgaggaaatcatgttttaagaaaaattcaaaaatatatttgctttaaagtttgggaatctgttaggcattttactgccttagtattatttcactggagggaatgttttgaattttcagaatgtcttttcaaaataaaaagaaatcaaaatgaaaaaccaaaacagttgttttttattgggtggtttggctaaaagggttgtttgaaactccagtaacaaaaaatgagctcagtgaacctttgcatgttttggtatgagtttattaaataaccacagactgtcagggtatcagcgtggcagggggcgtccatttacagcacggatgagtctgaagagagaataaggtaagatttatgattttttaatctgtcctttcctcttcatgactttcttacataattttagactcacctcatttcccttctccagtctttctttaaaaatatacatgtatgtttacatgtatacctgtatttgtatacatgtgtgtatatatatatatatatatatctcatatataaacttcaggaaacatttagtatggactagattcactcactttttcatttacttagaaccaaacttttgaaatgagttctgaaacaaatggttatttatataactgaatataaggagcacagtgaaataagcaagaattaaaaattgaggaattctacaggaaaaattagtattggaacagctaaaatattctgtaagtatctatttcagaaataaacaaatttctttataagtgtatgccattgaggtaagttttatatagtctagcctcattttacaatataaatttttatattcattggaactgtttcagaaatgagatttttccccctttaatagctgttagtttctgtcctctttctatcatatcttatttcatccctttgtaatttcaatgtattcagttttgactttgcccgtattctacttcgatatagactggcacagcaactgaatatattgctcatacattagctttcctttcataacctgctataagttctctgatccatgaggaagagaaaaagagtatctgacaggtaagattgctttttaaagttgttttaaatgcattacatgactgagaaaagaaaaatgcacattttattgttgcagtttaaaatttcattttggtgaaactaaacgtgaaacaaaagggataaatgtgttttgttttgttttgttttacctgtttggggtatttttttctgagtttgtgtagaaaccgtgtggtacactggtaatcttgtcagggtacaaacttggtctgactttgttatttggtttatttgtgaaccatgtacttgctcttcctcccagaaacatagcttgtaggcaaggttaatccagtgttggcgatccatgtcctagcacagcatctgtaagttaatgcacaatcgttccttccaaggatggatttatcattgtaaatatattttcattgtcttacaggcataatgggcataagtatgttgcttttaaatattttaaattaaactattacagttacatatattttgcttgaagtgagtgattttcaaactttttgtatttggtgggctgtccatcttgtaatggtgggagtaaatgtttccatagatgataaggcagttcttggctgaattcagcttgtgtttcttttggagggtgggcaaatcagagggcagagattatttagttgcattataggtattcttctataccacttgccctttgaaaccctcaacttgaggtaatgtgcagtctggggttttaattagtattaataatcttgtggatttacagaaatctataatgcacagagttgagttttaaccaatgatcgtattcatagaaaatatttcgaaccaccacattcttcatggtcattttagttagtacatagtcattgagtggccagccacacctgacacaatctcccagcatccaagattggagattcctggtctgtgtagagtatatggttttgcacgaaatctttctagtcttgtgattgcttcagtttaatttgtcacataaaaccacaagtatttaatattaatgtatcagtggtttggtgtttttgttcccagtactgggctttgcgccgggaaaaatctgaatactggagctacagagttaactctaaaagtgcttttattggtttctagaaactggaagaagagaaaggcaaaaaggaaaaagaaagacaggaaattgagaaagaacggagagaaagagagagggagcgtgaaagggaacgagaaaggcgagaacgggaacgagaaagggaaagagaacgtgaacgagaaaaggagaaagaacgggagcgggaacgagaacgggatagggaccgtgaccggacaaaagagagagaccgagatcgggatcgagagagagatcgtgaccgggatagagaaaggagctcagatcgtaataaggatcgcagtcgatcaagagaaaaaagcagagatcgtgaaagggaacgagagcgggaaagagagagagagagagaacgagagcgagaacgagaacgggagcgagagagagagcgagagagggaacgggagcgagaaagagaaaaagacaaaaaacgggaccgagaagaagatgaagaagatgcatacgaacgaagaaaacttgaaagaaaactccgagagaaagaagctgcttatcaagagcgccttaagaattgggaaatcagagaacgaaagaaaacccgggaatatgagaaagaagctgaaagagaagaagaaagaagaagagaaatggccaaagaagctaaacgactaaaagaattcttagaagactatgatgatgatagagatgaccccaaatattacagaggaagtgctcttcagaaaaggttgcgtgatagagaaaaggaaatggaagcagatgaacgagataggaagagagagaaggaggagcttgaggaaatcaggcagcgccttctggcagaagggcatccagatccagatgcagagctccagaggatggaacaagaggctgagaggcgcaggcagccacaaataaagcaagagccagaatcagaagaggaggaagaagaaaagcaagaaaaagaagaaaaacgagaagaacccatggaagaggaagaggagccagagcaaaagccttgtctgaaacctactctgaggcccatcagctctgctccatctgtttcctctgccagtggcaatgcaacacctaacactcctggggatgagtctccctgtggtattattattcctcatgaaaactcaccagatcaacagcaacctgaggagcataggccaaaaataggactaagtcttaaactgggtacgttagcatttccttccttctttattttcttcccttcacccctgcaaatacctgtattgtgctttaaagaaaaaaatttatatttgtgcttggttaggtagatagaagattactaaaaaatgcctttctagctcacgattgttttcatagttttactagtgctcctatatctgcagctgcctcgagttctgagaagaagtgaaaagtttaattttctagcacttgtgagtagtgagttattttttacagttgggatctttctctaagatttgtggaagtatattttgcattgcttttgagggatggtgggttataaaatgaaacatttggaaattaagtcatcttgctaagagagtgtttttactgtaggtgcttccaatagtcctggtcagcctaattctgtgaagagaaagaaactacctgtagatagtgtctttaacaaatttgaggatgaagacagtgatgacgtaccccgaaaaaggaaactggttcccttggattatggtgaagatgataaaaatgcaaccaaaggcactgtaaacactgaagaaaagcgtaaacacattaagagtctcattgagaaaatccctacagccaaacctgagctcttcgcttatcccctggattggtctattgtggattctatactgatggaacgtcgaattagaccatggattaataagaaaatcatagaatatataggtgaagaagaagctacattagttgattttgtttgttctaaggttatggctcatagttcaccccagagcattttagatgatgttgccatggtacttgatgaagaagcagaagtttttatagtcaaaatgtggagattattgatatatgaaacagaagccaagaaaattggtcttgtgaagtaaaactttttatatttagagttccatttcagatttcttctttgccacccttttaaggactttgaatttttctttgtctttgaagacattgtgagatctgtaattttttttttttgtagaaaatgtgaattttttggtcctctaatttgttgttgccctgtgtactcccttggttgtaaagtcatctgaatccttggttctctttatactcaccaggtacaaattactggtatgttttataagccgcagctactgtacacagcctatctgatataatcttgttctgctgatttgtttcttgtaaatattaaaacgactccccaatt

SEQ ID NO: 9882 - protein, 300 aa, Homo sapiens
MSFPPHLNRPPMGIPALPPGIPPPQFPGFPPPVPPGTPMIPVPMSIMAPAPTVLVPTVSMVGKHLGARKDHPGLKAKENDENCGPTTTVFVGNISEKASDMLIRQLLAKCGLVLSWKRVQGASGKLQAFGFCEYKEPESTLRALRLLHDLQIGEKKLLVKVDAKTKAQLDEWKAKKKASNGNARPETVTNDDEEALDEETKRRDQMIKGAIEVLIREYSSELNAPSQESDSHPRKKKKEKKEDIFRRFPVAPLIPYPLITKEDINAIEMEEDKRDLISREISKFRDTHKVVFLSFHLIPI

SEQ ID NO: 9883 - DNA, 4247 bp, Homo sapiens
agtgcacgccgggcaagaggaagacctccatcagctcgccgcgcagcgcggctgtatttgcggcctgtgcgagtaggcgcttgggcactcagtctccctggcgagcgacgggcagaaatctcgaaccagtggagcgcactcgtaacctggatcccagaaggtcgcgaaggcagtaccgtttcctcagcggcggactgctgcagtaagaatgtcttttccacctcatttgaatcgccctcccatgggaatcccagcactcccaccagggatcccacccccgcagtttccaggatttcctccacctgtacctccagggaccccaatgattcctgtaccaatgagcattatggctcctgctccaactgtcttagtacccactgtgtctatggttggaaagcatttgggcgcaagaaaggatcatccaggcttaaaggctaaagaaaatgatgaaaattgtggtcctactaccactgtttttgttggcaacatttccgagaaagcttcagacatgcttataagacaactcttagctaaatgtggtttggttttgagctggaagagagtacaaggtgcttccggaaagcttcaagccttcggattctgtgagtacaaggagccagaatctaccctccgtgcactcagattattacatgacctgcaaattggagagaaaaagctactcgttaaagttgatgcaaagacaaaggcacagctggatgaatggaaagcaaagaagaaagcttctaatgggaatgcaaggccagaaactgtcactaatgacgatgaagaagccttggatgaagaaacaaagaggagagatcagatgattaaaggggctattgaagttttaattcgtgaatactccagtgagctaaatgccccctcacaggaatctgattctcaccccaggaagaagaagaaggaaaagaaggaggacattttccgcagatttccagtggccccactgatcccttatccactcatcactaaggaggatataaatgctatagaaatggaagaagacaaaagagacctgatatctcgagagatcagcaaattcagagacacacataagaaactggaagaagagaaaggcaaaaaggaaaaagaaagacaggaaattgagaaagaacggagagaaagagagagggagcgtgaaagggaacgagaaaggcgagaacgggaacgagaaagggaaagagaacgtgaacgagaaaaggagaaagaacgggagcgggaacgagaacgggatagggaccgtgaccggacaaaagagagagaccgagatcgggatcgagagagagatcgtgaccgggatagagaaaggagctcagatcgtaataaggatcgcagtcgatcaagagaaaaaagcagagatcgtgaaagggaacgagagcgggaaagagagagagagagagaacgagagcgagaacgagaacgggagcgagagagagagcgagagagggaacgggagcgagaaagagaaaaagacaaaaaacgggaccgagaagaagatgaagaagatgcatacgaacgaagaaaacttgaaagaaaactccgagagaaagaagctgcttatcaagagcgccttaagaattgggaaatcagagaacgaaagaaaacccgggaatatgagaaagaagctgaaagagaagaagaaagaagaagagaaatggccaaagaagctaaacgactaaaagaattcttagaagactatgatgatgatagagatgaccccaaatattacagaggaagtgctcttcagaaaaggttgcgtgatagagaaaaggaaatggaagcagatgaacgagataggaagagagagaaggaggagcttgaggaaatcaggcagcgccttctggcagaagggcatccagatccagatgcagagctccagaggatggaacaagaggctgagaggcgcaggcagccacaaataaagcaagagccagaatcagaagaggaggaagaagaaaagcaagaaaaagaagaaaaacgagaagaacccatggaagaggaagaggagccagagcaaaagccttgtctgaaacctactctgaggcccatcagctctgctccatctgtttcctctgccagtggcaatgcaacacctaacactcctggggatgagtctccctgtggtattattattcctcatgaaaactcaccagatcaacagcaacctgaggagcataggccaaaaataggactaagtcttaaactgggtgcttccaatagtcctggtcagcctaattctgtgaagagaaagaaactacctgtagatagtgtctttaacaaatttgaggatgaagacagtgatgacgtaccccgaaaaaggaaactggttcccttggattatggtgaagatgataaaaatgcaaccaaaggcactgtaaacactgaagaaaagcgtaaacacattaagagtctcattgagaaaatccctacagccaaacctgagctcttcgcttatcccctggattggtctattgtggattctatactgatggaacgtcgaattagaccatggattaataagaaaatcatagaatatataggtgaagaagaagctacattagttgattttgtttgttctaaggttatggctcatagttcaccccagagcattttagatgatgttgccatggtacttgatgaagaagcagaagtttttatagtcaaaatgtggagattattgatatatgaaacagaagccaagaaaattggtcttgtgaagtaaaactttttatatttagagttccatttcagatttcttctttgccacccttttaaggactttgaatttttctttgtctttgaagacattgtgagatctgtaattttttttttttgtagaaaatgtgaattttttggtcctctaatttgttgttgccctgtgtactcccttggttgtaaagtcatctgaatccttggttctctttatactcaccaggtacaaattactggtatgttttataagccgcagctactgtacacagcctatctgatataatcttgttctgctgatttgtttcttgtaaatattaaaacgactccccaattattttgcagaattgcacttaatattgaaatgtactgtataggaaccaacatgaacaattttaattgaaaacaccagtcataaactattaccacccccactctcttttgatcagaaatggcaagcccttgtgaaggcatggagtttaaaattggaatgcaaaaattagcagacaatccattcctactgtatttctgtatgaatgtgtttgtgaatgtatgtgtaaaagtctttcttttccctaatttgctttggtggggtccttaaaacatttcccaactaaagaatagaattgtaaaggaaaagtggtactgttccaacctgaaatgtctgttataattaggttattagtttcccagagcatggtgttctcgtgtcgtgagcaatgtggtttgctaactggatggggttttcttattaataagatggctgcttcagcttctcttttaaaggaatgtggatcatagtgatttttccttttaattttattgctcagaaatgaggcatatcctaaaaatcctggagagctgtatttaatgcatttttgcactaattggtccttagtttaattctattgtatctgtttatttaacaaaaaattcatcataccaaaaagtgtaagtgaaaaccccctttaaaacaaaacaaaaaaatgaaataaaattaggcaaattgacagacagtgagagttttacaaacatgataggtattctgctcggcaatttgtaagtttacatgttatttaaggataaaggtaaatcattcaaggcagttaccaaccactaactatttgttttcatttttgtcttgtagaaggtttatatcttgttttaccttggctcattagtgtttaaaaatgtactgatgatgtgcttagagaaattcctggggctttcttcgttgtagatcagaatttcaccagggagtaaaattacctgaaaacgtaagaagttttaaacagcttttcacacaaattagatgcaactgttcccatgtctgagtacttatttaaaagaaaggtaaagattggcctgttagaaaaagcataatgtgagctttggattactggattttttttttttttaaacacacctggagaggacatttgaaaacactgttcttaccctcgaaccctgatgtggttccattatgtaaatatttcaaatattaaaaatgtatatatttg

SEQ ID NO: 9884 - protein, 843 aa, Homo sapiens; identical to SEQ ID NO: 1575

SEQ ID NO: 9885 - DNA, 4307 bp, Homo sapiens
agtgcacgccgggcaagaggaagacctccatcagctcgccgcgcagcgcggctgtatttgcggcctgtgcgagtaggcgcttgggcactcagtctccctggcgagcgacgggcagaaatctcgaaccagtggagcgcactcgtaacctggatcccagaaggtcgcgaaggcagtaccgtttcctcagcggcggactgctgcagtaagaatgtcttttccacctcatttgaatcgccctcccatgggaatcccagcactcccaccagggatcccacccccgcagtttccaggatttcctccacctgtacctccagggaccccaatgattcctgtaccaatgagcattatggctcctgctccaactgtcttagtacccactgtgtctatggttggaaagcatttgggcgcaagaaaggatcatccaggcttaaaggctaaagaaaatgatgaaaattgtggtcctactaccactgtttttgttggcaacatttccgagaaagcttcagacatgcttataagacaactcttagctaaatgtggtttggttttgagctggaagagagtacaaggtgcttccggaaagcttcaagccttcggattctgtgagtacaaggagccagaatctaccctccgtgcactcagattattacatgacctgcaaattggagagaaaaagctactcgttaaagttgatgcaaagacaaaggcacagctggatgaatggaaagcaaagaagaaagcttctaatgggaatgcaaggccagaaactgtcactaatgacgatgaagaagccttggatgaagaaacaaagaggagagatcagatgattaaaggggctattgaagttttaattcgtgaatactccagtgagctaaatgccccctcacaggaatctgattctcaccccaggaagaagaagaaggaaaagaaggaggacattttccgcagatttccagtggccccactgatcccttatccactcatcactaaggaggatataaatgctatagaaatggaagaagacaaaagagacctgatatctcgagagatcagcaaattcagagacacacataagaaactggaagaagagaaaggcaaaaaggaaaaagaaagacaggaaattgagaaagaacggagagaaagagagagggagcgtgaaagggaacgagaaaggcgagaacgggaacgagaaagggaaagagaacgtgaacgagaaaaggagaaagaacgggagcgggaacgagaacgggatagggaccgtgaccggacaaaagagagagaccgagatcgggatcgagagagagatcgtgaccgggatagagaaaggagctcagatcgtaataaggatcgcagtcgatcaagagaaaaaagcagagatcgtgaaagggaacgagagcgggaaagagagagagagagagaacgagagcgagaacgagaacgggagcgagagagagagcgagagagggaacgggagcgagaaagagaaaaagacaaaaaacgggaccgagaagaagatgaagaagatgcatacgaacgaagaaaacttgaaagaaaactccgagagaaagaagctgcttatcaagagcgccttaagaattgggaaatcagagaacgaaagaaaacccgggaatatgagaaagaagctgaaagagaagaagaaagaagaagagaaatggccaaagaagctaaacgactaaaagaattcttagaagactatgatgatgatagagatgaccccaaatattacagaggaagtgctcttcagaaaaggttgcgtgatagagaaaaggaaatggaagcagatgaacgagataggaagagagagaaggaggagcttgaggaaatcaggcagcgccttctggcagaagggcatccagatccagatgcagagctccagaggatggaacaagaggctgagaggcgcaggcagccacaaataaagcaagagccagaatcagaagaggaggaagaagaaaagcaagaaaaagaagaaaaacgagaagaacccatggaagaggaagaggagccagagcaaaagccttgtctgaaacctactctgaggcccatcagctctgctccatctgtttcctctgccagtggcaatgcaacacctaacactcctggggatgagtctccctgtggtattattattcctcatgaaaactcaccagatcaacagcaacctgaggagcataggccaaaaataggactaagtcttaaactgggtgcttccaatagtcctggtcagcctaattctgtgaagagaaagaaactacctgtagatagtgtctttaacaaatttgaggatgaagacagtgatgacgtaccccgaaaaaggaaactggttcccttggattatggtgaagatgataaaaatgcaaccaaaggcactgtaaacactgaagaaaagcgtaaacacattaagagtctcattgagaaaatccctacagccaaacctgagctcttcgcttatcccctggattggtctattgtggattctatactgatggaacgtcgaattagaccatggattaataagaaaatcatagaatatataggtgaagaagaagctacattagttgattttgtttgttctaaggttatggctcatagttcaccccagagcattttagatgatgttgccatggtacttgatgaagaagcagaagtttttatagtcaaaatgtggagattattgatatatgaaacagaagccaagaaaattggtcttgtgaagtaaaactttttatatttagagttccatttcagatttcttctttgccacccttttaaggactttgaatttttctttgtctttgaagacattgtgagatctgtaattttttttttttgtagaaaatgtgaattttttggtcctctaatttgttgttgccctgtgtactcccttggttgtaaagtcatctgaatccttggttctctttatactcaccaggtacaaattactggtatgttttataagccgcagctactgtacacagcctatctgatataatcttgttctgctgatttgtttcttgtaaatattaaaacgactccccaattattttgcagaattgcacttaatattgaaatgtactgtataggaaccaacatgaacaattttaattgaaaacaccagtcataaactattaccacccccactctcttttgatcagaaatggcaagcccttgtgaaggcatggagtttaaaattggaatgcaaaaattagcagacaatccattcctactgtatttctgtatgaatgtgtttgtgaatgtatgtgtaaaagtctttcttttccctaatttgctttggtggggtccttaaaacatttcccaactaaagaatagaattgtaaaggaaaagtggtactgttccaacctgaaatgtctgttataattaggttattagtttcccagagcatggtgttctcgtgtcgtgagcaatgtggtttgctaactggatggggttttcttattaataagatggctgcttcagcttctcttttaaaggaatgtggatcatagtgatttttccttttaattttattgctcagaaatgaggcatatcctaaaaatcctggagagctgtatttaatgcatttttgcactaattggtccttagtttaattctattgtatctgtttatttaacaaaaaattcatcataccaaaaagtgtaagtgaaaaccccctttaaaacaaaacaaaaaaatgaaataaaattaggcaaattgacagacagtgagagttttacaaacatgataggtattctgctcggcaatttgtaagtttacatgttatttaaggataaaggtaaatcattcaaggcagttaccaaccactaactatttgttttcatttttgtcttgtagaaggtttatatcttgttttaccttggctcattagtgtttaaaaatgtactgatgatgtgcttagagaaattcctggggctttcttcgttgtagatcagaatttcaccagggagtaaaattacctgaaaacgtaagaagttttaaacagcttttcacacaaattagatgcaactgttcccatgtctgagtacttatttaaaagaaaggtaaagattggcctgttagaaaaagcataatgtgagctttggattactggattttttttttttttaaacacacctggagaggacatttgaaaacactgttcttaccctcgaaccctgatgtggttccattatgtaaatatttcaaatattaaaaatgtatatatttgatcctggggactcatattctttcagaatcatgtaaataaatggcatcatgttgtaattgt

SEQ ID NO: 9886 - protein, 843 aa, Homo sapiens; identical to SEQ ID NO: 1575

SEQ ID NO: 9887 - DNA, 5069 bp, Homo sapiens
agtgcacgccgggcaagaggaagacctccatcagctcgccgcgcagcgcggctgtatttgcggcctgtgcgagtaggcgcttgggcactcagtctccctggcgagcgacgggcagaaatctcgaaccagtggagcgcactcgtaacctggatcccagaaggtcgcgaaggcagtaccgtttcctcagcggcggactgctgcagtaagaatgtcttttccacctcatttgaatcgccctcccatgggaatcccagcactcccaccagggatcccacccccgcagtttccaggatttcctccacctgtacctccagggaccccaatgattcctgtaccaatgagcattatggctcctgctccaactgtcttagtacccactgtgtctatggttggaaagcatttgggcgcaagaaaggatcatccaggcttaaaggctaaagaaaatgatgaaaattgtggtcctactaccactgtttttgttggcaacatttccgagaaagcttcagacatgcttataagacaactcttagctaaatgtggtttggttttgagctggaagagagtacaaggtgcttccggaaagcttcaagccttcggattctgtgagtacaaggagccagaatctaccctccgtgcactcagattattacatgacctgcaaattggagagaaaaagctactcgttaaagttgatgcaaagacaaaggcacagctggatgaatggaaagcaaagaagaaagcttctaatgggaatgcaaggccagaaactgtcactaatgacgatgaagaagccttggatgaagaaacaaagaggagagatcagatgattaaaggggctattgaagttttaattcgtgaatactccagtgagctaaatgccccctcacaggaatctgattctcaccccaggaagaagaagaaggaaaagaaggaggacattttccgcagatttccagtggccccactgatcccttatccactcatcactaaggaggatataaatgctatagaaatggaagaagacaaaagagacctgatatctcgagagatcagcaaattcagagacacacataagaaactggaagaagagaaaggcaaaaaggaaaaagaaagacaggaaattgagaaagaacggagagaaagagagagggagcgtgaaagggaacgagaaaggcgagaacgggaacgagaaagggaaagagaacgtgaacgagaaaaggagaaagaacgggagcgggaacgagaacgggatagggaccgtgaccggacaaaagagagagaccgagatcgggatcgagagagagatcgtgaccgggatagagaaaggagctcagatcgtaataaggatcgcagtcgatcaagagaaaaaagcagagatcgtgaaagggaacgagagcgggaaagagagagagagagagaacgagagcgagaacgagaacgggagcgagagagagagcgagagagggaacgggagcgagaaagagaaaaagacaaaaaacgggaccgagaagaagatgaagaagatgcatacgaacgaagaaaacttgaaagaaaactccgagagaaagaagctgcttatcaagagcgccttaagaattgggaaatcagagaacgaaagaaaacccgggaatatgagaaagaagctgaaagagaagaagaaagaagaagagaaatggccaaagaagctaaacgactaaaagaattcttagaagactatgatgatgatagagatgaccccaaatattacagaggaagtgctcttcagaaaaggttgcgtgatagagaaaaggaaatggaagcagatgaacgagataggaagagagagaaggaggagcttgaggaaatcaggcagcgccttctggcagaagggcatccagatccagatgcagagctccagaggatggaacaagaggctgagaggcgcaggcagccacaaataaagcaagagccagaatcagaagaggaggaagaagaaaagcaagaaaaagaagaaaaacgagaagaacccatggaagaggaagaggagccagagcaaaagccttgtctgaaacctactctgaggcccatcagctctgctccatctgtttcctctgccagtggcaatgcaacacctaacactcctggggatgagtctccctgtggtattattattcctcatgaaaactcaccagatcaacagcaacctgaggagcataggccaaaaataggactaagtcttaaactgggtgcttccaatagtcctggtcagcctaattctgtgaagagaaagaaactacctgtagatagtgtctttaacaaatttgaggatgaagacagtgatgacgtaccccgaaaaaggaaactggttcccttggattatggtgaagatgataaaaatgcaaccaaaggcactgtaaacactgaagaaaagcgtaaacacattaagagtctcattgagaaaatccctacagccaaacctgagctcttcgcttatcccctggattggtctattgtggattctatactgatggaacgtcgaattagaccatggattaataagaaaatcatagaatatataggtgaagaagaagctacattagttgattttgtttgttctaaggttatggctcatagttcaccccagagcattttagatgatgttgccatggtacttgatgaagaagcagaagtttttatagtcaaaatgtggagattattgatatatgaaacagaagccaagaaaattggtcttgtgaagtaaaactttttatatttagagttccatttcagatttcttctttgccacccttttaaggactttgaatttttctttgtctttgaagacattgtgagatctgtaattttttttttttgtagaaaatgtgaattttttggtcctctaatttgttgttgccctgtgtactcccttggttgtaaagtcatctgaatccttggttctctttatactcaccaggtacaaattactggtatgttttataagccgcagctactgtacacagcctatctgatataatcttgttctgctgatttgtttcttgtaaatattaaaacgactccccaattattttgcagaattgcacttaatattgaaatgtactgtataggaaccaacatgaacaattttaattgaaaacaccagtcataaactattaccacccccactctcttttgatcagaaatggcaagcccttgtgaaggcatggagtttaaaattggaatgcaaaaattagcagacaatccattcctactgtatttctgtatgaatgtgtttgtgaatgtatgtgtaaaagtctttcttttccctaatttgctttggtggggtccttaaaacatttcccaactaaagaatagaattgtaaaggaaaagtggtactgttccaacctgaaatgtctgttataattaggttattagtttcccagagcatggtgttctcgtgtcgtgagcaatgtggtttgctaactggatggggttttcttattaataagatggctgcttcagcttctcttttaaaggaatgtggatcatagtgatttttccttttaattttattgctcagaaatgaggcatatcctaaaaatcctggagagctgtatttaatgcatttttgcactaattggtccttagtttaattctattgtatctgtttatttaacaaaaaattcatcataccaaaaagtgtaagtgaaaaccccctttaaaacaaaacaaaaaaatgaaataaaattaggcaaattgacagacagtgagagttttacaaacatgataggtattctgctcggcaatttgtaagtttacatgttatttaaggataaaggtaaatcattcaaggcagttaccaaccactaactatttgttttcatttttgtcttgtagaaggtttatatcttgttttaccttggctcattagtgtttaaaaatgtactgatgatgtgcttagagaaattcctggggctttcttcgttgtagatcagaatttcaccagggagtaaaattacctgaaaacgtaagaagttttaaacagcttttcacacaaattagatgcaactgttcccatgtctgagtacttatttaaaagaaaggtaaagattggcctgttagaaaaagcataatgtgagctttggattactggattttttttttttttaaacacacctggagaggacatttgaaaacactgttcttaccctcgaaccctgatgtggttccattatgtaaatatttcaaatattaaaaatgtatatatttgatcctggggactcatattctttcagaatcatgtaaataaatggcatcatgttgtaattgtgtggtgcatactagaaaagttaaaaatatgggctgaactttttatggacttgatttttatgactattggtatctaaaggtcaaggaagccatttacattattttggatgaatctactatacatctatggaaatgtctcttttattttaaattctggtttctcaacggaaaatttcagaaaagatgccccttgccattttcgttaatttttcagtcttttcttagacacacccccagcctaagaccttgttcgaggagtttattgtgtctgtcttttcttaacatactgcactgttcttaagcatcatattgtgttgtttttatttagccactattaacatgaaggtttattcaggtagatttgatttcctttgcttcgtttcttctcctgctctgtcaactgtacttatcttaaagggccactctaaaaacaagggagatgtcgtaatctgaaacctttggggagatgtactctgtactgcataacatctccagtgaggtttgtgacaggacctcaactaaatatatgaatttgtgcaagttcatatattaaagtttctgcagcagagtgaaaattgttacagtaaatgtggtagaaactgttaatcgcttaatgccagtttaaatcatgttttgtaaccaagcttcagtaaaaggctttagattgtcagagttggttgatttttagaattgtatatataaagaattagacattaaacaggcatattctagtgtctgaaaatacacataagaaatttctatt

SEQ ID NO: 9888 - protein, 843 aa, Homo sapiens; identical to SEQ ID NO: 1575

SEQ ID NO: 9889 - DNA, 1969 bp, Homo sapiens
gtgagattgactagttataaaaggaaatagatgtaagtaaaatagactggtaactaggatacaaattctgtaatttaacatctcagaattgaaaagtgcattgtttgtgttcctgcagtctgttctttcttgtggctgtttggaagtctagatagggtgaatttatgaaataattgactcctttctttttttttttttttttgagacggagtctcgctctttcgcccaggccggactgcagtggcgctatctcggctcactgcaacctccgcctcctgggttcacgccatactcctgcctcagcctcccaagtagctgggactacaggcgcccgccaccgcgcccggctaattttttgtatttttagtagagacggggtttcactgtgttggccagaatggtctcgatctcctgacctcgtgatccacccgcctcggcctcccaaagtgctgggattacaggcatgagccaccgcgcccggccaattgactccttttaatcatgaatttcattgactctgctaaatattttattagagcttctaatgagtagcagtttgtctgatttgaatttttcttcctctctgtttttccctttttttcccctttggttgtttgaggatactaaaagtgaaatggttatcaaagggaattggtggacaggggtggaattatgaattgagtggtctttgtattaaaacatttggactctagtgattctacttttccataattttttttcttttgtaagtgaattggtatttcactaattgttttcatccattgctagccttcggattctgtgagtacaaggagccagaatctaccctccgtgcactcagattattacatgacctgcaaattggagagaaaaagctactcgttaaagttgatgcaaagacaaaggcacagctggatgaatggaaagcaaagaagaaagcttctaatggggtatgttttctgtcgtgttatcttttctaggccagactgtgctatttcagtgtagtgcttctcattataaatgaatctaatatggggcttcaaaagatcatcatgtatgtgcttgtggcttaatgtaggagggtattttatagtttgtagttattttaagtcttatctgcccatagtgggtggatgactgttggtttgcttgttccaggttgggatgaaagtagtaagggaggctggacaaggttaacttgccagagaaagcactggtacagactattccaaacagagctaattcattaaggcagctttgtaagtaagtacaaaatatatttcaacctacacaatttttattagtttccctctcttttagaagtacaccgactctaaaatgaatgaaagtctgattacttgccttaggttgggggctttatccaagctctactaagtgaagctaaaataaaggacattgttgtatattgtattttaatgtatacattattacctcctcagcaaagtgaaacatagctaaaacttgagtatatatttccttcatttctcttcttagttcctttttggcatctcatgctgaacaaatccaaaatagatttattaatgccttcccccaacacaaacaaaaccagaagagtctttcgctgtcgtcaaatttttattatctttcaaaatagaaatcgctttttgctgggcacgccaccacacctggccaaatgtagggttttgtttgtttgtttgtttgaaatggagtttccctctcttgcccaggctggagtgcagtggtgcgaccttagctcactgcaacctccacctcccaggttcaagtgattctccctcctcagcctcccaagtagctgggattacaggtgtccgccaccaggctcggctactttttgtattttcactatgtaagtgaggctggtcttgaactcctcaccttaggtgatctgtctgcctcagcctcccaaagtgctgggattacgtgtgagccactccacccggtcagc

SEQ ID NO: 9890 - protein, 85 aa, Homo sapiens
MLNKSKIDLLMPSPNTNKTRRVFRCRQIFIIFQNRNRFLLGTPPHLAKCRVLFVCLFEMEFPSLAQAGVQWCDLSSLQPPPPRFK

SEQ ID NO: 9891 - DNA, 440 bp, Homo sapiens
ggtggggacagagtgttgctctgtcacccaggctcgagtgtggggtggtgtgatctctgctcactgcaacacctgtaatcccagctacttgggaggctgagacaggaaaatcacttaaaacccaggaggcggaggttacagttagctgagattgcgccactgcagtccagcctgggtgacagagtgagactctgtctcaaaaaaaaagcgaagttacatgcaataaaatcacacagaaaaattatttttaataaaaaattaaaacaattgacagatatcagttatatgatttattgttccaactgttatatgtgtatttctgagtgccctttggcttcttgcccggtggtacttgaagtcataggataaacatggcatattttccttaagtgtcaatattactcaacaaatataggttaaaaaagcattctatctgatgt

SEQ ID NO: 9892 - protein, 32 aa, Homo sapiens
VGTECCSVTQARVWGGVISAHCNTCNPSYLGG

SEQ ID NO: 9893 - DNA, 3468 bp, Homo sapiens
aatttaaaatgtctaatgtgacctatacttaatatatggagtatatgaaaactaaaatttaagaggacaagaaaaatcttttttttaaccaaagtattattatatttattatggcatagagtggtattttatacatatctcattttacagtaaaaacattttatgtacaactgtagagagatagctgcacagatagctccaacttaaattagaaaatattttctctatagaaaataataaaaacaccgtttcccaggctagcccaacaagtttatttaaaccaaatagctgaatacatatacatttataaatatggtttgaattctgggatccaggagaaactttagtttcatttattgaaacggccatgtttgtcttaaaattatgtgaagagaaattcctataagtctccctcttactcttggtttatgtctgggtcagaaaaatctgtttacacaaaaaagggaagagtaatctttattacttgtatgttaattttatacattgtccttatttcctcaaaggccaaagaagctaaacgactaaaagaattcttagaagactatgatgatgatagagatgaccccaaatattacagaggaagtgctcttcagaaaaggttgcgtgatagagaaaaggaaatggaagcagatgaacgagataggaagagagagaaggaggagcttgaggaaatcaggcagcgccttctggcagaagggcatccagatccagatgcagagctccagaggatggaacaagaggctgagaggcgcaggcagccacaaataaagcaagagccagaatcagaagaggaggaagaagaaaagcaagaaaaagaagaaaaacgagaagaacccatggaagaggaagaggagccagagcaaaagccttgtctgaaacctactctgaggcccatcagctctgctccatctgtttcctctgccagtggcaatgcaacacctaacactcctggggatgagtctccctgtggtattattattcctcatgaaaactcaccagatcaacagcaacctgaggagcataggccaaaaataggactaagtcttaaactgggtacgttagcatttccttccttctttattttcttcccttcacccctgcaaatacctgtattgtgctttaaagaaaaaaatttatatttgtgcttggttaggtagatagaagattactaaaaaatgcctttctagctcacgattgttttcatagttttactagtgctcctatatctgcagctgcctcgagttctgagaagaagtgaaaagtttaattttctagcacttgtgagtagtgagttattttttacagttgggatctttctctaagatttgtggaagtatattttgcattgcttttgagggatggtgggttataaaatgaaacatttggaaattaagtcatcttgctaagagagtgtttttactgtaggtgcttccaatagtcctggtcagcctaattctgtgaagagaaagaaactacctgtagatagtgtctttaacaaatttgaggatgaagacagtgatgacgtaccccgaaaaaggaaactggttcccttggattatggtgaagatgataaaaatgcaaccaaaggcactgtaaacactgaagaaaagcgtaaacacattaagagtctcattgagaaaatccctacagccaaacctgagctcttcgcttatcccctggattggtctattgtggattctatactgatggaacgtcgaattagaccatggattaataagaaaatcatagaatatataggtgaagaagaagctacattagttgattttgtttgttctaaggttatggctcatagttcaccccagagcattttagatgatgttgccatggtacttgatgaagaagcagaagtttttatagtcaaaatgtggagattattgatatatgaaacagaagccaagaaaattggtcttgtgaagtaaaactttttatatttagagttccatttcagatttcttctttgccacccttttaaggactttgaatttttctttgtctttgaagacattgtgagatctgtaattttttttttttgtagaaaatgtgaattttttggtcctctaatttgttgttgccctgtgtactcccttggttgtaaagtcatctgaatccttggttctctttatactcaccaggtacaaattactggtatgttttataagccgcagctactgtacacagcctatctgatataatcttgttctgctgatttgtttcttgtaaatattaaaacgactccccaattattttgcagaattgcacttaatattgaaatgtactgtataggaaccaacatgaacaattttaattgaaaacaccagtcataaactattaccacccccactctcttttgatcagaaatggcaagcccttgtgaaggcatggagtttaaaattggaatgcaaaaattagcagacaatccattcctactgtatttctgtatgaatgtgtttgtgaatgtatgtgtaaaagtctttcttttccctaatttgctttggtggggtccttaaaacatttcccaactaaagaatagaattgtaaaggaaaagtggtactgttccaacctgaaatgtctgttataattaggttattagtttcccagagcatggtgttctcgtgtcgtgagcaatgtggtttgctaactggatggggttttcttattaataagatggctgcttcagcttctcttttaaaggaatgtggatcatagtgatttttccttttaattttattgctcagaaatgaggcatatcctaaaaatcctggagagctgtatttaatgcatttttgcactaattggtccttagtttaattctattgtatctgtttatttaacaaaaaattcatcataccaaaaagtgtaagtgaaaaccccctttaaaacaaaacaaaaaaatgaaataaaattaggcaaattgacagacagtgagagttttacaaacatgataggtattctgctcggcaatttgtaagtttacatgttatttaaggataaaggtaaatcattcaaggcagttaccaaccactaactatttgttttcatttttgtcttgtagaaggtttatatcttgttttaccttggctcattagtgtttaaaaatgtactgatgatgtgcttagagaaattcctggggctttcttcgttgtagatcagaatttcaccagggagtaaaattacctgaaaacgtaagaagttttaaacagcttttcacacaaattagatgcaactgttcccatgtctgagtacttatttaaaagaaaggtaaagattggcctgttagaaaaagcataatgtgagctttggattactggattttttttttttttaaacacacctggagaggacatttgaaaacactgttcttaccctcgaaccctgatgtggttccattatgtaaatatttcaaatattaaaaatgtatatatttg

SEQ ID NO: 9894 - protein, 249 aa, Homo sapiens
MSGSEKSVYTKKGRVIFITCMLILYIVLISSKAKEAKRLKEFLEDYDDDRDDPKYYRGSALQKRLRDREKEMEADERDRKREKEELEEIRQRLLAEGHPDPDAELQRMEQEAERRRQPQIKQEPESEEEEEEKQEKEEKREEPMEEEEEPEQKPCLKPTLRPISSAPSVSSASGNATPNTPGDESPCGIIIPHENSPDQQQPEEHRPKIGLSLKLGTLAFPSFFIFFPSPLQIPVLCFKEKNLYLCLVR

SEQ ID NO: 9895 - DNA, 3135 bp, Homo sapiens
gagatatttgcgattttaacagcattctcttgattgtgatgcagctggttcgcaaataggtaccctaaagaaatgacaggtgttaaatttaggatggccatcgcttgtatgccgggagaagcacacgctgggcccaatttatataggggctttcgtcctcagctcgagcagcctcagaaccccgacaacccacgccagcgctctgggcggattccgtcaggtggggaaggccaggtggagctctgggttctccccgcaatcgtttctccaggccggaggccccgcccccttcctcctggctcctcccctcctccgtgggccggccgccaacgacgccagagccggaaatgacgacaacggtgagggttctcgggcggggcctgggacaggcagctccggggtccgcggtttcacatcggaaacaaaacagcggctggtctggaaggaacctgagctacgagccgcggcggcagcggggcggcggggaagcgtatacctaatctgggagcctgcaagtgacaacagcctttgcggtccttagacagcttggcctggaggagaacacatgaaagaaagaacctcaagaggctttgttttctgtgaaacagtatttctatacagttgctccaatgacagagttacctgcaccgttgtcctacttccagaatgcacagatgtctgaggacaaccacctgagcaatactaatgacaatagagaacggcaggagcacaacgacagacggagccttggccaccctgagccattatctaatggacgaccccagggtaactcccggcaggtggtggagcaagatgaggaagaagatgaggagctgacattgaaatatggcgccaagcatgtgatcatgctctttgtccctgtgactctctgcatggtggtggtcgtggctaccattaagtcagtcagcttttatacccggaaggatgggcagctaatctataccccattcacagaagataccgagactgtgggccagagagccctgcactcaattctgaatgctgccatcatgatcagtgtcattgttgtcatgactatcctcctggtggttctgtataaatacaggtgctataaggtcatccatgcctggcttattatatcatctctattgttgctgttctttttttcattcatttacttgggggaagtgtttaaaacctataacgttgctgtggactacattactgttgcactcctgatctggaattttggtgtggtgggaatgatttccattcactggaaaggtccacttcgactccagcaggcatatctcattatgattagtgccctcatggccctggtgtttatcaagtacctccctgaatggactgcgtggctcatcttggctgtgatttcagtatatgatttagtggctgttttgtgtccgaaaggtccacttcgtatgctggttgaaacagctcaggagagaaatgaaacgctttttccagctctcatttactcctcaacaatggtgtggttggtgaatatggcagaaggagacccggaagctcaaaggagagtatccaaaaattccaagtataatgcagaaagcacagaaagggagtcacaagacactgttgcagagaatgatgatggcgggttcagtgaggaatgggaagcccagagggacagtcatctagggcctcatcgctctacacctgagtcacgagctgctgtccaggaactttccagcagtatcctcgctggtgaagacccagaggaaaggggagtaaaacttggattgggagatttcattttctacagtgttctggttggtaaagcctcagcaacagccagtggagactggaacacaaccatagcctgtttcgtagccatattaattggtttgtgccttacattattactccttgccattttcaagaaagcattgccagctcttccaatctccatcacctttgggcttgttttctactttgccacagattatcttgtacagccttttatggaccaattagcattccatcaattttatatctagcatatttgcggttagaatcccatggatgtttcttctttgactataacaaaatctggggaggacaaaggtgattttcctgtgtccacatctaacaaagtcaagattcccggctggacttttgcagcttccttccaagtcttcctgaccaccttgcactattggactttggaaggaggtgcctatagaaaacgattttgaacatacttcatcgcagtggactgtgtccctcggtgcagaaactaccagatttgagggacgaggtcaaggagatatgataggcccggaagttgctgtgccccatcagcagcttgacgcgtggtcacaggacgatttcactgacactgcgaactctcaggactaccgttaccaagaggttaggtgaagtggtttaaaccaaacggaactcttcatcttaaactacacgttgaaaatcaacccaataattctgtattaactgaattctgaacttttcaggaggtactgtgaggaagagcaggcaccagcagcagaatggggaatggagaggtgggcaggggttccagcttccctttgattttttgctgcagactcatcctttttaaatgagacttgttttcccctctctttgagtcaagtcaaatatgtagattgcctttggcaattcttcttctcaagcactgacactcattaccgtctgtgattgccatttcttcccaaggccagtctgaacctgaggttgctttatcctaaaagttttaacctcaggttccaaattcagtaaattttggaaacagtacagctatttctcatcaattctctatcatgttgaagtcaaatttggattttccaccaaattctgaatttgtagacatacttgtacgctcacttgccccagatgcctcctctgtcctcattcttctctcccacacaagcagtctttttctacagccagtaaggcagctctgtcgtggtagcagatggtcccattattctagggtcttactctttgtatgatgaaaagaatgtgttatgaatcggtgctgtcagccctgctgtcagaccttcttccacagcaaatgagatgtatgcccaaagacggtagaattaaagaagagtaaaatggctgttgaagcac

SEQ ID NO: 9896 - protein, 463 aa, Homo sapiens
MTELPAPLSYFQNAQMSEDNHLSNTNDNRERQEHNDRRSLGHPEPLSNGRPQGNSRQVVEQDEEEDEELTLKYGAKHVIMLFVPVTLCMVVVVATIKSVSFYTRKDGQLIYTPFTEDTETVGQRALHSILNAAIMISVIVVMTILLVVLYKYRCYKVIHAWLIISSLLLLFFFSFIYLGEVFKTYNVAVDYITVALLIWNFGVVGMISIHWKGPLRLQQAYLIMISALMALVFIKYLPEWTAWLILAVISVYDLVAVLCPKGPLRMLVETAQERNETLFPALIYSSTMVWLVNMAEGDPEAQRRVSKNSKYNAESTERESQDTVAENDDGGFSEEWEAQRDSHLGPHRSTPESRAAVQELSSSILAGEDPEERGVKLGLGDFIFYSVLVGKASATASGDWNTTIACFVAILIGLCLTLLLLAIFKKALPALPISITFGLVFYFATDYLVQPFMDQLAFHQFYI

SEQ ID NO: 9897 - DNA, 3227 bp, Homo sapiens
gagatatttgcgattttaacagcattctcttgattgtgatgcagctggttcgcaaataggtaccctaaagaaatgacaggtgttaaatttaggatggccatcgcttgtatgccgggagaagcacacgctgggcccaatttatataggggctttcgtcctcagctcgagcagcctcagaaccccgacaacccacgccagcgctctgggcggattccgtcaggtggggaaggccaggtggagctctgggttctccccgcaatcgtttctccaggccggaggccccgcccccttcctcctggctcctcccctcctccgtgggccggccgccaacgacgccagagccggaaatgacgacaacggtgagggttctcgggcggggcctgggacaggcagctccggggtccgcggtttcacatcggaaacaaaacagcggctggtctggaaggaacctgagctacgagccgcggcggcagcggggcggcggggaagcgtatacctaatctgggagcctgcaagtgacaacagcctttgcggtccttagacagcttggcctggaggagaacacatgaaagaaagaacctcaagaggctttgttttctgtgaaacagtatttctatacagttgctccaatgacagagttacctgcaccgttgtcctacttccagaatgcacagatgtctgaggacaaccacctgagcaatactaatgacaatagagaacggcaggagcacaacgacagacggagccttggccaccctgagccattatctaatggacgaccccagggtaactcccggcaggtggtggagcaagatgaggaagaagatgaggagctgacattgaaatatggcgccaagcatgtgatcatgctctttgtccctgtgactctctgcatggtggtggtcgtggctaccattaagtcagtcagcttttatacccggaaggatgggcagctaatctataccccattcacagaagataccgagactgtgggccagagagccctgcactcaattctgaatgctgccatcatgatcagtgtcattgttgtcatgactatcctcctggtggttctgtataaatacaggtgctataaggtcatccatgcctggcttattatatcatctctattgttgctgttctttttttcattcatttacttgggggaagtgtttaaaacctataacgttgctgtggactacattactgttgcactcctgatctggaattttggtgtggtgggaatgatttccattcactggaaaggtccacttcgactccagcaggcatatctcattatgattagtgccctcatggccctggtgtttatcaagtacctccctgaatggactgcgtggctcatcttggctgtgatttcagtatatgatttagtggctgttttgtgtccgaaaggtccacttcgtatgctggttgaaacagctcaggagagaaatgaaacgctttttccagctctcatttactcctcaacaatggtgtggttggtgaatatggcagaaggagacccggaagctcaaaggagagtatccaaaaattccaagtataatgcagaaagagcctgtctgcctcctgctgccatcaacctgctgtctatagctcccatggcacccaggctgttcatgccaaagggtgcctgcaggcccacggcacagaaagggagtcacaagacactgttgcagagaatgatgatggcgggttcagtgaggaatgggaagcccagagggacagtcatctagggcctcatcgctctacacctgagtcacgagctgctgtccaggaactttccagcagtatcctcgctggtgaagacccagaggaaaggggagtaaaacttggattgggagatttcattttctacagtgttctggttggtaaagcctcagcaacagccagtggagactggaacacaaccatagcctgtttcgtagccatattaattggtttgtgccttacattattactccttgccattttcaagaaagcattgccagctcttccaatctccatcacctttgggcttgttttctactttgccacagattatcttgtacagccttttatggaccaattagcattccatcaattttatatctagcatatttgcggttagaatcccatggatgtttcttctttgactataacaaaatctggggaggacaaaggtgattttcctgtgtccacatctaacaaagtcaagattcccggctggacttttgcagcttccttccaagtcttcctgaccaccttgcactattggactttggaaggaggtgcctatagaaaacgattttgaacatacttcatcgcagtggactgtgtccctcggtgcagaaactaccagatttgagggacgaggtcaaggagatatgataggcccggaagttgctgtgccccatcagcagcttgacgcgtggtcacaggacgatttcactgacactgcgaactctcaggactaccgttaccaagaggttaggtgaagtggtttaaaccaaacggaactcttcatcttaaactacacgttgaaaatcaacccaataattctgtattaactgaattctgaacttttcaggaggtactgtgaggaagagcaggcaccagcagcagaatggggaatggagaggtgggcaggggttccagcttccctttgattttttgctgcagactcatcctttttaaatgagacttgttttcccctctctttgagtcaagtcaaatatgtagattgcctttggcaattcttcttctcaagcactgacactcattaccgtctgtgattgccatttcttcccaaggccagtctgaacctgaggttgctttatcctaaaagttttaacctcaggttccaaattcagtaaattttggaaacagtacagctatttctcatcaattctctatcatgttgaagtcaaatttggattttccaccaaattctgaatttgtagacatacttgtacgctcacttgccccagatgcctcctctgtcctcattcttctctcccacacaagcagtctttttctacagccagtaaggcagctctgtcgtggtagcagatggtcccattattctagggtcttactctttgtatgatgaaaagaatgtgttatgaatcggtgctgtcagccctgctgtcagaccttcttccacagcaaatgagatgtatgcccaaagacggtagaattaaagaagagtaaaatggctgttgaagcac

SEQ ID NO: 9898 - protein, 374 aa, Homo sapiens
MTELPAPLSYFQNAQMSEDNHLSNTNDNRERQEHNDRRSLGHPEPLSNGRPQGNSRQVVEQDEEEDEELTLKYGAKHVIMLFVPVTLCMVVVVATIKSVSFYTRKDGQLIYTPFTEDTETVGQRALHSILNAAIMISVIVVMTILLVVLYKYRCYKVIHAWLIISSLLLLFFFSFIYLGEVFKTYNVAVDYITVALLIWNFGVVGMISIHWKGPLRLQQAYLIMISALMALVFIKYLPEWTAWLILAVISVYDLVAVLCPKGPLRMLVETAQERNETLFPALIYSSTMVWLVNMAEGDPEAQRRVSKNSKYNAERACLPPAAINLLSIAPMAPRLFMPKGACRPTAQKGSHKTLLQRMMMAGSVRNGKPRGTVI

SEQ ID NO: 9899 - DNA, 3329 bp, Homo sapiens
gagatatttgcgattttaacagcattctcttgattgtgatgcagctggttcgcaaataggtaccctaaagaaatgacaggtgttaaatttaggatggccatcgcttgtatgccgggagaagcacacgctgggcccaatttatataggggctttcgtcctcagctcgagcagcctcagaaccccgacaacccacgccagcgctctgggcggattccgtcaggtggggaaggccaggtggagctctgggttctccccgcaatcgtttctccaggccggaggccccgcccccttcctcctggctcctcccctcctccgtgggccggccgccaacgacgccagagccggaaatgacgacaacggtgagggttctcgggcggggcctgggacaggcagctccggggtccgcggtttcacatcggaaacaaaacagcggctggtctggaaggaacctgagctacgagccgcggcggcagcggggcggcggggaagcgtatgctgggcacagtggctcacacctgtaatctgccagcactttgggaggccgaggcaggtagatcacctgaggtcaggagttcgagaccagcctcgccaaaatgacctaatctgggagcctgcaagtgacaacagcctttgcggtccttagacagcttggcctggaggagaacacatgaaagaaagaacctcaagaggctttgttttctgtgaaacagtatttctatacagttgctccaatgacagagttacctgcaccgttgtcctacttccagaatgcacagatgtctgaggacaaccacctgagcaatactaatgacaatagagaacggcaggagcacaacgacagacggagccttggccaccctgagccattatctaatggacgaccccagggtaactcccggcaggtggtggagcaagatgaggaagaagatgaggagctgacattgaaatatggcgccaagcatgtgatcatgctctttgtccctgtgactctctgcatggtggtggtcgtggctaccattaagtcagtcagcttttatacccggaaggatgggcagctaatctataccccattcacagaagataccgagactgtgggccagagagccctgcactcaattctgaatgctgccatcatgatcagtgtcattgttgtcatgactatcctcctggtggttctgtataaatacaggtgctataaggtcatccatgcctggcttattatatcatctctattgttgctgttctttttttcattcatttacttgggggaagtgtttaaaacctataacgttgctgtggactacattactgttgcactcctgatctggaattttggtgtggtgggaatgatttccattcactggaaaggtccacttcgactccagcaggcatatctcattatgattagtgccctcatggccctggtgtttatcaagtacctccctgaatggactgcgtggctcatcttggctgtgatttcagtatatgatttagtggctgttttgtgtccgaaaggtccacttcgtatgctggttgaaacagctcaggagagaaatgaaacgctttttccagctctcatttactcctcaacaatggtgtggttggtgaatatggcagaaggagacccggaagctcaaaggagagtatccaaaaattccaagtataatgcagaaagagcctgtctgcctcctgctgccatcaacctgctgtctatagctcccatggcacccaggctgttcatgccaaagggtgcctgcaggcccacggcacagaaagggagtcacaagacactgttgcagagaatgatgatggcgggttcagtgaggaatgggaagcccagagggacagtcatctagggcctcatcgctctacacctgagtcacgagctgctgtccaggaactttccagcagtatcctcgctggtgaagacccagaggaaaggggagtaaaacttggattgggagatttcattttctacagtgttctggttggtaaagcctcagcaacagccagtggagactggaacacaaccatagcctgtttcgtagccatattaattggtttgtgccttacattattactccttgccattttcaagaaagcattgccagctcttccaatctccatcacctttgggcttgttttctactttgccacagattatcttgtacagccttttatggaccaattagcattccatcaattttatatctagcatatttgcggttagaatcccatggatgtttcttctttgactataacaaaatctggggaggacaaaggtgattttcctgtgtccacatctaacaaagtcaagattcccggctggacttttgcagcttccttccaagtcttcctgaccaccttgcactattggactttggaaggaggtgcctatagaaaacgattttgaacatacttcatcgcagtggactgtgtccctcggtgcagaaactaccagatttgagggacgaggtcaaggagatatgataggcccggaagttgctgtgccccatcagcagcttgacgcgtggtcacaggacgatttcactgacactgcgaactctcaggactaccgttaccaagaggttaggtgaagtggtttaaaccaaacggaactcttcatcttaaactacacgttgaaaatcaacccaataattctgtattaactgaattctgaacttttcaggaggtactgtgaggaagagcaggcaccagcagcagaatggggaatggagaggtgggcaggggttccagcttccctttgattttttgctgcagactcatcctttttaaatgagacttgttttcccctctctttgagtcaagtcaaatatgtagattgcctttggcaattcttcttctcaagcactgacactcattaccgtctgtgattgccatttcttcccaaggccagtctgaacctgaggttgctttatcctaaaagttttaacctcaggttccaaattcagtaaattttggaaacagtacagctatttctcatcaattctctatcatgttgaagtcaaatttggattttccaccaaattctgaatttgtagacatacttgtacgctcacttgccccagatgcctcctctgtcctcattcttctctcccacacaagcagtctttttctacagccagtaaggcagctctgtcgtggtagcagatggtcccattattctagggtcttactctttgtatgatgaaaagaatgtgttatgaatcggtgctgtcagccctgctgtcagaccttcttccacagcaaatgagatgtatgcccaaagacggtagaattaaagaagagtaaaatggctgttgaagcac

SEQ ID NO: 9900 - protein, 374 aa, Homo sapiens; identical to SEQ ID NO: 9898

SEQ ID NO: 9901 - DNA, 6515 bp, Homo sapiens
gagatatttgcgattttaacagcattctcttgattgtgatgcagctggttcgcaaataggtaccctaaagaaatgacaggtgttaaatttaggatggccatcgcttgtatgccgggagaagcacacgctgggcccaatttatataggggctttcgtcctcagctcgagcagcctcagaaccccgacaacccacgccagcgctctgggcggattccgtcaggtggggaaggccaggtggagctctgggttctccccgcaatcgtttctccaggccggaggccccgcccccttcctcctggctcctcccctcctccgtgggccggccgccaacgacgccagagccggaaatgacgacaacggtgagggttctcgggcggggcctgggacaggcagctccggggtccgcggtttcacatcggaaacaaaacagcggctggtctggaaggaacctgagctacgagccgcggcggcagcggggcggcggggaagcgtatacctaatctgggagcctgcaagtgacaacagcctttgcggtccttagacagcttggcctggaggagaacacatgaaagaaagaacctcaagaggctttgttttctgtgaaacagtatttctatacagttgctccaatgacagagttacctgcaccgttgtcctacttccagaatgcacagatgtctgaggacaaccacctgagcaatactaatgacaatagagaacggcaggagcacaacgacagacggagccttggccaccctgagccattatctaatggacgaccccagggtaactcccggcaggtggtggagcaagatgaggaagaagatgaggagctgacattgaaatatggcgccaagcatgtgatcatgctctttgtccctgtgactctctgcatggtggtggtcgtggctaccattaagtcagtcagcttttatacccggaaggatgggcagctaatctataccccattcacagaagataccgagactgtgggccagagagccctgcactcaattctgaatgctgccatcatgatcagtgtcattgttgtcatgactatcctcctggtggttctgtataaatacaggtgctataaggtcatccatgcctggcttattatatcatctctattgttgctgttctttttttcattcatttacttgggggaagtgtttaaaacctataacgttgctgtggactacattactgttgcactcctgatctggaattttggtgtggtgggaatgatttccattcactggaaaggtccacttcgactccagcaggcatatctcattatgattagtgccctcatggccctggtgtttatcaagtacctccctgaatggactgcgtggctcatcttggctgtgatttcagtatatgatttagtggctgttttgtgtccgaaaggtccacttcgtatgctggttgaaacagctcaggagagaaatgaaacgctttttccagctctcatttactcctcaacaatggtgtggttggtgaatatggcagaaggagacccggaagctcaaaggagagtatccaaaaattccaagtataatgcagaaagagcctgtctgcctcctgctgccatcaacctgctgtctatagctcccatggcacccaggctgttcatgccaaagggtgcctgcaggcccacggcacagaaagggagtcacaagacactgttgcagagaatgatgatggcgggttcagtgaggaatgggaagcccagagggacagtcatctagggcctcatcgctctacacctgagtcacgagctgctgtccaggaactttccagcagtatcctcgctggtgaagacccagaggaaaggggagtaaaacttggattgggagatttcattttctacagtgttctggttggtaaagcctcagcaacagccagtggagactggaacacaaccatagcctgtttcgtagccatattaattggtttgtgccttacattattactccttgccattttcaagaaagcattgccagctcttccaatctccatcacctttgggcttgttttctactttgccacagattatcttgtacagccttttatggaccaattagcattccatcaattttatatctagcatatttgcggttagaatcccatggatgtttcttctttgactataacaaaatctggggaggacaaaggtgattttcctgtgtccacatctaacaaagtcaagattcccggctggacttttgcagcttccttccaagtcttcctgaccaccttgcactattggactttggaaggaggtgcctatagaaaacgattttgaacatacttcatcgcagtggactgtgtccctcggtgcagaaactaccagatttgagggacgaggtcaaggagatatgataggcccggaagttgctgtgccccatcagcagcttgacgcgtggtcacaggacgatttcactgacactgcgaactctcaggactaccgttaccaagaggttaggtgaagtggtttaaaccaaacggaactcttcatcttaaactacacgttgaaaatcaacccaataattctgtattaactgaattctgaacttttcaggaggtactgtgaggaagagcaggcaccagcagcagaatggggaatggagaggtgggcaggggttccagcttccctttgattttttgctgcagactcatcctttttaaatgagacttgttttcccctctctttgagtcaagtcaaatatgtagattgcctttggcaattcttcttctcaagcactgacactcattaccgtctgtgattgccatttcttcccaaggccagtctgaacctgaggttgctttatcctaaaagttttaacctcaggttccaaattcagtaaattttggaaacagtacagctatttctcatcaattctctatcatgttgaagtcaaatttggattttccaccaaattctgaatttgtagacatacttgtacgctcacttgccccagatgcctcctctgtcctcattcttctctcccacacaagcagtctttttctacagccagtaaggcagctctgtcgtggtagcagatggtcccattattctagggtcttactctttgtatgatgaaaagaatgtgttatgaatcggtgctgtcagccctgctgtcagaccttcttccacagcaaatgagatgtatgcccaaagacggtagaattaaagaagagtaaaatggctgttgaagcactttctgtcctggtattttgtttttgcttttgccacacagtagctcagaatttgaacaaatagccaaaagctggtggttgatgaattatgaactagttgtatcaacacaaagcaagagttggggaaagccatatttaacttggtgagctgtgggagaacctggtggcagaaggagaaccaactgccaaggggaaagagaaggggcctccagcagcgaaggggatacagtgagctaatgatgtcaaggaggagtttcaggttattctcgtcagctccacaaatgggtgctttgtggtctctgcccgcgttacctttcctctcaatgtacctttgtgtgaactgggcagtggaggtgcctgctgcagttaccatggagttcaggctctgggcagctcagtcaggcaaaacacacaaacagccatcagcctgtgtgggctcagggcacctctggacaaaggcttgtggggcataaccttctttaccacagagagcccttagctatgctgatcagaccgtaagcgtttatgagaaacttagtttcctcctgtggctgaggaggggccagctttttcttcttttgcctgctgttttctctcccaatctatgatatgatatgacctggtttggggctgtctttggtgtttagaatatttgttttctgtcccaggatatttcttataagaacctaacttcaagagtagtgtgcgagtactgatctgaatttaaattaaaattggcttatattaggcagtcacagacaggaaaaataagagctatgcaaagaaagggggatttaaagtagtaggttctatcatctcaattcatttttttccatgaaatcccttcttccaagattcattccctctctcagacatgtgctagcatgggtattatcattgagaaagcacagctacagcaaagccacctgaatagcaatttgtgattggaagcattcttgagggatccctaatctagagtaatttatttgtgtaaggatcccaaatgtgttgcacctttcatgatacatttcttctctgaagagggtacgtggggtgtgtgtatttaaatccatcctatgtattactgattgtcctgtgtagaaagatggcaattattctgtctctttctccaagtttgagccacatctcagccacattgttagacagtgtacagagaacctatctttcctttttttttttttaaaggacaggattttgctgtgttgcccaggctagacttgaactcctgggctcaagtaatccacctcagcctgagtagctgagactacagcccatcttatttctttaaatcattcatctcaggcagagaacttttccctcaaacattctttttagaattagttcagtcattcctaaaacatccaaatgctagtcttccaccatgaaaaatagattgtcactggaaagaacagtagcaatttccataaggatgtgccttcactcacacgggacaggcggtggttatagagtcgggcaaaaccagcagtagagtatgaccagccaagccaatctgcttaataaaaagatggaagacagtaaggaaggaaagtagccactaagagtctgagtctgactgggctacagaataaagggtatttatggacagaatgtcattacatgcctatgggaataccaatcatatttggaagatttgcagattttttttcagagaggaaagactcaccttcctgtttttggttctcagtaggttcgtgtgtgttcctagaatcacagctctgactccaaatgactcaatttctcaattagaaaaagtagaagctttctaagcaacttggaagaaaacagtcataagtaagcaatttgttgattttactacagaagcaacaactgaagaggcagtgtttttactttcagactccgggattcccattctgtagtctctctgcttttaaaaaccctccttttgcaatagatgcccaaacagatgatgtttattacttgttatttacgtggcctcagacagtgtatgtattctcgatataacttgtagagtgtgaaatataagtttaactaccaaataaggtctcccagggttagatgactgcgggaagcctttgatcccaacccccaaggctttgtatatttgatcatttgtgatctaaccctggaagaaaaagagctcagaaaccactatgaaaaaatttgttcagtgttttctgtgttcccgtaggttctggagtctgaggatgcaaagatgaataagataaattctcagaatgtagttataatctcttgttttctggtatatgccatctttctttaacttctctaaaatattgggtatttgtcaaataaccacttttaacagttaccattactgagggcttatacattggtgttataaaagtgacttgattcagaaatcaatccattcagtaaagtactccttctctaaatttgctgttatgtctataaggaacagtttgacctgcccttctcctcacctcctcacctgccttccaacattgaatttggaaggagacgtgaaaattggacatttggttttgcccttgggctggaaactatcatataatcataagtttgagcctagaagtgatccttgtgatcttctcacctctttaaattcccacaacacaagagattaaaaacagaggtttcagctcttcatagtgcgttgtgaaatggctggccagagtgtaccaacaaagctgtcatcgggctcacagctcagagacatctgcatgtgatcatctgcatagtcctctcctctaacgggaaacacctcagatttgcatataaaaaagcaccctggtgctgaaatgaacccctttcttgaacatcaaagctgtctcccacagccttgggcagcagggtgcctcttagtggatgtgctgggtccaccctgagccctgacatgtggtggcagcattgccagttggtctgtgtgtctgtgtagcagggacgatttcccagaaagcaattttccttttgaaatacgtaattgttgagactaggcagtttcaaagtcagctgcatatagtagcaagtacaggactgtcttgtttttggtgtccttggaggtgctggggtgagggtttcagtgggatcatttactctcacatgttgtctgccttctgcttctgtggacactgctttgtacttaattcagacagactgtgaatacaccttttttataaatacctttcaaattcttggtaagatataattttgatagctgattgcagattttctgtatttgtcagattaataaagactgcatgaatcca

SEQ ID NO: 9902 - protein, 374 aa, Homo sapiens; identical to SEQ ID NO: 9898

SEQ ID NO: 9903 - DNA, 6617 bp, Homo sapiens
gagatatttgcgattttaacagcattctcttgattgtgatgcagctggttcgcaaataggtaccctaaagaaatgacaggtgttaaatttaggatggccatcgcttgtatgccgggagaagcacacgctgggcccaatttatataggggctttcgtcctcagctcgagcagcctcagaaccccgacaacccacgccagcgctctgggcggattccgtcaggtggggaaggccaggtggagctctgggttctccccgcaatcgtttctccaggccggaggccccgcccccttcctcctggctcctcccctcctccgtgggccggccgccaacgacgccagagccggaaatgacgacaacggtgagggttctcgggcggggcctgggacaggcagctccggggtccgcggtttcacatcggaaacaaaacagcggctggtctggaaggaacctgagctacgagccgcggcggcagcggggcggcggggaagcgtatgctgggcacagtggctcacacctgtaatctgccagcactttgggaggccgaggcaggtagatcacctgaggtcaggagttcgagaccagcctcgccaaaatgacctaatctgggagcctgcaagtgacaacagcctttgcggtccttagacagcttggcctggaggagaacacatgaaagaaagaacctcaagaggctttgttttctgtgaaacagtatttctatacagttgctccaatgacagagttacctgcaccgttgtcctacttccagaatgcacagatgtctgaggacaaccacctgagcaatactaatgacaatagagaacggcaggagcacaacgacagacggagccttggccaccctgagccattatctaatggacgaccccagggtaactcccggcaggtggtggagcaagatgaggaagaagatgaggagctgacattgaaatatggcgccaagcatgtgatcatgctctttgtccctgtgactctctgcatggtggtggtcgtggctaccattaagtcagtcagcttttatacccggaaggatgggcagctaatctataccccattcacagaagataccgagactgtgggccagagagccctgcactcaattctgaatgctgccatcatgatcagtgtcattgttgtcatgactatcctcctggtggttctgtataaatacaggtgctataaggtcatccatgcctggcttattatatcatctctattgttgctgttctttttttcattcatttacttgggggaagtgtttaaaacctataacgttgctgtggactacattactgttgcactcctgatctggaattttggtgtggtgggaatgatttccattcactggaaaggtccacttcgactccagcaggcatatctcattatgattagtgccctcatggccctggtgtttatcaagtacctccctgaatggactgcgtggctcatcttggctgtgatttcagtatatgatttagtggctgttttgtgtccgaaaggtccacttcgtatgctggttgaaacagctcaggagagaaatgaaacgctttttccagctctcatttactcctcaacaatggtgtggttggtgaatatggcagaaggagacccggaagctcaaaggagagtatccaaaaattccaagtataatgcagaaagagcctgtctgcctcctgctgccatcaacctgctgtctatagctcccatggcacccaggctgttcatgccaaagggtgcctgcaggcccacggcacagaaagggagtcacaagacactgttgcagagaatgatgatggcgggttcagtgaggaatgggaagcccagagggacagtcatctagggcctcatcgctctacacctgagtcacgagctgctgtccaggaactttccagcagtatcctcgctggtgaagacccagaggaaaggggagtaaaacttggattgggagatttcattttctacagtgttctggttggtaaagcctcagcaacagccagtggagactggaacacaaccatagcctgtttcgtagccatattaattggtttgtgccttacattattactccttgccattttcaagaaagcattgccagctcttccaatctccatcacctttgggcttgttttctactttgccacagattatcttgtacagccttttatggaccaattagcattccatcaattttatatctagcatatttgcggttagaatcccatggatgtttcttctttgactataacaaaatctggggaggacaaaggtgattttcctgtgtccacatctaacaaagtcaagattcccggctggacttttgcagcttccttccaagtcttcctgaccaccttgcactattggactttggaaggaggtgcctatagaaaacgattttgaacatacttcatcgcagtggactgtgtccctcggtgcagaaactaccagatttgagggacgaggtcaaggagatatgataggcccggaagttgctgtgccccatcagcagcttgacgcgtggtcacaggacgatttcactgacactgcgaactctcaggactaccgttaccaagaggttaggtgaagtggtttaaaccaaacggaactcttcatcttaaactacacgttgaaaatcaacccaataattctgtattaactgaattctgaacttttcaggaggtactgtgaggaagagcaggcaccagcagcagaatggggaatggagaggtgggcaggggttccagcttccctttgattttttgctgcagactcatcctttttaaatgagacttgttttcccctctctttgagtcaagtcaaatatgtagattgcctttggcaattcttcttctcaagcactgacactcattaccgtctgtgattgccatttcttcccaaggccagtctgaacctgaggttgctttatcctaaaagttttaacctcaggttccaaattcagtaaattttggaaacagtacagctatttctcatcaattctctatcatgttgaagtcaaatttggattttccaccaaattctgaatttgtagacatacttgtacgctcacttgccccagatgcctcctctgtcctcattcttctctcccacacaagcagtctttttctacagccagtaaggcagctctgtcgtggtagcagatggtcccattattctagggtcttactctttgtatgatgaaaagaatgtgttatgaatcggtgctgtcagccctgctgtcagaccttcttccacagcaaatgagatgtatgcccaaagacggtagaattaaagaagagtaaaatggctgttgaagcactttctgtcctggtattttgtttttgcttttgccacacagtagctcagaatttgaacaaatagccaaaagctggtggttgatgaattatgaactagttgtatcaacacaaagcaagagttggggaaagccatatttaacttggtgagctgtgggagaacctggtggcagaaggagaaccaactgccaaggggaaagagaaggggcctccagcagcgaaggggatacagtgagctaatgatgtcaaggaggagtttcaggttattctcgtcagctccacaaatgggtgctttgtggtctctgcccgcgttacctttcctctcaatgtacctttgtgtgaactgggcagtggaggtgcctgctgcagttaccatggagttcaggctctgggcagctcagtcaggcaaaacacacaaacagccatcagcctgtgtgggctcagggcacctctggacaaaggcttgtggggcataaccttctttaccacagagagcccttagctatgctgatcagaccgtaagcgtttatgagaaacttagtttcctcctgtggctgaggaggggccagctttttcttcttttgcctgctgttttctctcccaatctatgatatgatatgacctggtttggggctgtctttggtgtttagaatatttgttttctgtcccaggatatttcttataagaacctaacttcaagagtagtgtgcgagtactgatctgaatttaaattaaaattggcttatattaggcagtcacagacaggaaaaataagagctatgcaaagaaagggggatttaaagtagtaggttctatcatctcaattcatttttttccatgaaatcccttcttccaagattcattccctctctcagacatgtgctagcatgggtattatcattgagaaagcacagctacagcaaagccacctgaatagcaatttgtgattggaagcattcttgagggatccctaatctagagtaatttatttgtgtaaggatcccaaatgtgttgcacctttcatgatacatttcttctctgaagagggtacgtggggtgtgtgtatttaaatccatcctatgtattactgattgtcctgtgtagaaagatggcaattattctgtctctttctccaagtttgagccacatctcagccacattgttagacagtgtacagagaacctatctttcctttttttttttttaaaggacaggattttgctgtgttgcccaggctagacttgaactcctgggctcaagtaatccacctcagcctgagtagctgagactacagcccatcttatttctttaaatcattcatctcaggcagagaacttttccctcaaacattctttttagaattagttcagtcattcctaaaacatccaaatgctagtcttccaccatgaaaaatagattgtcactggaaagaacagtagcaatttccataaggatgtgccttcactcacacgggacaggcggtggttatagagtcgggcaaaaccagcagtagagtatgaccagccaagccaatctgcttaataaaaagatggaagacagtaaggaaggaaagtagccactaagagtctgagtctgactgggctacagaataaagggtatttatggacagaatgtcattacatgcctatgggaataccaatcatatttggaagatttgcagattttttttcagagaggaaagactcaccttcctgtttttggttctcagtaggttcgtgtgtgttcctagaatcacagctctgactccaaatgactcaatttctcaattagaaaaagtagaagctttctaagcaacttggaagaaaacagtcataagtaagcaatttgttgattttactacagaagcaacaactgaagaggcagtgtttttactttcagactccgggattcccattctgtagtctctctgcttttaaaaaccctccttttgcaatagatgcccaaacagatgatgtttattacttgttatttacgtggcctcagacagtgtatgtattctcgatataacttgtagagtgtgaaatataagtttaactaccaaataaggtctcccagggttagatgactgcgggaagcctttgatcccaacccccaaggctttgtatatttgatcatttgtgatctaaccctggaagaaaaagagctcagaaaccactatgaaaaaatttgttcagtgttttctgtgttcccgtaggttctggagtctgaggatgcaaagatgaataagataaattctcagaatgtagttataatctcttgttttctggtatatgccatctttctttaacttctctaaaatattgggtatttgtcaaataaccacttttaacagttaccattactgagggcttatacattggtgttataaaagtgacttgattcagaaatcaatccattcagtaaagtactccttctctaaatttgctgttatgtctataaggaacagtttgacctgcccttctcctcacctcctcacctgccttccaacattgaatttggaaggagacgtgaaaattggacatttggttttgcccttgggctggaaactatcatataatcataagtttgagcctagaagtgatccttgtgatcttctcacctctttaaattcccacaacacaagagattaaaaacagaggtttcagctcttcatagtgcgttgtgaaatggctggccagagtgtaccaacaaagctgtcatcgggctcacagctcagagacatctgcatgtgatcatctgcatagtcctctcctctaacgggaaacacctcagatttgcatataaaaaagcaccctggtgctgaaatgaacccctttcttgaacatcaaagctgtctcccacagccttgggcagcagggtgcctcttagtggatgtgctgggtccaccctgagccctgacatgtggtggcagcattgccagttggtctgtgtgtctgtgtagcagggacgatttcccagaaagcaattttccttttgaaatacgtaattgttgagactaggcagtttcaaagtcagctgcatatagtagcaagtacaggactgtcttgtttttggtgtccttggaggtgctggggtgagggtttcagtgggatcatttactctcacatgttgtctgccttctgcttctgtggacactgctttgtacttaattcagacagactgtgaatacaccttttttataaatacctttcaaattcttggtaagatataattttgatagctgattgcagattttctgtatttgtcagattaataaagactgcatgaatcca

SEQ ID NO: 9904 - protein, 374 aa, Homo sapiens; identical to SEQ ID NO: 9898

SEQ ID NO: 9905 - DNA, 6423 bp, Homo sapiens
gagatatttgcgattttaacagcattctcttgattgtgatgcagctggttcgcaaataggtaccctaaagaaatgacaggtgttaaatttaggatggccatcgcttgtatgccgggagaagcacacgctgggcccaatttatataggggctttcgtcctcagctcgagcagcctcagaaccccgacaacccacgccagcgctctgggcggattccgtcaggtggggaaggccaggtggagctctgggttctccccgcaatcgtttctccaggccggaggccccgcccccttcctcctggctcctcccctcctccgtgggccggccgccaacgacgccagagccggaaatgacgacaacggtgagggttctcgggcggggcctgggacaggcagctccggggtccgcggtttcacatcggaaacaaaacagcggctggtctggaaggaacctgagctacgagccgcggcggcagcggggcggcggggaagcgtatacctaatctgggagcctgcaagtgacaacagcctttgcggtccttagacagcttggcctggaggagaacacatgaaagaaagaacctcaagaggctttgttttctgtgaaacagtatttctatacagttgctccaatgacagagttacctgcaccgttgtcctacttccagaatgcacagatgtctgaggacaaccacctgagcaatactaatgacaatagagaacggcaggagcacaacgacagacggagccttggccaccctgagccattatctaatggacgaccccagggtaactcccggcaggtggtggagcaagatgaggaagaagatgaggagctgacattgaaatatggcgccaagcatgtgatcatgctctttgtccctgtgactctctgcatggtggtggtcgtggctaccattaagtcagtcagcttttatacccggaaggatgggcagctaatctataccccattcacagaagataccgagactgtgggccagagagccctgcactcaattctgaatgctgccatcatgatcagtgtcattgttgtcatgactatcctcctggtggttctgtataaatacaggtgctataaggtcatccatgcctggcttattatatcatctctattgttgctgttctttttttcattcatttacttgggggaagtgtttaaaacctataacgttgctgtggactacattactgttgcactcctgatctggaattttggtgtggtgggaatgatttccattcactggaaaggtccacttcgactccagcaggcatatctcattatgattagtgccctcatggccctggtgtttatcaagtacctccctgaatggactgcgtggctcatcttggctgtgatttcagtatatgatttagtggctgttttgtgtccgaaaggtccacttcgtatgctggttgaaacagctcaggagagaaatgaaacgctttttccagctctcatttactcctcaacaatggtgtggttggtgaatatggcagaaggagacccggaagctcaaaggagagtatccaaaaattccaagtataatgcagaaagcacagaaagggagtcacaagacactgttgcagagaatgatgatggcgggttcagtgaggaatgggaagcccagagggacagtcatctagggcctcatcgctctacacctgagtcacgagctgctgtccaggaactttccagcagtatcctcgctggtgaagacccagaggaaaggggagtaaaacttggattgggagatttcattttctacagtgttctggttggtaaagcctcagcaacagccagtggagactggaacacaaccatagcctgtttcgtagccatattaattggtttgtgccttacattattactccttgccattttcaagaaagcattgccagctcttccaatctccatcacctttgggcttgttttctactttgccacagattatcttgtacagccttttatggaccaattagcattccatcaattttatatctagcatatttgcggttagaatcccatggatgtttcttctttgactataacaaaatctggggaggacaaaggtgattttcctgtgtccacatctaacaaagtcaagattcccggctggacttttgcagcttccttccaagtcttcctgaccaccttgcactattggactttggaaggaggtgcctatagaaaacgattttgaacatacttcatcgcagtggactgtgtccctcggtgcagaaactaccagatttgagggacgaggtcaaggagatatgataggcccggaagttgctgtgccccatcagcagcttgacgcgtggtcacaggacgatttcactgacactgcgaactctcaggactaccgttaccaagaggttaggtgaagtggtttaaaccaaacggaactcttcatcttaaactacacgttgaaaatcaacccaataattctgtattaactgaattctgaacttttcaggaggtactgtgaggaagagcaggcaccagcagcagaatggggaatggagaggtgggcaggggttccagcttccctttgattttttgctgcagactcatcctttttaaatgagacttgttttcccctctctttgagtcaagtcaaatatgtagattgcctttggcaattcttcttctcaagcactgacactcattaccgtctgtgattgccatttcttcccaaggccagtctgaacctgaggttgctttatcctaaaagttttaacctcaggttccaaattcagtaaattttggaaacagtacagctatttctcatcaattctctatcatgttgaagtcaaatttggattttccaccaaattctgaatttgtagacatacttgtacgctcacttgccccagatgcctcctctgtcctcattcttctctcccacacaagcagtctttttctacagccagtaaggcagctctgtcgtggtagcagatggtcccattattctagggtcttactctttgtatgatgaaaagaatgtgttatgaatcggtgctgtcagccctgctgtcagaccttcttccacagcaaatgagatgtatgcccaaagacggtagaattaaagaagagtaaaatggctgttgaagcactttctgtcctggtattttgtttttgcttttgccacacagtagctcagaatttgaacaaatagccaaaagctggtggttgatgaattatgaactagttgtatcaacacaaagcaagagttggggaaagccatatttaacttggtgagctgtgggagaacctggtggcagaaggagaaccaactgccaaggggaaagagaaggggcctccagcagcgaaggggatacagtgagctaatgatgtcaaggaggagtttcaggttattctcgtcagctccacaaatgggtgctttgtggtctctgcccgcgttacctttcctctcaatgtacctttgtgtgaactgggcagtggaggtgcctgctgcagttaccatggagttcaggctctgggcagctcagtcaggcaaaacacacaaacagccatcagcctgtgtgggctcagggcacctctggacaaaggcttgtggggcataaccttctttaccacagagagcccttagctatgctgatcagaccgtaagcgtttatgagaaacttagtttcctcctgtggctgaggaggggccagctttttcttcttttgcctgctgttttctctcccaatctatgatatgatatgacctggtttggggctgtctttggtgtttagaatatttgttttctgtcccaggatatttcttataagaacctaacttcaagagtagtgtgcgagtactgatctgaatttaaattaaaattggcttatattaggcagtcacagacaggaaaaataagagctatgcaaagaaagggggatttaaagtagtaggttctatcatctcaattcatttttttccatgaaatcccttcttccaagattcattccctctctcagacatgtgctagcatgggtattatcattgagaaagcacagctacagcaaagccacctgaatagcaatttgtgattggaagcattcttgagggatccctaatctagagtaatttatttgtgtaaggatcccaaatgtgttgcacctttcatgatacatttcttctctgaagagggtacgtggggtgtgtgtatttaaatccatcctatgtattactgattgtcctgtgtagaaagatggcaattattctgtctctttctccaagtttgagccacatctcagccacattgttagacagtgtacagagaacctatctttcctttttttttttttaaaggacaggattttgctgtgttgcccaggctagacttgaactcctgggctcaagtaatccacctcagcctgagtagctgagactacagcccatcttatttctttaaatcattcatctcaggcagagaacttttccctcaaacattctttttagaattagttcagtcattcctaaaacatccaaatgctagtcttccaccatgaaaaatagattgtcactggaaagaacagtagcaatttccataaggatgtgccttcactcacacgggacaggcggtggttatagagtcgggcaaaaccagcagtagagtatgaccagccaagccaatctgcttaataaaaagatggaagacagtaaggaaggaaagtagccactaagagtctgagtctgactgggctacagaataaagggtatttatggacagaatgtcattacatgcctatgggaataccaatcatatttggaagatttgcagattttttttcagagaggaaagactcaccttcctgtttttggttctcagtaggttcgtgtgtgttcctagaatcacagctctgactccaaatgactcaatttctcaattagaaaaagtagaagctttctaagcaacttggaagaaaacagtcataagtaagcaatttgttgattttactacagaagcaacaactgaagaggcagtgtttttactttcagactccgggattcccattctgtagtctctctgcttttaaaaaccctccttttgcaatagatgcccaaacagatgatgtttattacttgttatttacgtggcctcagacagtgtatgtattctcgatataacttgtagagtgtgaaatataagtttaactaccaaataaggtctcccagggttagatgactgcgggaagcctttgatcccaacccccaaggctttgtatatttgatcatttgtgatctaaccctggaagaaaaagagctcagaaaccactatgaaaaaatttgttcagtgttttctgtgttcccgtaggttctggagtctgaggatgcaaagatgaataagataaattctcagaatgtagttataatctcttgttttctggtatatgccatctttctttaacttctctaaaatattgggtatttgtcaaataaccacttttaacagttaccattactgagggcttatacattggtgttataaaagtgacttgattcagaaatcaatccattcagtaaagtactccttctctaaatttgctgttatgtctataaggaacagtttgacctgcccttctcctcacctcctcacctgccttccaacattgaatttggaaggagacgtgaaaattggacatttggttttgcccttgggctggaaactatcatataatcataagtttgagcctagaagtgatccttgtgatcttctcacctctttaaattcccacaacacaagagattaaaaacagaggtttcagctcttcatagtgcgttgtgaaatggctggccagagtgtaccaacaaagctgtcatcgggctcacagctcagagacatctgcatgtgatcatctgcatagtcctctcctctaacgggaaacacctcagatttgcatataaaaaagcaccctggtgctgaaatgaacccctttcttgaacatcaaagctgtctcccacagccttgggcagcagggtgcctcttagtggatgtgctgggtccaccctgagccctgacatgtggtggcagcattgccagttggtctgtgtgtctgtgtagcagggacgatttcccagaaagcaattttccttttgaaatacgtaattgttgagactaggcagtttcaaagtcagctgcatatagtagcaagtacaggactgtcttgtttttggtgtccttggaggtgctggggtgagggtttcagtgggatcatttactctcacatgttgtctgccttctgcttctgtggacactgctttgtacttaattcagacagactgtgaatacaccttttttataaatacctttcaaattcttggtaagatataattttgatagctgattgcagattttctgtatttgtcagattaataaagactgcatgaatcca

SEQ ID NO: 9906 - protein, 463 aa, Homo sapiens; identical to SEQ ID NO: 9896

SEQ ID NO: 9907 - DNA, 1384 bp, Homo sapiens
gggacaggcagctccggggtccgcggtttcacatcggaaacaaaacagcggctggtctggaaggaacctgagctacgagccgcggcggcagcggggcggcggggaagcgtatgtgcgtgatggggagtccgggcaagccaggaaggcaccgcggacatgggcggccgcgggcagggcccggccctttgtggccgcccgggccgcgaagccggtgtcctaaaagatgaggggcggggcgcggccggttggggctggggaaccccgtgtgggaaaccaggaggggcggcccgtttctcgggcttcgggcgcggccgggtggagagagattccggggagccttggtccggaaatgctgtttgctcgaagacgtctcagggcgcaggtgccttgggccgggattagtagccgtctgaactggagtggagtaggagaaagaggaagcgtcttgggctgggtctgcttgagcaactggtgaaactccgcgcctcacgccccgggtgtgtccttgtccaggggcgacgagcattctgggcgaagtccgcacgcctcttgttcgaggcggaagacggggtctgatgctttctccttggtcgggactgtctcgaggcatgcatgtccagtgactcttgtgtttgctgctgcttccctctcagattcttctcaccgttgtggtcagctctgctttaggcatattaatccatagtggaggctgggatgggtgagagaattgaggtgacttttccataattcaggtgagatgtgattagagttcgatctgcggtggtggcagaggcttacaagaaacactaacgggacatgggaaccaattgaggatcagggaataaagtgtgaagttgactaggaggttttcagtttagaacatggcagagacattctcagaaataaggaagttaggaagaaagacctggtttagagaggagggcgaggaagtggtttggaagtgtcactttggaagtgccagcaggtgaaaatgccctgtgaacaggactggagctgaaaacaggaatcaattccatagatttccagttgatgttggagcagtggagaagtctaagctaaggaaggggaagaggaggccaaggcaaacacttaggaacacttgcaacgagggggtggaagaagagcaaggagccagctgaggagaatgagtgtggttggagaaccaccacagcgcagggtcgccagagctgggggagggagtgaatattggctgaataataatctaatctaccacagatggttaacagaggtggagtgggatggaaggagaaaaaaaaaaaatcaccaaatgggatgtatcactacccttgctctttttagcgtctgctgctttcacaaagccttttatagggctggagaaatg

SEQ ID NO: 9908 - protein, 72 aa, Homo sapiens
MSVVGEPPQRRVARAGGGSEYWLNNNLIYHRWLTEVEWDGRRKKKNHQMGCITTLALFSVCCFHKAFYRAGE

SEQ ID NO: 9909 - DNA, 3393 bp, Homo sapiens
gggacaggcagctccggggtccgcggtttcacatcggaaacaaaacagcggctggtctggaaggaacctgagctacgagccgcggcggcagcggggcggcggggaagcgtatgtgcgtgatggggagtccgggcaagccaggaaggcaccgcggacatgggcggccgcgggcagggcccggccctttgtggccgcccgggccgcgaagccggtgtcctaaaagatgaggggcggggcgcggccggttggggctggggaaccccgtgtgggaaaccaggaggggcggcccgtttctcgggcttcgggcgcggccgggtggagagagattccggggagccttggtccggaaatgctgtttgctcgaagacgtctcagggcgcaggtgccttgggccgggattagtagccgtctgaactggagtggagtaggagaaagaggaagcgtcttgggctgggtctgcttgagcaactggtgaaactccgcgcctcacgccccgggtgtgtccttgtccaggggcgacgagcattctgggcgaagtccgcacgcctcttgttcgaggcggaagacggggtctgatgctttctccttggtcgggactgtctcgaggcatgcatgtccagtgactcttgtgtttgctgctgcttccctctcagattcttctcaccgttgtggtcagctctgctttaggcatattaatccatagtggaggctgggatgggtgagagaattgaggtgacttttccataattcagacctaatctgggagcctgcaagtgacaacagcctttgcggtccttagacagcttggcctggaggagaacacatgaaagaaagaacctcaagaggctttgttttctgtgaaacagtatttctatacagttgctccaatgacagagttacctgcaccgttgtcctacttccagaatgcacagatgtctgaggacaaccacctgagcaatactaatgacaatagagaacggcaggagcacaacgacagacggagccttggccaccctgagccattatctaatggacgaccccagggtaactcccggcaggtggtggagcaagatgaggaagaagatgaggagctgacattgaaatatggcgccaagcatgtgatcatgctctttgtccctgtgactctctgcatggtggtggtcgtggctaccattaagtcagtcagcttttatacccggaaggatgggcagctaatctataccccattcacagaagataccgagactgtgggccagagagccctgcactcaattctgaatgctgccatcatgatcagtgtcattgttgtcatgactatcctcctggtggttctgtataaatacaggtgctataaggtcatccatgcctggcttattatatcatctctattgttgctgttctttttttcattcatttacttgggggaagtgtttaaaacctataacgttgctgtggactacattactgttgcactcctgatctggaattttggtgtggtgggaatgatttccattcactggaaaggtccacttcgactccagcaggcatatctcattatgattagtgccctcatggccctggtgtttatcaagtacctccctgaatggactgcgtggctcatcttggctgtgatttcagtatatgatttagtggctgttttgtgtccgaaaggtccacttcgtatgctggttgaaacagctcaggagagaaatgaaacgctttttccagctctcatttactcctcaacaatggtgtggttggtgaatatggcagaaggagacccggaagctcaaaggagagtatccaaaaattccaagtataatgcagaaagcacagaaagggagtcacaagacactgttgcagagaatgatgatggcgggttcagtgaggaatgggaagcccagagggacagtcatctagggcctcatcgctctacacctgagtcacgagctgctgtccaggaactttccagcagtatcctcgctggtgaagacccagaggaaaggggagtaaaacttggattgggagatttcattttctacagtgttctggttggtaaagcctcagcaacagccagtggagactggaacacaaccatagcctgtttcgtagccatattaattggtttgtgccttacattattactccttgccattttcaagaaagcattgccagctcttccaatctccatcacctttgggcttgttttctactttgccacagattatcttgtacagccttttatggaccaattagcattccatcaattttatatctagcatatttgcggttagaatcccatggatgtttcttctttgactataacaaaatctggggaggacaaaggtgattttcctgtgtccacatctaacaaagtcaagattcccggctggacttttgcagcttccttccaagtcttcctgaccaccttgcactattggactttggaaggaggtgcctatagaaaacgattttgaacatacttcatcgcagtggactgtgtccctcggtgcagaaactaccagatttgagggacgaggtcaaggagatatgataggcccggaagttgctgtgccccatcagcagcttgacgcgtggtcacaggacgatttcactgacactgcgaactctcaggactaccgttaccaagaggttaggtgaagtggtttaaaccaaacggaactcttcatcttaaactacacgttgaaaatcaacccaataattctgtattaactgaattctgaacttttcaggaggtactgtgaggaagagcaggcaccagcagcagaatggggaatggagaggtgggcaggggttccagcttccctttgattttttgctgcagactcatcctttttaaatgagacttgttttcccctctctttgagtcaagtcaaatatgtagattgcctttggcaattcttcttctcaagcactgacactcattaccgtctgtgattgccatttcttcccaaggccagtctgaacctgaggttgctttatcctaaaagttttaacctcaggttccaaattcagtaaattttggaaacagtacagctatttctcatcaattctctatcatgttgaagtcaaatttggattttccaccaaattctgaatttgtagacatacttgtacgctcacttgccccagatgcctcctctgtcctcattcttctctcccacacaagcagtctttttctacagccagtaaggcagctctgtcgtggtagcagatggtcccattattctagggtcttactctttgtatgatgaaaagaatgtgttatgaatcggtgctgtcagccctgctgtcagaccttcttccacagcaaatgagatgtatgcccaaagacggtagaattaaagaagagtaaaatggctgttgaagcac

SEQ ID NO: 9910 - protein, 463 aa, Homo sapiens; identical to SEQ ID NO: 9896

SEQ ID NO: 9911 - DNA, 6681 bp, Homo sapiens
gggacaggcagctccggggtccgcggtttcacatcggaaacaaaacagcggctggtctggaaggaacctgagctacgagccgcggcggcagcggggcggcggggaagcgtatgtgcgtgatggggagtccgggcaagccaggaaggcaccgcggacatgggcggccgcgggcagggcccggccctttgtggccgcccgggccgcgaagccggtgtcctaaaagatgaggggcggggcgcggccggttggggctggggaaccccgtgtgggaaaccaggaggggcggcccgtttctcgggcttcgggcgcggccgggtggagagagattccggggagccttggtccggaaatgctgtttgctcgaagacgtctcagggcgcaggtgccttgggccgggattagtagccgtctgaactggagtggagtaggagaaagaggaagcgtcttgggctgggtctgcttgagcaactggtgaaactccgcgcctcacgccccgggtgtgtccttgtccaggggcgacgagcattctgggcgaagtccgcacgcctcttgttcgaggcggaagacggggtctgatgctttctccttggtcgggactgtctcgaggcatgcatgtccagtgactcttgtgtttgctgctgcttccctctcagattcttctcaccgttgtggtcagctctgctttaggcatattaatccatagtggaggctgggatgggtgagagaattgaggtgacttttccataattcagacctaatctgggagcctgcaagtgacaacagcctttgcggtccttagacagcttggcctggaggagaacacatgaaagaaagaacctcaagaggctttgttttctgtgaaacagtatttctatacagttgctccaatgacagagttacctgcaccgttgtcctacttccagaatgcacagatgtctgaggacaaccacctgagcaatactaatgacaatagagaacggcaggagcacaacgacagacggagccttggccaccctgagccattatctaatggacgaccccagggtaactcccggcaggtggtggagcaagatgaggaagaagatgaggagctgacattgaaatatggcgccaagcatgtgatcatgctctttgtccctgtgactctctgcatggtggtggtcgtggctaccattaagtcagtcagcttttatacccggaaggatgggcagctaatctataccccattcacagaagataccgagactgtgggccagagagccctgcactcaattctgaatgctgccatcatgatcagtgtcattgttgtcatgactatcctcctggtggttctgtataaatacaggtgctataaggtcatccatgcctggcttattatatcatctctattgttgctgttctttttttcattcatttacttgggggaagtgtttaaaacctataacgttgctgtggactacattactgttgcactcctgatctggaattttggtgtggtgggaatgatttccattcactggaaaggtccacttcgactccagcaggcatatctcattatgattagtgccctcatggccctggtgtttatcaagtacctccctgaatggactgcgtggctcatcttggctgtgatttcagtatatgatttagtggctgttttgtgtccgaaaggtccacttcgtatgctggttgaaacagctcaggagagaaatgaaacgctttttccagctctcatttactcctcaacaatggtgtggttggtgaatatggcagaaggagacccggaagctcaaaggagagtatccaaaaattccaagtataatgcagaaagcacagaaagggagtcacaagacactgttgcagagaatgatgatggcgggttcagtgaggaatgggaagcccagagggacagtcatctagggcctcatcgctctacacctgagtcacgagctgctgtccaggaactttccagcagtatcctcgctggtgaagacccagaggaaaggggagtaaaacttggattgggagatttcattttctacagtgttctggttggtaaagcctcagcaacagccagtggagactggaacacaaccatagcctgtttcgtagccatattaattggtttgtgccttacattattactccttgccattttcaagaaagcattgccagctcttccaatctccatcacctttgggcttgttttctactttgccacagattatcttgtacagccttttatggaccaattagcattccatcaattttatatctagcatatttgcggttagaatcccatggatgtttcttctttgactataacaaaatctggggaggacaaaggtgattttcctgtgtccacatctaacaaagtcaagattcccggctggacttttgcagcttccttccaagtcttcctgaccaccttgcactattggactttggaaggaggtgcctatagaaaacgattttgaacatacttcatcgcagtggactgtgtccctcggtgcagaaactaccagatttgagggacgaggtcaaggagatatgataggcccggaagttgctgtgccccatcagcagcttgacgcgtggtcacaggacgatttcactgacactgcgaactctcaggactaccgttaccaagaggttaggtgaagtggtttaaaccaaacggaactcttcatcttaaactacacgttgaaaatcaacccaataattctgtattaactgaattctgaacttttcaggaggtactgtgaggaagagcaggcaccagcagcagaatggggaatggagaggtgggcaggggttccagcttccctttgattttttgctgcagactcatcctttttaaatgagacttgttttcccctctctttgagtcaagtcaaatatgtagattgcctttggcaattcttcttctcaagcactgacactcattaccgtctgtgattgccatttcttcccaaggccagtctgaacctgaggttgctttatcctaaaagttttaacctcaggttccaaattcagtaaattttggaaacagtacagctatttctcatcaattctctatcatgttgaagtcaaatttggattttccaccaaattctgaatttgtagacatacttgtacgctcacttgccccagatgcctcctctgtcctcattcttctctcccacacaagcagtctttttctacagccagtaaggcagctctgtcgtggtagcagatggtcccattattctagggtcttactctttgtatgatgaaaagaatgtgttatgaatcggtgctgtcagccctgctgtcagaccttcttccacagcaaatgagatgtatgcccaaagacggtagaattaaagaagagtaaaatggctgttgaagcactttctgtcctggtattttgtttttgcttttgccacacagtagctcagaatttgaacaaatagccaaaagctggtggttgatgaattatgaactagttgtatcaacacaaagcaagagttggggaaagccatatttaacttggtgagctgtgggagaacctggtggcagaaggagaaccaactgccaaggggaaagagaaggggcctccagcagcgaaggggatacagtgagctaatgatgtcaaggaggagtttcaggttattctcgtcagctccacaaatgggtgctttgtggtctctgcccgcgttacctttcctctcaatgtacctttgtgtgaactgggcagtggaggtgcctgctgcagttaccatggagttcaggctctgggcagctcagtcaggcaaaacacacaaacagccatcagcctgtgtgggctcagggcacctctggacaaaggcttgtggggcataaccttctttaccacagagagcccttagctatgctgatcagaccgtaagcgtttatgagaaacttagtttcctcctgtggctgaggaggggccagctttttcttcttttgcctgctgttttctctcccaatctatgatatgatatgacctggtttggggctgtctttggtgtttagaatatttgttttctgtcccaggatatttcttataagaacctaacttcaagagtagtgtgcgagtactgatctgaatttaaattaaaattggcttatattaggcagtcacagacaggaaaaataagagctatgcaaagaaagggggatttaaagtagtaggttctatcatctcaattcatttttttccatgaaatcccttcttccaagattcattccctctctcagacatgtgctagcatgggtattatcattgagaaagcacagctacagcaaagccacctgaatagcaatttgtgattggaagcattcttgagggatccctaatctagagtaatttatttgtgtaaggatcccaaatgtgttgcacctttcatgatacatttcttctctgaagagggtacgtggggtgtgtgtatttaaatccatcctatgtattactgattgtcctgtgtagaaagatggcaattattctgtctctttctccaagtttgagccacatctcagccacattgttagacagtgtacagagaacctatctttcctttttttttttttaaaggacaggattttgctgtgttgcccaggctagacttgaactcctgggctcaagtaatccacctcagcctgagtagctgagactacagcccatcttatttctttaaatcattcatctcaggcagagaacttttccctcaaacattctttttagaattagttcagtcattcctaaaacatccaaatgctagtcttccaccatgaaaaatagattgtcactggaaagaacagtagcaatttccataaggatgtgccttcactcacacgggacaggcggtggttatagagtcgggcaaaaccagcagtagagtatgaccagccaagccaatctgcttaataaaaagatggaagacagtaaggaaggaaagtagccactaagagtctgagtctgactgggctacagaataaagggtatttatggacagaatgtcattacatgcctatgggaataccaatcatatttggaagatttgcagattttttttcagagaggaaagactcaccttcctgtttttggttctcagtaggttcgtgtgtgttcctagaatcacagctctgactccaaatgactcaatttctcaattagaaaaagtagaagctttctaagcaacttggaagaaaacagtcataagtaagcaatttgttgattttactacagaagcaacaactgaagaggcagtgtttttactttcagactccgggattcccattctgtagtctctctgcttttaaaaaccctccttttgcaatagatgcccaaacagatgatgtttattacttgttatttacgtggcctcagacagtgtatgtattctcgatataacttgtagagtgtgaaatataagtttaactaccaaataaggtctcccagggttagatgactgcgggaagcctttgatcccaacccccaaggctttgtatatttgatcatttgtgatctaaccctggaagaaaaagagctcagaaaccactatgaaaaaatttgttcagtgttttctgtgttcccgtaggttctggagtctgaggatgcaaagatgaataagataaattctcagaatgtagttataatctcttgttttctggtatatgccatctttctttaacttctctaaaatattgggtatttgtcaaataaccacttttaacagttaccattactgagggcttatacattggtgttataaaagtgacttgattcagaaatcaatccattcagtaaagtactccttctctaaatttgctgttatgtctataaggaacagtttgacctgcccttctcctcacctcctcacctgccttccaacattgaatttggaaggagacgtgaaaattggacatttggttttgcccttgggctggaaactatcatataatcataagtttgagcctagaagtgatccttgtgatcttctcacctctttaaattcccacaacacaagagattaaaaacagaggtttcagctcttcatagtgcgttgtgaaatggctggccagagtgtaccaacaaagctgtcatcgggctcacagctcagagacatctgcatgtgatcatctgcatagtcctctcctctaacgggaaacacctcagatttgcatataaaaaagcaccctggtgctgaaatgaacccctttcttgaacatcaaagctgtctcccacagccttgggcagcagggtgcctcttagtggatgtgctgggtccaccctgagccctgacatgtggtggcagcattgccagttggtctgtgtgtctgtgtagcagggacgatttcccagaaagcaattttccttttgaaatacgtaattgttgagactaggcagtttcaaagtcagctgcatatagtagcaagtacaggactgtcttgtttttggtgtccttggaggtgctggggtgagggtttcagtgggatcatttactctcacatgttgtctgccttctgcttctgtggacactgctttgtacttaattcagacagactgtgaatacaccttttttataaatacctttcaaattcttggtaagatataattttgatagctgattgcagattttctgtatttgtcagattaataaagactgcatgaatcca

SEQ ID NO: 9912 - protein, 463 aa, Homo sapiens; identical to SEQ ID NO: 9896

SEQ ID NO: 9913 - DNA, 3195 bp, Homo sapiens
gtcactgaacttctctggattcccttctccttttgtaaaataagcatgttatctgtccgtcctgccttgggcattgtgataaggataagatgacattatagaattttgcaaaattaaaagcgctagacaaatgattttatgaaaatataaagattaggttgaatttggtcagcatagaaaaaggaatgttgagaacattccttaagattactcagctccctttgctggaaatcagaagtcattaagtatctttgtggttgaaaatgtttggtgtctcaggcggttctacttattgctaaagaggtctaccttgagcttatagtaaatttgtcagttagttgaaagtcgtgacaaattaatacattcctggtttacaaattggtcttataagtatttgattggtttaaatgaatttactaggatttaactaacaatggatgacctggtgaaatcctatttcagacctaatctgggagcctgcaagtgacaacagcctttgcggtccttagacagcttggcctggaggagaacacatgaaagaaagaacctcaagaggctttgttttctgtgaaacagtatttctatacagttgctccaatgacagagttacctgcaccgttgtcctacttccagaatgcacagatgtctgaggacaaccacctgagcaatactaatgacaatagagaacggcaggagcacaacgacagacggagccttggccaccctgagccattatctaatggacgaccccagggtaactcccggcaggtggtggagcaagatgaggaagaagatgaggagctgacattgaaatatggcgccaagcatgtgatcatgctctttgtccctgtgactctctgcatggtggtggtcgtggctaccattaagtcagtcagcttttatacccggaaggatgggcagctaatctataccccattcacagaagataccgagactgtgggccagagagccctgcactcaattctgaatgctgccatcatgatcagtgtcattgttgtcatgactatcctcctggtggttctgtataaatacaggtgctataaggtcatccatgcctggcttattatatcatctctattgttgctgttctttttttcattcatttacttgggggaagtgtttaaaacctataacgttgctgtggactacattactgttgcactcctgatctggaattttggtgtggtgggaatgatttccattcactggaaaggtccacttcgactccagcaggcatatctcattatgattagtgccctcatggccctggtgtttatcaagtacctccctgaatggactgcgtggctcatcttggctgtgatttcagtatatgatttagtggctgttttgtgtccgaaaggtccacttcgtatgctggttgaaacagctcaggagagaaatgaaacgctttttccagctctcatttactcctcaacaatggtgtggttggtgaatatggcagaaggagacccggaagctcaaaggagagtatccaaaaattccaagtataatgcagaaagagcctgtctgcctcctgctgccatcaacctgctgtctatagctcccatggcacccaggctgttcatgccaaagggtgcctgcaggcccacggcacagaaagggagtcacaagacactgttgcagagaatgatgatggcgggttcagtgaggaatgggaagcccagagggacagtcatctagggcctcatcgctctacacctgagtcacgagctgctgtccaggaactttccagcagtatcctcgctggtgaagacccagaggaaaggggagtaaaacttggattgggagatttcattttctacagtgttctggttggtaaagcctcagcaacagccagtggagactggaacacaaccatagcctgtttcgtagccatattaattggtttgtgccttacattattactccttgccattttcaagaaagcattgccagctcttccaatctccatcacctttgggcttgttttctactttgccacagattatcttgtacagccttttatggaccaattagcattccatcaattttatatctagcatatttgcggttagaatcccatggatgtttcttctttgactataacaaaatctggggaggacaaaggtgattttcctgtgtccacatctaacaaagtcaagattcccggctggacttttgcagcttccttccaagtcttcctgaccaccttgcactattggactttggaaggaggtgcctatagaaaacgattttgaacatacttcatcgcagtggactgtgtccctcggtgcagaaactaccagatttgagggacgaggtcaaggagatatgataggcccggaagttgctgtgccccatcagcagcttgacgcgtggtcacaggacgatttcactgacactgcgaactctcaggactaccgttaccaagaggttaggtgaagtggtttaaaccaaacggaactcttcatcttaaactacacgttgaaaatcaacccaataattctgtattaactgaattctgaacttttcaggaggtactgtgaggaagagcaggcaccagcagcagaatggggaatggagaggtgggcaggggttccagcttccctttgattttttgctgcagactcatcctttttaaatgagacttgttttcccctctctttgagtcaagtcaaatatgtagattgcctttggcaattcttcttctcaagcactgacactcattaccgtctgtgattgccatttcttcccaaggccagtctgaacctgaggttgctttatcctaaaagttttaacctcaggttccaaattcagtaaattttggaaacagtacagctatttctcatcaattctctatcatgttgaagtcaaatttggattttccaccaaattctgaatttgtagacatacttgtacgctcacttgccccagatgcctcctctgtcctcattcttctctcccacacaagcagtctttttctacagccagtaaggcagctctgtcgtggtagcagatggtcccattattctagggtcttactctttgtatgatgaaaagaatgtgttatgaatcggtgctgtcagccctgctgtcagaccttcttccacagcaaatgagatgtatgcccaaagacggtagaattaaagaagagtaaaatggctgttgaagcac

SEQ ID NO: 9914 - protein, 374 aa, Homo sapiens; identical to SEQ ID NO: 9898

SEQ ID NO: 9915 - DNA, 6483 bp, Homo sapiens
gtcactgaacttctctggattcccttctccttttgtaaaataagcatgttatctgtccgtcctgccttgggcattgtgataaggataagatgacattatagaattttgcaaaattaaaagcgctagacaaatgattttatgaaaatataaagattaggttgaatttggtcagcatagaaaaaggaatgttgagaacattccttaagattactcagctccctttgctggaaatcagaagtcattaagtatctttgtggttgaaaatgtttggtgtctcaggcggttctacttattgctaaagaggtctaccttgagcttatagtaaatttgtcagttagttgaaagtcgtgacaaattaatacattcctggtttacaaattggtcttataagtatttgattggtttaaatgaatttactaggatttaactaacaatggatgacctggtgaaatcctatttcagacctaatctgggagcctgcaagtgacaacagcctttgcggtccttagacagcttggcctggaggagaacacatgaaagaaagaacctcaagaggctttgttttctgtgaaacagtatttctatacagttgctccaatgacagagttacctgcaccgttgtcctacttccagaatgcacagatgtctgaggacaaccacctgagcaatactaatgacaatagagaacggcaggagcacaacgacagacggagccttggccaccctgagccattatctaatggacgaccccagggtaactcccggcaggtggtggagcaagatgaggaagaagatgaggagctgacattgaaatatggcgccaagcatgtgatcatgctctttgtccctgtgactctctgcatggtggtggtcgtggctaccattaagtcagtcagcttttatacccggaaggatgggcagctaatctataccccattcacagaagataccgagactgtgggccagagagccctgcactcaattctgaatgctgccatcatgatcagtgtcattgttgtcatgactatcctcctggtggttctgtataaatacaggtgctataaggtcatccatgcctggcttattatatcatctctattgttgctgttctttttttcattcatttacttgggggaagtgtttaaaacctataacgttgctgtggactacattactgttgcactcctgatctggaattttggtgtggtgggaatgatttccattcactggaaaggtccacttcgactccagcaggcatatctcattatgattagtgccctcatggccctggtgtttatcaagtacctccctgaatggactgcgtggctcatcttggctgtgatttcagtatatgatttagtggctgttttgtgtccgaaaggtccacttcgtatgctggttgaaacagctcaggagagaaatgaaacgctttttccagctctcatttactcctcaacaatggtgtggttggtgaatatggcagaaggagacccggaagctcaaaggagagtatccaaaaattccaagtataatgcagaaagagcctgtctgcctcctgctgccatcaacctgctgtctatagctcccatggcacccaggctgttcatgccaaagggtgcctgcaggcccacggcacagaaagggagtcacaagacactgttgcagagaatgatgatggcgggttcagtgaggaatgggaagcccagagggacagtcatctagggcctcatcgctctacacctgagtcacgagctgctgtccaggaactttccagcagtatcctcgctggtgaagacccagaggaaaggggagtaaaacttggattgggagatttcattttctacagtgttctggttggtaaagcctcagcaacagccagtggagactggaacacaaccatagcctgtttcgtagccatattaattggtttgtgccttacattattactccttgccattttcaagaaagcattgccagctcttccaatctccatcacctttgggcttgttttctactttgccacagattatcttgtacagccttttatggaccaattagcattccatcaattttatatctagcatatttgcggttagaatcccatggatgtttcttctttgactataacaaaatctggggaggacaaaggtgattttcctgtgtccacatctaacaaagtcaagattcccggctggacttttgcagcttccttccaagtcttcctgaccaccttgcactattggactttggaaggaggtgcctatagaaaacgattttgaacatacttcatcgcagtggactgtgtccctcggtgcagaaactaccagatttgagggacgaggtcaaggagatatgataggcccggaagttgctgtgccccatcagcagcttgacgcgtggtcacaggacgatttcactgacactgcgaactctcaggactaccgttaccaagaggttaggtgaagtggtttaaaccaaacggaactcttcatcttaaactacacgttgaaaatcaacccaataattctgtattaactgaattctgaacttttcaggaggtactgtgaggaagagcaggcaccagcagcagaatggggaatggagaggtgggcaggggttccagcttccctttgattttttgctgcagactcatcctttttaaatgagacttgttttcccctctctttgagtcaagtcaaatatgtagattgcctttggcaattcttcttctcaagcactgacactcattaccgtctgtgattgccatttcttcccaaggccagtctgaacctgaggttgctttatcctaaaagttttaacctcaggttccaaattcagtaaattttggaaacagtacagctatttctcatcaattctctatcatgttgaagtcaaatttggattttccaccaaattctgaatttgtagacatacttgtacgctcacttgccccagatgcctcctctgtcctcattcttctctcccacacaagcagtctttttctacagccagtaaggcagctctgtcgtggtagcagatggtcccattattctagggtcttactctttgtatgatgaaaagaatgtgttatgaatcggtgctgtcagccctgctgtcagaccttcttccacagcaaatgagatgtatgcccaaagacggtagaattaaagaagagtaaaatggctgttgaagcactttctgtcctggtattttgtttttgcttttgccacacagtagctcagaatttgaacaaatagccaaaagctggtggttgatgaattatgaactagttgtatcaacacaaagcaagagttggggaaagccatatttaacttggtgagctgtgggagaacctggtggcagaaggagaaccaactgccaaggggaaagagaaggggcctccagcagcgaaggggatacagtgagctaatgatgtcaaggaggagtttcaggttattctcgtcagctccacaaatgggtgctttgtggtctctgcccgcgttacctttcctctcaatgtacctttgtgtgaactgggcagtggaggtgcctgctgcagttaccatggagttcaggctctgggcagctcagtcaggcaaaacacacaaacagccatcagcctgtgtgggctcagggcacctctggacaaaggcttgtggggcataaccttctttaccacagagagcccttagctatgctgatcagaccgtaagcgtttatgagaaacttagtttcctcctgtggctgaggaggggccagctttttcttcttttgcctgctgttttctctcccaatctatgatatgatatgacctggtttggggctgtctttggtgtttagaatatttgttttctgtcccaggatatttcttataagaacctaacttcaagagtagtgtgcgagtactgatctgaatttaaattaaaattggcttatattaggcagtcacagacaggaaaaataagagctatgcaaagaaagggggatttaaagtagtaggttctatcatctcaattcatttttttccatgaaatcccttcttccaagattcattccctctctcagacatgtgctagcatgggtattatcattgagaaagcacagctacagcaaagccacctgaatagcaatttgtgattggaagcattcttgagggatccctaatctagagtaatttatttgtgtaaggatcccaaatgtgttgcacctttcatgatacatttcttctctgaagagggtacgtggggtgtgtgtatttaaatccatcctatgtattactgattgtcctgtgtagaaagatggcaattattctgtctctttctccaagtttgagccacatctcagccacattgttagacagtgtacagagaacctatctttcctttttttttttttaaaggacaggattttgctgtgttgcccaggctagacttgaactcctgggctcaagtaatccacctcagcctgagtagctgagactacagcccatcttatttctttaaatcattcatctcaggcagagaacttttccctcaaacattctttttagaattagttcagtcattcctaaaacatccaaatgctagtcttccaccatgaaaaatagattgtcactggaaagaacagtagcaatttccataaggatgtgccttcactcacacgggacaggcggtggttatagagtcgggcaaaaccagcagtagagtatgaccagccaagccaatctgcttaataaaaagatggaagacagtaaggaaggaaagtagccactaagagtctgagtctgactgggctacagaataaagggtatttatggacagaatgtcattacatgcctatgggaataccaatcatatttggaagatttgcagattttttttcagagaggaaagactcaccttcctgtttttggttctcagtaggttcgtgtgtgttcctagaatcacagctctgactccaaatgactcaatttctcaattagaaaaagtagaagctttctaagcaacttggaagaaaacagtcataagtaagcaatttgttgattttactacagaagcaacaactgaagaggcagtgtttttactttcagactccgggattcccattctgtagtctctctgcttttaaaaaccctccttttgcaatagatgcccaaacagatgatgtttattacttgttatttacgtggcctcagacagtgtatgtattctcgatataacttgtagagtgtgaaatataagtttaactaccaaataaggtctcccagggttagatgactgcgggaagcctttgatcccaacccccaaggctttgtatatttgatcatttgtgatctaaccctggaagaaaaagagctcagaaaccactatgaaaaaatttgttcagtgttttctgtgttcccgtaggttctggagtctgaggatgcaaagatgaataagataaattctcagaatgtagttataatctcttgttttctggtatatgccatctttctttaacttctctaaaatattgggtatttgtcaaataaccacttttaacagttaccattactgagggcttatacattggtgttataaaagtgacttgattcagaaatcaatccattcagtaaagtactccttctctaaatttgctgttatgtctataaggaacagtttgacctgcccttctcctcacctcctcacctgccttccaacattgaatttggaaggagacgtgaaaattggacatttggttttgcccttgggctggaaactatcatataatcataagtttgagcctagaagtgatccttgtgatcttctcacctctttaaattcccacaacacaagagattaaaaacagaggtttcagctcttcatagtgcgttgtgaaatggctggccagagtgtaccaacaaagctgtcatcgggctcacagctcagagacatctgcatgtgatcatctgcatagtcctctcctctaacgggaaacacctcagatttgcatataaaaaagcaccctggtgctgaaatgaacccctttcttgaacatcaaagctgtctcccacagccttgggcagcagggtgcctcttagtggatgtgctgggtccaccctgagccctgacatgtggtggcagcattgccagttggtctgtgtgtctgtgtagcagggacgatttcccagaaagcaattttccttttgaaatacgtaattgttgagactaggcagtttcaaagtcagctgcatatagtagcaagtacaggactgtcttgtttttggtgtccttggaggtgctggggtgagggtttcagtgggatcatttactctcacatgttgtctgccttctgcttctgtggacactgctttgtacttaattcagacagactgtgaatacaccttttttataaatacctttcaaattcttggtaagatataattttgatagctgattgcagattttctgtatttgtcagattaataaagactgcatgaatcca

SEQ ID NO: 9916 - protein, 374 aa, Homo sapiens; identical to SEQ ID NO: 9898

SEQ ID NO: 9917 - DNA, 4064 bp, Homo sapiens
ttttttttttttttttttgcttcgaagaatgattgcctttaccttctcagttctcagttattttccagcacattatgattttatgaccttgatacagaagggctgggctcctggctaaattccacccttaaacctggaactgcaaccctaagtgaaaacagctaaccccattttttttcccacccaaatgttgcctctttggcctgccatgcccctatcctgtgctcataaaaatatttcagctgggctgggtgcggtggctcactcctataatcccagcactttgggagaccgaggcaggtggatcacctggggtcaggagttcaagaccagcctggccaacatggcaaaaccgtatctctactaaaaatacaaaaattagttgggcatggtggtgggcaccataatcccagctacttgggaggatgaggcaggagaattgcttgaacctgggcggcggaggttacagtgagcccagattgtgccagtgcactccagcctgggcaaccgagtgagactctgtctcaaaaaaaaaaaaacaaaaacaaaaaagatttcagcagctgggagaacaatataagcagctgacgtcagggatataaatggctgtgtgttgggaatacaagcagctgattgtcggaaatacaagccactgagtgttggtgatacaagtggctgagcagcgagcagagaatcaggtgagcgttggagactatggatgggacgtggctaacttcagatggtgcagctttggagaataggcccagccggagatggcctggcttcagggaaagatcaccttcttcccataccatccctttttcaactccccattctgctgagaaccacttccatcgtgcaatacaatcttctgcatatactacccttcaatctgttcatgtgatctgattattcctggacactggaagagaacctgggtgccaagaggagagggcaggggctgccaccctgaccctccactgagctggctggcacctggccatccccgaatggccgcgttgaaggagcattgattgtaacacacttggatgctgctgcggggccgcatagagcctgcgcctgccagagaggagcaactggctggttcccgcattcgtttgctctgattcccacactcactcactcgcttgcacactgcctcttgcaaggggtttgagtgtgtggtggccgagtaaacgagccacgctccgagccatgagggggtcaagggaattatccagtctcatctcaatccgacttccctcttcactgttttacttttgtaaaacccttgatgaacttcccattgtcaattcagggtctttttagctctcatcctgccagactgttgataacacctctgatttgtgctccacttttggcttctgtgtcatattgattcctgagttttcttccttctcctctattctcttaatctcgttttctggttttctcccatcacctgctggttaagcttaggggttatttacacttctctccttggtcatctttttactgtatttttccctccacagctatttcatccatttctgaggcctgagatttcatccatttctgaggctatagagaccagtgacttcctctgactcttctgagcttgaaattcctattgaatgacaatagagaacggcaggagcacaacgacagacggagccttggccaccctgagccattatctaatggacgaccccagggtaactcccggcaggtggtggagcaagatgaggaagaagatgaggagctgacattgaaatatggcgccaagcatgtgatcatgctctttgtccctgtgactctctgcatggtggtggtcgtggctaccattaagtcagtcagcttttatacccggaaggatgggcagctaatctataccccattcacagaagataccgagactgtgggccagagagccctgcactcaattctgaatgctgccatcatgatcagtgtcattgttgtcatgactatcctcctggtggttctgtataaatacaggtgctataaggtcatccatgcctggcttattatatcatctctattgttgctgttctttttttcattcatttacttgggggaagtgtttaaaacctataacgttgctgtggactacattactgttgcactcctgatctggaattttggtgtggtgggaatgatttccattcactggaaaggtccacttcgactccagcaggcatatctcattatgattagtgccctcatggccctggtgtttatcaagtacctccctgaatggactgcgtggctcatcttggctgtgatttcagtatatgatttagtggctgttttgtgtccgaaaggtccacttcgtatgctggttgaaacagctcaggagagaaatgaaacgctttttccagctctcatttactcctcaacaatggtgtggttggtgaatatggcagaaggagacccggaagctcaaaggagagtatccaaaaattccaagtataatgcagaaagcacagaaagggagtcacaagacactgttgcagagaatgatgatggcgggttcagtgaggaatgggaagcccagagggacagtcatctagggcctcatcgctctacacctgagtcacgagctgctgtccaggaactttccagcagtatcctcgctggtgaagacccagaggaaaggggagtaaaacttggattgggagatttcattttctacagtgttctggttggtaaagcctcagcaacagccagtggagactggaacacaaccatagcctgtttcgtagccatattaattggtttgtgccttacattattactccttgccattttcaagaaagcattgccagctcttccaatctccatcacctttgggcttgttttctactttgccacagattatcttgtacagccttttatggaccaattagcattccatcaattttatatctagcatatttgcggttagaatcccatggatgtttcttctttgactataacaaaatctggggaggacaaaggtgattttcctgtgtccacatctaacaaagtcaagattcccggctggacttttgcagcttccttccaagtcttcctgaccaccttgcactattggactttggaaggaggtgcctatagaaaacgattttgaacatacttcatcgcagtggactgtgtccctcggtgcagaaactaccagatttgagggacgaggtcaaggagatatgataggcccggaagttgctgtgccccatcagcagcttgacgcgtggtcacaggacgatttcactgacactgcgaactctcaggactaccgttaccaagaggttaggtgaagtggtttaaaccaaacggaactcttcatcttaaactacacgttgaaaatcaacccaataattctgtattaactgaattctgaacttttcaggaggtactgtgaggaagagcaggcaccagcagcagaatggggaatggagaggtgggcaggggttccagcttccctttgattttttgctgcagactcatcctttttaaatgagacttgttttcccctctctttgagtcaagtcaaatatgtagattgcctttggcaattcttcttctcaagcactgacactcattaccgtctgtgattgccatttcttcccaaggccagtctgaacctgaggttgctttatcctaaaagttttaacctcaggttccaaattcagtaaattttggaaacagtacagctatttctcatcaattctctatcatgttgaagtcaaatttggattttccaccaaattctgaatttgtagacatacttgtacgctcacttgccccagatgcctcctctgtcctcattcttctctcccacacaagcagtctttttctacagccagtaaggcagctctgtcgtggtagcagatggtcccattattctagggtcttactctttgtatgatgaaaagaatgtgttatgaatcggtgctgtcagccctgctgtcagaccttcttccacagcaaatgagatgtatgcccaaagacggtagaattaaagaagagtaaaatggctgttgaagcac

SEQ ID NO: 9918 - protein, 384 aa, Homo sapiens
MLFVPVTLCMVVVVATIKSVSFYTRKDGQLIYTPFTEDTETVGQRALHSILNAAIMISVIVVMTILLVVLYKYRCYKVIHAWLIISSLLLLFFFSFIYLGEVFKTYNVAVDYITVALLIWNFGVVGMISIHWKGPLRLQQAYLIMISALMALVFIKYLPEWTAWLILAVISVYDLVAVLCPKGPLRMLVETAQERNETLFPALIYSSTMVWLVNMAEGDPEAQRRVSKNSKYNAESTERESQDTVAENDDGGFSEEWEAQRDSHLGPHRSTPESRAAVQELSSSILAGEDPEERGVKLGLGDFIFYSVLVGKASATASGDWNTTIACFVAILIGLCLTLLLLAIFKKALPALPISITFGLVFYFATDYLVQPFMDQLAFHQFYI

SEQ ID NO: 9919 - DNA, 7352 bp, Homo sapiens
ttttttttttttttttttgcttcgaagaatgattgcctttaccttctcagttctcagttattttccagcacattatgattttatgaccttgatacagaagggctgggctcctggctaaattccacccttaaacctggaactgcaaccctaagtgaaaacagctaaccccattttttttcccacccaaatgttgcctctttggcctgccatgcccctatcctgtgctcataaaaatatttcagctgggctgggtgcggtggctcactcctataatcccagcactttgggagaccgaggcaggtggatcacctggggtcaggagttcaagaccagcctggccaacatggcaaaaccgtatctctactaaaaatacaaaaattagttgggcatggtggtgggcaccataatcccagctacttgggaggatgaggcaggagaattgcttgaacctgggcggcggaggttacagtgagcccagattgtgccagtgcactccagcctgggcaaccgagtgagactctgtctcaaaaaaaaaaaaacaaaaacaaaaaagatttcagcagctgggagaacaatataagcagctgacgtcagggatataaatggctgtgtgttgggaatacaagcagctgattgtcggaaatacaagccactgagtgttggtgatacaagtggctgagcagcgagcagagaatcaggtgagcgttggagactatggatgggacgtggctaacttcagatggtgcagctttggagaataggcccagccggagatggcctggcttcagggaaagatcaccttcttcccataccatccctttttcaactccccattctgctgagaaccacttccatcgtgcaatacaatcttctgcatatactacccttcaatctgttcatgtgatctgattattcctggacactggaagagaacctgggtgccaagaggagagggcaggggctgccaccctgaccctccactgagctggctggcacctggccatccccgaatggccgcgttgaaggagcattgattgtaacacacttggatgctgctgcggggccgcatagagcctgcgcctgccagagaggagcaactggctggttcccgcattcgtttgctctgattcccacactcactcactcgcttgcacactgcctcttgcaaggggtttgagtgtgtggtggccgagtaaacgagccacgctccgagccatgagggggtcaagggaattatccagtctcatctcaatccgacttccctcttcactgttttacttttgtaaaacccttgatgaacttcccattgtcaattcagggtctttttagctctcatcctgccagactgttgataacacctctgatttgtgctccacttttggcttctgtgtcatattgattcctgagttttcttccttctcctctattctcttaatctcgttttctggttttctcccatcacctgctggttaagcttaggggttatttacacttctctccttggtcatctttttactgtatttttccctccacagctatttcatccatttctgaggcctgagatttcatccatttctgaggctatagagaccagtgacttcctctgactcttctgagcttgaaattcctattgaatgacaatagagaacggcaggagcacaacgacagacggagccttggccaccctgagccattatctaatggacgaccccagggtaactcccggcaggtggtggagcaagatgaggaagaagatgaggagctgacattgaaatatggcgccaagcatgtgatcatgctctttgtccctgtgactctctgcatggtggtggtcgtggctaccattaagtcagtcagcttttatacccggaaggatgggcagctaatctataccccattcacagaagataccgagactgtgggccagagagccctgcactcaattctgaatgctgccatcatgatcagtgtcattgttgtcatgactatcctcctggtggttctgtataaatacaggtgctataaggtcatccatgcctggcttattatatcatctctattgttgctgttctttttttcattcatttacttgggggaagtgtttaaaacctataacgttgctgtggactacattactgttgcactcctgatctggaattttggtgtggtgggaatgatttccattcactggaaaggtccacttcgactccagcaggcatatctcattatgattagtgccctcatggccctggtgtttatcaagtacctccctgaatggactgcgtggctcatcttggctgtgatttcagtatatgatttagtggctgttttgtgtccgaaaggtccacttcgtatgctggttgaaacagctcaggagagaaatgaaacgctttttccagctctcatttactcctcaacaatggtgtggttggtgaatatggcagaaggagacccggaagctcaaaggagagtatccaaaaattccaagtataatgcagaaagcacagaaagggagtcacaagacactgttgcagagaatgatgatggcgggttcagtgaggaatgggaagcccagagggacagtcatctagggcctcatcgctctacacctgagtcacgagctgctgtccaggaactttccagcagtatcctcgctggtgaagacccagaggaaaggggagtaaaacttggattgggagatttcattttctacagtgttctggttggtaaagcctcagcaacagccagtggagactggaacacaaccatagcctgtttcgtagccatattaattggtttgtgccttacattattactccttgccattttcaagaaagcattgccagctcttccaatctccatcacctttgggcttgttttctactttgccacagattatcttgtacagccttttatggaccaattagcattccatcaattttatatctagcatatttgcggttagaatcccatggatgtttcttctttgactataacaaaatctggggaggacaaaggtgattttcctgtgtccacatctaacaaagtcaagattcccggctggacttttgcagcttccttccaagtcttcctgaccaccttgcactattggactttggaaggaggtgcctatagaaaacgattttgaacatacttcatcgcagtggactgtgtccctcggtgcagaaactaccagatttgagggacgaggtcaaggagatatgataggcccggaagttgctgtgccccatcagcagcttgacgcgtggtcacaggacgatttcactgacactgcgaactctcaggactaccgttaccaagaggttaggtgaagtggtttaaaccaaacggaactcttcatcttaaactacacgttgaaaatcaacccaataattctgtattaactgaattctgaacttttcaggaggtactgtgaggaagagcaggcaccagcagcagaatggggaatggagaggtgggcaggggttccagcttccctttgattttttgctgcagactcatcctttttaaatgagacttgttttcccctctctttgagtcaagtcaaatatgtagattgcctttggcaattcttcttctcaagcactgacactcattaccgtctgtgattgccatttcttcccaaggccagtctgaacctgaggttgctttatcctaaaagttttaacctcaggttccaaattcagtaaattttggaaacagtacagctatttctcatcaattctctatcatgttgaagtcaaatttggattttccaccaaattctgaatttgtagacatacttgtacgctcacttgccccagatgcctcctctgtcctcattcttctctcccacacaagcagtctttttctacagccagtaaggcagctctgtcgtggtagcagatggtcccattattctagggtcttactctttgtatgatgaaaagaatgtgttatgaatcggtgctgtcagccctgctgtcagaccttcttccacagcaaatgagatgtatgcccaaagacggtagaattaaagaagagtaaaatggctgttgaagcactttctgtcctggtattttgtttttgcttttgccacacagtagctcagaatttgaacaaatagccaaaagctggtggttgatgaattatgaactagttgtatcaacacaaagcaagagttggggaaagccatatttaacttggtgagctgtgggagaacctggtggcagaaggagaaccaactgccaaggggaaagagaaggggcctccagcagcgaaggggatacagtgagctaatgatgtcaaggaggagtttcaggttattctcgtcagctccacaaatgggtgctttgtggtctctgcccgcgttacctttcctctcaatgtacctttgtgtgaactgggcagtggaggtgcctgctgcagttaccatggagttcaggctctgggcagctcagtcaggcaaaacacacaaacagccatcagcctgtgtgggctcagggcacctctggacaaaggcttgtggggcataaccttctttaccacagagagcccttagctatgctgatcagaccgtaagcgtttatgagaaacttagtttcctcctgtggctgaggaggggccagctttttcttcttttgcctgctgttttctctcccaatctatgatatgatatgacctggtttggggctgtctttggtgtttagaatatttgttttctgtcccaggatatttcttataagaacctaacttcaagagtagtgtgcgagtactgatctgaatttaaattaaaattggcttatattaggcagtcacagacaggaaaaataagagctatgcaaagaaagggggatttaaagtagtaggttctatcatctcaattcatttttttccatgaaatcccttcttccaagattcattccctctctcagacatgtgctagcatgggtattatcattgagaaagcacagctacagcaaagccacctgaatagcaatttgtgattggaagcattcttgagggatccctaatctagagtaatttatttgtgtaaggatcccaaatgtgttgcacctttcatgatacatttcttctctgaagagggtacgtggggtgtgtgtatttaaatccatcctatgtattactgattgtcctgtgtagaaagatggcaattattctgtctctttctccaagtttgagccacatctcagccacattgttagacagtgtacagagaacctatctttcctttttttttttttaaaggacaggattttgctgtgttgcccaggctagacttgaactcctgggctcaagtaatccacctcagcctgagtagctgagactacagcccatcttatttctttaaatcattcatctcaggcagagaacttttccctcaaacattctttttagaattagttcagtcattcctaaaacatccaaatgctagtcttccaccatgaaaaatagattgtcactggaaagaacagtagcaatttccataaggatgtgccttcactcacacgggacaggcggtggttatagagtcgggcaaaaccagcagtagagtatgaccagccaagccaatctgcttaataaaaagatggaagacagtaaggaaggaaagtagccactaagagtctgagtctgactgggctacagaataaagggtatttatggacagaatgtcattacatgcctatgggaataccaatcatatttggaagatttgcagattttttttcagagaggaaagactcaccttcctgtttttggttctcagtaggttcgtgtgtgttcctagaatcacagctctgactccaaatgactcaatttctcaattagaaaaagtagaagctttctaagcaacttggaagaaaacagtcataagtaagcaatttgttgattttactacagaagcaacaactgaagaggcagtgtttttactttcagactccgggattcccattctgtagtctctctgcttttaaaaaccctccttttgcaatagatgcccaaacagatgatgtttattacttgttatttacgtggcctcagacagtgtatgtattctcgatataacttgtagagtgtgaaatataagtttaactaccaaataaggtctcccagggttagatgactgcgggaagcctttgatcccaacccccaaggctttgtatatttgatcatttgtgatctaaccctggaagaaaaagagctcagaaaccactatgaaaaaatttgttcagtgttttctgtgttcccgtaggttctggagtctgaggatgcaaagatgaataagataaattctcagaatgtagttataatctcttgttttctggtatatgccatctttctttaacttctctaaaatattgggtatttgtcaaataaccacttttaacagttaccattactgagggcttatacattggtgttataaaagtgacttgattcagaaatcaatccattcagtaaagtactccttctctaaatttgctgttatgtctataaggaacagtttgacctgcccttctcctcacctcctcacctgccttccaacattgaatttggaaggagacgtgaaaattggacatttggttttgcccttgggctggaaactatcatataatcataagtttgagcctagaagtgatccttgtgatcttctcacctctttaaattcccacaacacaagagattaaaaacagaggtttcagctcttcatagtgcgttgtgaaatggctggccagagtgtaccaacaaagctgtcatcgggctcacagctcagagacatctgcatgtgatcatctgcatagtcctctcctctaacgggaaacacctcagatttgcatataaaaaagcaccctggtgctgaaatgaacccctttcttgaacatcaaagctgtctcccacagccttgggcagcagggtgcctcttagtggatgtgctgggtccaccctgagccctgacatgtggtggcagcattgccagttggtctgtgtgtctgtgtagcagggacgatttcccagaaagcaattttccttttgaaatacgtaattgttgagactaggcagtttcaaagtcagctgcatatagtagcaagtacaggactgtcttgtttttggtgtccttggaggtgctggggtgagggtttcagtgggatcatttactctcacatgttgtctgccttctgcttctgtggacactgctttgtacttaattcagacagactgtgaatacaccttttttataaatacctttcaaattcttggtaagatataattttgatagctgattgcagattttctgtatttgtcagattaataaagactgcatgaatcca

SEQ ID NO: 9920 - protein, 384 aa, Homo sapiens; identical to SEQ ID NO: 9918

SEQ ID NO: 9921 - DNA, 1883 bp, Homo sapiens
tttgtgatagcaggtgcagtttgagtactacagtaaacattcagtttcagaacttcttctcttacctgctaaaaccaaagagaaccttttttttatttttacttctgattgttgaacagtcttaaggcagcattaggaagactggcgatttgtgtggagaaatgatggcttgttgttgtctatgcatactttgtgtgtccagtgcttacctggaattttgtctttcccaacagcaacaatggtgtggttggtgaatatggcagaaggagacccggaagctcaaaggagagtatccaaaaattccaagtataatgcagaaagcacagaaagggagtcacaagacactgttgcagagaatgatgatggcgggttcagtgaggaatgggaagcccagagggacagtcatctagggcctcatcgctctacacctgagtcacgagctgctgtccaggaactttccagcagtatcctcgctggtgaagacccagaggaaaggggagtaaaacttggattgggagatttcattttctacagtgttctggttggtaaagcctcagcaacagccagtggagactggaacacaaccatagcctgtttcgtagccatattaattggtttgtgccttacattattactccttgccattttcaagaaagcattgccagctcttccaatctccatcacctttgggcttgttttctactttgccacagattatcttgtacagccttttatggaccaattagcattccatcaattttatatctagcatatttgcggttagaatcccatggatgtttcttctttgactataacaaaatctggggaggacaaaggtgattttcctgtgtccacatctaacaaagtcaagattcccggctggacttttgcagcttccttccaagtcttcctgaccaccttgcactattggactttggaaggaggtgcctatagaaaacgattttgaacatacttcatcgcagtggactgtgtccctcggtgcagaaactaccagatttgagggacgaggtcaaggagatatgataggcccggaagttgctgtgccccatcagcagcttgacgcgtggtcacaggacgatttcactgacactgcgaactctcaggactaccgttaccaagaggttaggtgaagtggtttaaaccaaacggaactcttcatcttaaactacacgttgaaaatcaacccaataattctgtattaactgaattctgaacttttcaggaggtactgtgaggaagagcaggcaccagcagcagaatggggaatggagaggtgggcaggggttccagcttccctttgattttttgctgcagactcatcctttttaaatgagacttgttttcccctctctttgagtcaagtcaaatatgtagattgcctttggcaattcttcttctcaagcactgacactcattaccgtctgtgattgccatttcttcccaaggccagtctgaacctgaggttgctttatcctaaaagttttaacctcaggttccaaattcagtaaattttggaaacagtacagctatttctcatcaattctctatcatgttgaagtcaaatttggattttccaccaaattctgaatttgtagacatacttgtacgctcacttgccccagatgcctcctctgtcctcattcttctctcccacacaagcagtctttttctacagccagtaaggcagctctgtcgtggtagcagatggtcccattattctagggtcttactctttgtatgatgaaaagaatgtgttatgaatcggtgctgtcagccctgctgtcagaccttcttccacagcaaatgagatgtatgcccaaagacggtagaattaaagaagagtaaaatggctgttgaagcac

SEQ ID NO: 9922 - protein, 195 aa, Homo sapiens [sequence omitted]

SEQ ID NO: 9923 - DNA, 5171 bp, Homo sapiens
tttgtgatagcaggtgcagtttgagtactacagtaaacattcagtttcagaacttcttctcttacctgctaaaaccaaagagaaccttttttttatttttacttctgattgttgaacagtcttaaggcagcattaggaagactggcgatttgtgtggagaaatgatggcttgttgttgtctatgcatactttgtgtgtccagtgcttacctggaattttgtctttcccaacagcaacaatggtgtggttggtgaatatggcagaaggagacccggaagctcaaaggagagtatccaaaaattccaagtataatgcagaaagcacagaaagggagtcacaagacactgttgcagagaatgatgatggcgggttcagtgaggaatgggaagcccagagggacagtcatctagggcctcatcgctctacacctgagtcacgagctgctgtccaggaactttccagcagtatcctcgctggtgaagacccagaggaaaggggagtaaaacttggattgggagatttcattttctacagtgttctggttggtaaagcctcagcaacagccagtggagactggaacacaaccatagcctgtttcgtagccatattaattggtttgtgccttacattattactccttgccattttcaagaaagcattgccagctcttccaatctccatcacctttgggcttgttttctactttgccacagattatcttgtacagccttttatggaccaattagcattccatcaattttatatctagcatatttgcggttagaatcccatggatgtttcttctttgactataacaaaatctggggaggacaaaggtgattttcctgtgtccacatctaacaaagtcaagattcccggctggacttttgcagcttccttccaagtcttcctgaccaccttgcactattggactttggaaggaggtgcctatagaaaacgattttgaacatacttcatcgcagtggactgtgtccctcggtgcagaaactaccagatttgagggacgaggtcaaggagatatgataggcccggaagttgctgtgccccatcagcagcttgacgcgtggtcacaggacgatttcactgacactgcgaactctcaggactaccgttaccaagaggttaggtgaagtggtttaaaccaaacggaactcttcatcttaaactacacgttgaaaatcaacccaataattctgtattaactgaattctgaacttttcaggaggtactgtgaggaagagcaggcaccagcagcagaatggggaatggagaggtgggcaggggttccagcttccctttgattttttgctgcagactcatcctttttaaatgagacttgttttcccctctctttgagtcaagtcaaatatgtagattgcctttggcaattcttcttctcaagcactgacactcattaccgtctgtgattgccatttcttcccaaggccagtctgaacctgaggttgctttatcctaaaagttttaacctcaggttccaaattcagtaaattttggaaacagtacagctatttctcatcaattctctatcatgttgaagtcaaatttggattttccaccaaattctgaatttgtagacatacttgtacgctcacttgccccagatgcctcctctgtcctcattcttctctcccacacaagcagtctttttctacagccagtaaggcagctctgtcgtggtagcagatggtcccattattctagggtcttactctttgtatgatgaaaagaatgtgttatgaatcggtgctgtcagccctgctgtcagaccttcttccacagcaaatgagatgtatgcccaaagacggtagaattaaagaagagtaaaatggctgttgaagcactttctgtcctggtattttgtttttgcttttgccacacagtagctcagaatttgaacaaatagccaaaagctggtggttgatgaattatgaactagttgtatcaacacaaagcaagagttggggaaagccatatttaacttggtgagctgtgggagaacctggtggcagaaggagaaccaactgccaaggggaaagagaaggggcctccagcagcgaaggggatacagtgagctaatgatgtcaaggaggagtttcaggttattctcgtcagctccacaaatgggtgctttgtggtctctgcccgcgttacctttcctctcaatgtacctttgtgtgaactgggcagtggaggtgcctgctgcagttaccatggagttcaggctctgggcagctcagtcaggcaaaacacacaaacagccatcagcctgtgtgggctcagggcacctctggacaaaggcttgtggggcataaccttctttaccacagagagcccttagctatgctgatcagaccgtaagcgtttatgagaaacttagtttcctcctgtggctgaggaggggccagctttttcttcttttgcctgctgttttctctcccaatctatgatatgatatgacctggtttggggctgtctttggtgtttagaatatttgttttctgtcccaggatatttcttataagaacctaacttcaagagtagtgtgcgagtactgatctgaatttaaattaaaattggcttatattaggcagtcacagacaggaaaaataagagctatgcaaagaaagggggatttaaagtagtaggttctatcatctcaattcatttttttccatgaaatcccttcttccaagattcattccctctctcagacatgtgctagcatgggtattatcattgagaaagcacagctacagcaaagccacctgaatagcaatttgtgattggaagcattcttgagggatccctaatctagagtaatttatttgtgtaaggatcccaaatgtgttgcacctttcatgatacatttcttctctgaagagggtacgtggggtgtgtgtatttaaatccatcctatgtattactgattgtcctgtgtagaaagatggcaattattctgtctctttctccaagtttgagccacatctcagccacattgttagacagtgtacagagaacctatctttcctttttttttttttaaaggacaggattttgctgtgttgcccaggctagacttgaactcctgggctcaagtaatccacctcagcctgagtagctgagactacagcccatcttatttctttaaatcattcatctcaggcagagaacttttccctcaaacattctttttagaattagttcagtcattcctaaaacatccaaatgctagtcttccaccatgaaaaatagattgtcactggaaagaacagtagcaatttccataaggatgtgccttcactcacacgggacaggcggtggttatagagtcgggcaaaaccagcagtagagtatgaccagccaagccaatctgcttaataaaaagatggaagacagtaaggaaggaaagtagccactaagagtctgagtctgactgggctacagaataaagggtatttatggacagaatgtcattacatgcctatgggaataccaatcatatttggaagatttgcagattttttttcagagaggaaagactcaccttcctgtttttggttctcagtaggttcgtgtgtgttcctagaatcacagctctgactccaaatgactcaatttctcaattagaaaaagtagaagctttctaagcaacttggaagaaaacagtcataagtaagcaatttgttgattttactacagaagcaacaactgaagaggcagtgtttttactttcagactccgggattcccattctgtagtctctctgcttttaaaaaccctccttttgcaatagatgcccaaacagatgatgtttattacttgttatttacgtggcctcagacagtgtatgtattctcgatataacttgtagagtgtgaaatataagtttaactaccaaataaggtctcccagggttagatgactgcgggaagcctttgatcccaacccccaaggctttgtatatttgatcatttgtgatctaaccctggaagaaaaagagctcagaaaccactatgaaaaaatttgttcagtgttttctgtgttcccgtaggttctggagtctgaggatgcaaagatgaataagataaattctcagaatgtagttataatctcttgttttctggtatatgccatctttctttaacttctctaaaatattgggtatttgtcaaataaccacttttaacagttaccattactgagggcttatacattggtgttataaaagtgacttgattcagaaatcaatccattcagtaaagtactccttctctaaatttgctgttatgtctataaggaacagtttgacctgcccttctcctcacctcctcacctgccttccaacattgaatttggaaggagacgtgaaaattggacatttggttttgcccttgggctggaaactatcatataatcataagtttgagcctagaagtgatccttgtgatcttctcacctctttaaattcccacaacacaagagattaaaaacagaggtttcagctcttcatagtgcgttgtgaaatggctggccagagtgtaccaacaaagctgtcatcgggctcacagctcagagacatctgcatgtgatcatctgcatagtcctctcctctaacgggaaacacctcagatttgcatataaaaaagcaccctggtgctgaaatgaacccctttcttgaacatcaaagctgtctcccacagccttgggcagcagggtgcctcttagtggatgtgctgggtccaccctgagccctgacatgtggtggcagcattgccagttggtctgtgtgtctgtgtagcagggacgatttcccagaaagcaattttccttttgaaatacgtaattgttgagactaggcagtttcaaagtcagctgcatatagtagcaagtacaggactgtcttgtttttggtgtccttggaggtgctggggtgagggtttcagtgggatcatttactctcacatgttgtctgccttctgcttctgtggacactgctttgtacttaattcagacagactgtgaatacaccttttttataaatacctttcaaattcttggtaagatataattttgatagctgattgcagattttctgtatttgtcagattaataaagactgcatgaatcca

SEQ ID NO: 9924 - protein, 195 aa, Homo sapiens [sequence omitted]

SEQ ID NO: 9925 - DNA, 806 bp, Homo sapiens
tggattcatgcagtctttattaatctgacaaatacagaaaatctgcaatcagctatcaaaattatatcttaccaagaatttgaaaggtatttataaaaaaggtgtattcacagtctgtctgaattaagtacaaagcagtgtccacagaagcagaaggcagacaacatgtgagagtaaatgatcccactgaaaccctcaccccagcacctccaaggacaccaaaaacaagacagtcctgtacttgctactatatgcagctgactttgaaactgcctagtctcaacaattacgtatttcaaaaggaaaattgctttctgggaaatcgtccctgctacacagacacacagaccaactggcaatgctgccaccacatgtcagggctcagggtggacccagcacatccactaagaggcaccctgctgcccaaggctgtgggagacagctttgatgttcaagaaaggggttcatttcagcaccagggtgcttttttatatgcaaatctgaggtgtttcccgttagaggagaggactatgcagatgatcacatgcagatgtctctgagctgtgagcccgatgacagctttgttggtacactctggccagccatttcacaacgcactatgaagagctgaaacctctgtttttaatctcttgtgttgtgggaatttaaagaggtgagaagatcacaaggatcacttctaggctcaaattatgactgttttcttccaagttgcttagaaagcttctactttttctaattgagaaattgagtcatttggagtcagagctgtgattctaggaacacac

SEQ ID NO: 9926 - protein, 102 aa, Homo sapiens
MQLTLKLPSLNNYVFQKENCFLGNRPCYTDTQTNWQCCHHMSGLRVDPAHPLRGTLLPKAVGDSFDVQERGSFQHQGAFLYANLRCFPLEERTMQMITCRCL

SEQ ID NO: 9927 - DNA, 1066 bp, Homo sapiens
aagagctcagaaaccactatgaaaaaatttgttcagtgttttctgtgttcccgtaggttctggagtctgaggatgcaaagatgaataagataaattctcagaatgtagttataatctcttgttttctggtatatgccatctttctttaacttctctaaaatattgggtatttgtcaaataaccacttttaacagttaccattactgagggcttatacattggtgttataaaagtgacttgattcagaaatcaatccattcagtaaagtactccttctctaaatttgctgttatgtctataaggaacagtttgacctgcccttctcctcacctcctcacctgccttccaacattgaatttggaaggagacgtgaaaattggacatttggttttgcccttgggctggaaactatcatataatcataagtttgagcctagaagtgatccttgtgatcttctcacctctttaaattcccacaacacaagagattaaaaacagaggtttcagctcttcatagtgcgttgtgaaatggctggccagagtgtaccaacaaagctgtcatcgggctcacagctcagagacatctgcatgtgatcatctgcatagtcctctcctctaacgggaaacacctcagatttgcatataaaaaagcaccctggtgctgaaatgaacccctttcttgaacatcaaagctgtctcccacagccttgggcagcagggtgcctcttagtggatgtgctgggtccaccctgagccctgacatgtggtggcagcattgccagttggtctgtgtgtctgtgtagcagggacgatttcccagaaagcaattttccttttgaaatacgtaattgttgagactaggcagtttcaaagtcagctgcatatacatttactctcacatgttgtctgccttctgcttctgtggacactgctttgtacttaattcagacagactgtgaatacaccttttttataaatacctttcaaattcttggtaagatataattttgatagctgattgcagattttctgtatttgtcagattaataaagactgcatgaatcca

SEQ ID NO: 9928 - protein, 66 aa, Homo sapiens
MSIRNSLTCPSPHLLTCLPTLNLEGDVKIGHLVLPLGWKLSYNHKFEPRSDPCDLLTSLNSHNTRD

SEQ ID NO: 9929 - DNA, 1815 bp, Homo sapiens
cgacggagcggccctggctgcagcctcccggcgccagcgaagacaggctgagatgcggctgctcctgctcgtgccgctgctgctggctccagcgcccgggtcctcggctcccaaggtgaggcggcagagtgacacctggggaccctggagccagtggagcccctgcagccggacctgtggagggggtgtcagcttccgggagcgcccctgctactcccagaggagagatggaggctccagctgcgtgggccccgcccggagccaccgctcttgtcgcacggagagctgccccgacggcgcccgggacttccgggccgagcagtgcgcggagttcgacggagcggagttccaggggcggcggtatcggtggctgccctactacagcgccccaaacaagtgtgaactgaactgcattcccaagtgctgggattacaggcatgagccaccacgcccagccatcaatgcattttttttattttttttttgagacagagtttcgcacttcttgcccaggctggagtacaatggtgcgatcttggctcactgcaacctccacctcctgggttcaagcgcttctccagcctcagcctcctgagtagctgggattacaggtatgtgccaccatgcctggctaattttgtatttttagtagagacggggtttctccatgttggtcagactggtcttgaactcccgacctcaggtaatccgcccgcctcggcctcccaaaatgctgggattagaggtgtgagccactgtgcccagcccatcaatgtgttttaaagctagctgtcagggttccacttaatttaaagctgggcagggagatgtgtaatgatttcaaagttaacacctgtttgttttctaaagggcatgccaagtcctgctgtatcagggaagtattctgtgctaaaatcagcgatggttcattgctctagtctctctcacccttctaggcagtgcatcagtcagctctaaatctggtgcagagggttaacagcataacccttgttggcaaaatggaatagatgttaagacctcaaatagggatttgggatgaaacagctgcagttagcactgttatctgagcatgaaagaactggaaacgctccttacgtcgagatgttggaccttgaagccctcctgaggccaacatgcaaatctggctgtgacggttcatctgacacctgtgtaaagctgaccagcctgctctgtacagtgacaatgaggagcccctctcttccttaagtaggaatctgtgaagcaaaatgtttgctgccaaagacaaatcagactgtcagtcattaaaaacagcattagcaggatgaggatagcaatggggaagggttgtgggcaatgcagtaacagggaaatggcttcagaaatggtttgagttggaagacaacattcttcatctctcaggacttctaattccttgatgctaaaagaagaggcatggattctatgagcttccaagtccctttccactttaaccttctacaaatctttcagaggactgcctagtagcaaaggttattcctggacacaggaaagacgggcattacagggaccaaagctctgaaaggtgacttttattaccaacacactggctggaaaagggacaaaccacatcacgggtgagtgatacttctcagtcttctctactcattcaacaaaggaaatgtgggctggggcagaggtcttttttcatttaatactggaaaaatattgaagagcatccatgttcacttatggctggttttgctatagaaattggaaaataaaggccacttttttgaaatccccagtttaatt

SEQ ID NO: 9930 - protein, 144 aa, Homo sapiens
MRLLLLVPLLLAPAPGSSAPKVRRQSDTWGPWSQWSPCSRTCGGGVSFRERPCYSQRRDGGSSCVGPARSHRSCRTESCPDGARDFRAEQCAEFDGAEFQGRRYRWLPYYSAPNKCELNCIPKCWDYRHEPPRPAINAFFLFFF

SEQ ID NO: 9931 - DNA, 5624 bp, Homo sapiens
atgcggctgctcctgctcgtgccgctgctgctggctccagcgcccgggtcctcggctcccaaggtgaggcggcagagtgacacctggggaccctggagccagtggagcccctgcagccggacctgtggagggggtgtcagcttccgggagcgcccctgctactcccagaggagagatggaggctccagctgcgtgggccccgcccggagccaccgctcttgtcgcacggagagctgccccgacggcgcccgggacttccgggccgagcagtgcgcggagttcgacggagcggagttccaggggcggcggtatcggtggctgccctactacagcgccccaaacaagtgtgaactgaactgcattcccaagggggagaacttctactacaagcacagggaggctgtggttgatgggacgccctgcgagcctggcaagagggatgtctgtgtggatggcagctgccgggttgtcggctgtgatcacgagctggactcgtccaagcaggaggacaagtgtctgcggtgtgggggtgacggcacgacctgctaccccgtcgcaggcacctttgacgctaatgacctcagccgaggctacaaccagatcctcatagttcccatgggtgccaccagcatcctcatcgacgaggctgctgccagcaggaacttcctggctgtgaagaatgttcgtggggaatactacctcaatgggcactggaccatcgaggcggcccgggccctgccagcagccagcaccatcctgcattacgagcggggtgctgagggggacctggcccctgagcgactccatgcccggggccccacctcggagcccctggtcatcgagctcatcagccaggagcccaaccccggtgtgcactatgagtaccacctgcccctgcgccgccccagccccggcttcagctggagccacggctcatggagtgactgcagcgcggagtgtggcggaggtcaccagtcccgcctggtgttctgcaccatcgaccatgaggcctaccccgaccacatgtgccagcgccagccacggccagctgaccggcgttcctgcaatcttcacccttgcccggagaccaagcggacctcttacctgcaccggcctggagcgtggcgccttgctggggcccagcgagtgtgtgggaacagctggaaggcagggccatgggcaccctgctcagcctcctgtggaggaggctcccagtcccgctccgtgtactgcatctcgtctgacggggccggcatccaggaggccgtggaggaggctgagtgtgccgggctgcctgggaagccccctgccattcaggcctgtaacctgcagcgctgtgcagcctggagcccggagccctggggagagtgttctgtcagttgtggcgttggcgtccggaagcggagcgttacttgccggggtgaaaggggttctttgctccataccgcagcgtgctccttggaagaccggccacctctgactgagccctgtgtgcatgaggactgccccctcctcagtgaccaggcctggcatgttggcacctggggtctatgctccaagagctgcagctcgggcactcggaggcgacaggtcatctgtgccattgggccgcccagccactgcgggagcctgcagcactccaagcctgtggatgtggagccttgtaacacgcagccctgtcatctcccccaggaggtccccagcatgcaggatgtgcacacccctgccagcaacccctggatgccgttgggccctcaggagtcccctgcctcagcagcccccataccagcaacccctgcggtcgggctcagggccccacgactgcagacacagtcctcacgggtgctgccccgatggccacacggcatctctcgggcctcagtggcaaggctgccctggggccccctgtcagcagagcaggtccacaacacccaccagccccaggcccagcagaatgagcccagtgagtgccggggctcccagtttggctgttgctatgacaacgtggccactgcagccggtcctcttggggaaggctgtgtgggccagcccagccatgcctaccccgtgcggtgcctgctgcccagtgcccatggctcttgcgcagactgggctgcccgctggtacttcgttgcctctgtgggccaatgtaaccgcttctggtatggcggctgccatggcaatgccaataactttgcctcggagcaagagtgcatgagcagctgccagggatctctccatgggccccgtcgtccccagcctggggcttctggaaggagcacccacacggatggtggcggcagcagtcctgcaggcgagcaggaacccagccagcacaggacaggggccgcggtgcagagaaagccctggccttctggtggtctctggcggcaagaccaacagcctgggccaggggaggccccccacacccaggcctttggagaatggccatgggggcaggagcttgggtccagggcccctggactgggtggagatgccggatcaccagcgccacccttccacagctcctcctacaggattagcttggcaggtgtggagccctcgttggtgcaggcagccctggggcagttggtgcggctctcctgctcagacgacactgccccggaatcccaggctgcctggcagaaagatggccagcccatctcctctgacaggcacaggctgcagttcgacggatccctgatcatccaccccctgcaggcagaggacgcgggcacctacagctgtggcagcacccggccaggccgcgactcccagaagatccaacttcgcatcatagggggtgacatggccgtgctgtctgaggctgagctgagccgcttccctcagcccagggacccagctcaggactttggccaagcgggggctgctgggcccctgggggccatcccctcttcacacccacagcctgcaaacaggctgcgtttggaccagaaccagccccgggtggtggatgccagtccaggccagcggatccggatgacctgccgtgccgaaggcttcccgcccccagccatcgagtggcagagagatgggcagcctgtctcttctcccagacaccagctgcagcctgatggctccctggtcattagccgagtggctgtagaagatggcggcttctacacctgtgtcgctttcaatgggcaggaccgagaccagcgatgggtccagctcagagttctgggggagctgacaatctcaggactgccccctactgtgacagtgccagagggtgatacggccaggctattgtgtgtggtagcaggagaaagtgtgaacatcaggtggtccaggaacgggctacctgtgcaggctgatggccaccgtgtccaccagtccccagatggcacgctgctcatttacaacttgcgggccagggatgagggctcctacacgtgcagtgcctaccaggggagccaggcagtcagccgcagcaccgaggtgaaggtggtctcaccagcacccaccgcccagcccagggaccctggcagggactgcgtcgaccagccagagctggccaactgtgatttgatcctgcaggcccagctttgtggcaatgagtattactccagcttctgctgtgccagctgttcacgtttccagcctcacgctcagcccatctggcagtagggatgaaggctagttccagccccagtccaaaatagttcatagggctagggagaaaggaagatggactcttggcttcctctctctggctggcaaagggagttatcttctggaatacattagctctttcaaaaacccacccagtgtttagcctcaacggcagccagttaccagcttctctctgtagccttcagcagtgtttgcatctctgacataaccacaggctgctgttttcaagaagagcaatctgtttggataagaaaaacctttactttacagcttccctttataatttgttacacaggaatagttaaatgcatttgtttgtttgttttttgagacagagtttcactcttgttgcccaggctggagggcaatggcgcgatctcagctcactgcaacctccgtctcctgggttcttgattctcctgtgtcagccttctgagtagctaggattacagatgcctatcaccatgcctgggtaatttttgtatttttagttgagatggggtttcaccatgttggccaggctggtctcgaacttctgacctcagatgatctgcccgcctcagcctcccaaagtgctgggattacaggcatgagccaccacgcccagccatcaatgcattttttttattttttttttgagacagagtttcgcacttcttgcccaggctggagtacaatggtgcgatcttggctcactgcaacctccacctcctgggttcaagcgcttctccagcctcagcctcctgagtagctgggattacaggtatgtgccaccatgcctggctaattttgtatttttagtagagacggggtttctccatgttggtcagactggtcttgaactcccgacctcaggtaatccgcccgcctcggcctcccaaaatgctgggattagaggtgtgagccactgtgcccagcccatcaatgtgttttaaagctagctgtcagggttccacttaatttaaagctgggcagggagatgtgtaatgatttcaaagttaacacctgtttgttttctaaagggcatgccaagtcctgctgtatcagggaagtattctgtgctaaaatcagcgatggttcattgctctagtctctctcacccttctaggcagtgcatcagtcagctctaaatctggtgcagagggttaacagcataacccttgttggcaaaatggaatagatgttaagacctcaaatagggatttgggatgaaacagctgcagttagcactgttatctgagcatgaaagaactggaaacgctccttacgtcgagatgttggaccttgaagccctcctgaggccaacatgcaaatctggctgtgacggttcatctgacacctgtgtaaagctgaccagcctgctctgtacagtgacaatgaggagcccctctcttccttaagtaggaatctgtgaagcaaaatgtttgctgccaaagacaaatcagactgtcagtcattaaaaacagcattagcaggatgaggatagcaatggggaagggttgtgggcaatgcagtaacagggaaatggcttcagaaatggtttgagttggaagacaacattcttcatctctcaggacttctaattccttgatgctaaaagaagaggcatggattctatgagcttccaagtccctttccactttaaccttctacaaatctttcagaggactgcctagtagcaaaggttattcctggacacaggaaagacgggcattacagggaccaaagctctgaaaggtgacttttattaccaacacactggctggaaaagggacaaaccacatcacgggtgagtgatacttctcagtcttctctactcattcaacaaaggaaatgtgggctggggcagaggtcttttttcatttaatactggaaaaatattgaagagcatccatgttcacttatggctggttttgctatagaaattggaaaataaaggccacttttttgaaatccccagtttaatt

SEQ ID NO: 9932 - protein, 1216 aa, Homo sapiens
MRLLLLVPLLLAPAPGSSAPKVRRQSDTWGPWSQWSPCSRTCGGGVSFRERPCYSQRRDGGSSCVGPARSHRSCRTESCPDGARDFRAEQCAEFDGAEFQGRRYRWLPYYSAPNKCELNCIPKGENFYYKHREAVVDGTPCEPGKRDVCVDGSCRVVGCDHELDSSKQEDKCLRCGGDGTTCYPVAGTFDANDLSRGYNQILIVPMGATSILIDEAAASRNFLAVKNVRGEYYLNGHWTIEAARALPAASTILHYERGAEGDLAPERLHARGPTSEPLVIELISQEPNPGVHYEYHLPLRRPSPGFSWSHGSWSDCSAECGGGHQSRLVFCTIDHEAYPDHMCQRQPRPADRRSCNLHPCPETKRTSYLHRPGAWRLAGAQRVCGNSWKAGPWAPCSASCGGGSQSRSVYCISSDGAGIQEAVEEAECAGLPGKPPAIQACNLQRCAAWSPEPWGECSVSCGVGVRKRSVTCRGERGSLLHTAACSLEDRPPLTEPCVHEDCPLLSDQAWHVGTWGLCSKSCSSGTRRRQVICAIGPPSHCGSLQHSKPVDVEPCNTQPCHLPQEVPSMQDVHTPASNPWMPLGPQESPASAAPIPATPAVGLRAPRLQTQSSRVLPRWPHGISRASVARLPWGPLSAEQVHNTHQPQAQQNEPSECRGSQFGCCYDNVATAAGPLGEGCVGQPSHAYPVRCLLPSAHGSCADWAARWYFVASVGQCNRFWYGGCHGNANNFASEQECMSSCQGSLHGPRRPQPGASGRSTHTDGGGSSPAGEQEPSQHRTGAAVQRKPWPSGGLWRQDQQPGPGEAPHTQAFGEWPWGQELGSRAPGLGGDAGSPAPPFHSSSYRISLAGVEPSLVQAALGQLVRLSCSDDTAPESQAAWQKDGQPISSDRHRLQFDGSLIIHPLQAEDAGTYSCGSTRPGRDSQKIQLRIIGGDMAVLSEAELSRFPQPRDPAQDFGQAGAAGPLGAIPSSHPQPANRLRLDQNQPRVVDASPGQRIRMTCRAEGFPPPAIEWQRDGQPVSSPRHQLQPDGSLVISRVAVEDGGFYTCVAFNGQDRDQRWVQLRVLGELTISGLPPTVTVPEGDTARLLCVVAGESVNIRWSRNGLPVQADGHRVHQSPDGTLLIYNLRARDEGSYTCSAYQGSQAVSRSTEVKVVSPAPTAQPRDPGRDCVDQPELANCDLILQAQLCGNEYYSSFCCASCSRFQPHAQPIWQ

SEQ ID NO: 9933 - DNA, 5787 bp, Homo sapiens
atgcggctgctcctgctcgtgccgctgctgctggctccagcgcccgggtcctcggctcccaaggtgaggcggcagagtgacacctggggaccctggagccagtggagcccctgcagccggacctgtggagggggtgtcagcttccgggagcgcccctgctactcccagaggagagatggaggctccagctgcgtgggccccgcccggagccaccgctcttgtcgcacggagagctgccccgacggcgcccgggacttccgggccgagcagtgcgcggagttcgacggagcggagttccaggggcggcggtatcggtggctgccctactacagcgccccaaacaagtgtgaactgaactgcattcccaagggggagaacttctactacaagcacagggaggctgtggttgatgggacgccctgcgagcctggcaagagggatgtctgtgtggatggcagctgccgggttgtcggctgtgatcacgagctggactcgtccaagcaggaggacaagtgtctgcggtgtgggggtgacggcacgacctgctaccccgtcgcaggcacctttgacgctaatgacctcagccgaggctacaaccagatcctcatagttcccatgggtgccaccagcatcctcatcgacgaggctgctgccagcaggaacttcctggctgtgaagaatgttcgtggggaatactacctcaatgggcactggaccatcgaggcggcccgggccctgccagcagccagcaccatcctgcattacgagcggggtgctgagggggacctggcccctgagcgactccatgcccggggccccacctcggagcccctggtcatcgagctcatcagccaggagcccaaccccggtgtgcactatgagtaccacctgcccctgcgccgccccagccccggcttcagctggagccacggctcatggagtgactgcagcgcggagtgtggcggaggtcaccagtcccgcctggtgttctgcaccatcgaccatgaggcctaccccgaccacatgtgccagcgccagccacggccagctgaccggcgttcctgcaatcttcacccttgcccggagaccaagcggacctcttacctgcaccggcctggagcgtggcgccttgctggggcccagcgagtgtgtgggaacagctggaaggcagggccatgggcaccctgctcagcctcctgtggaggaggctcccagtcccgctccgtgtactgcatctcgtctgacggggccggcatccaggaggccgtggaggaggctgagtgtgccgggctgcctgggaagccccctgccattcaggcctgtaacctgcagcgctgtgcagcctggagcccggagccctggggagagtgttctgtcagttgtggcgttggcgtccggaagcggagcgttacttgccggggtgaaaggggttctttgctccataccgcagcgtgctccttggaagaccggccacctctgactgagccctgtgtgcatgaggactgccccctcctcagtgaccaggcctggcatgttggcacctggggtctatgctccaagagctgcagctcgggcactcggaggcgacaggtcatctgtgccattgggccgcccagccactgcgggagcctgcagcactccaagcctgtggatgtggagccttgtaacacgcagccctgtcatctcccccaggaggtccccagcatgcaggatgtgcacacccctgccagcaacccctggatgccgttgggccctcaggagtcccctgcctcagcagcccccataccagcaacccctgcggtcgggctcagggccccacgactgcagacacagtcctcacgggtgctgccccgatggccacacggcatctctcgggcctcagtggcaaggctgccctggggccccctgtcagcagagcaggtccacaacacccaccagccccaggcccagcagaatgagcccagtgagtgccggggctcccagtttggctgttgctatgacaacgtggccactgcagccggtcctcttggggaaggctgtgtgggccagcccagccatgcctaccccgtgcggtgcctgctgcccagtgcccatggctcttgcgcagactgggctgcccgctggtacttcgttgcctctgtgggccaatgtaaccgcttctggtatggcggctgccatggcaatgccaataactttgcctcggagcaagagtgcatgagcagctgccagggatctctccatgggccccgtcgtccccagcctggggcttctggaaggagcacccacacggatggtggcggcagcagtcctgcaggcgagcaggaacccagccagcacaggacaggggccgcggtgcagagaaagccctggccttctggtggtctctggcggcaagaccaacagcctgggccaggggaggccccccacacccaggcctttggagaatggccatgggggcaggagcttgggtccagggcccctggactgggtggagatgccggatcaccagcgccacccttccacagctcctcctacaggattagcttggcaggtgtggagccctcgttggtgcaggcagccctggggcagttggtgcggctctcctgctcagacgacactgccccggaatcccaggctgcctggcagaaagatggccagcccatctcctctgacaggcacaggctgcagttcgacggatccctgatcatccaccccctgcaggcagaggacgcgggcacctacagctgtggcagcacccggccaggccgcgactcccagaagatccaacttcgcatcatagggggtgacatggccgtgctgtctgaggctgagctgagccgcttccctcagcccagggacccagctcaggactttggccaagcgggggctgctgggcccctgggggccatcccctcttcacacccacagcctgcaaacaggctgcgtttggaccagaaccagccccgggtggtggatgccagtccaggccagcggatccggatgacctgccgtgccgaaggcttcccgcccccagccatcgagtggcagagagatgggcagcctgtctcttctcccagacaccagctgcagcctgatggctccctggtcattagccgagtggctgtagaagatggcggcttctacacctgtgtcgctttcaatgggcaggaccgagaccagcgatgggtccagctcagagttctgggggagctgacaatctcaggactgccccctactgtgacagtgccagagggtgatacggccaggctattgtgtgtggtagcaggagaaagtgtgaacatcaggtggtccaggaacgggctacctgtgcaggctgatggccaccgtgtccaccagtccccagatggcacgctgctcatttacaacttgcgggccagggatgagggctcctacacgtgcagtgcctaccaggggagccaggcagtcagccgcagcaccgaggtgaaggtggtctcaccagcacccaccgcccagcccagggaccctggcagggactgcgtcgaccagccagagctggccaactgtgatttgatcctgcaggcccagctttgtggcaatgagtattactccagcttctgctgtgccagctgttcacgtttccagcctcacgctcagcccatctggcagtagggatgaaggctagttccagccccagtccaaaatagttcatagggctagggagaaaggaagatggactcttggcttcctctctctggctggcaaagggagttatcttctggaatacattagctctttcaaaaacccacccagtgtttagcctcaacggcagccagttaccagcttctctctgtagccttcagcagtgtttgcatctctgacataaccacaggctgctgttttcaagaagagcaatctgtttggataagaaaaacctttactttacagcttccctttataatttgttacacaggaatagttaaatgcatttgtttgtttgttttttgagacagagtttcactcttgttgcccaggctggagggcaatggcgcgatctcagctcactgcaacctccgtctcctgggttcttgattctcctgtgtcagccttctgagtagctaggattacagatgcctatcaccatgcctgggtaatttttgtatttttagttgagatggggtttcaccatgttggccaggctggtctcgaacttctgacctcagatgatctgcccgcctcagcctcccaaagtgctgggattacaggcatgagccaccacgcccagccatcaatgcattttttttattttttttttgagacagagtttcgcacttcttgcccaggctggagtacaatggtgcgatcttggctcactgcaacctccacctcctgggttcaagcgcttctccagcctcagcctcctgagtagctgggattacaggtatgtgccaccatgcctggctaattttgtatttttagtagagacggggtttctccatgttggtcagactggtcttgaactcccgacctcaggtaatccgcccgcctcggcctcccaaaatgctgggattagaggtgtgagccactgtgcccagcccatcaatgtgttttaaagctagctgtcagggttccacttaatttaaagctgggcagggagatgtgtaatgatttcaaagttaacacctgtttgttttctaaagggcatgccaagtcctgctgtatcagggaagtattctgtgctaaaatcagcgatggttcattgctctagtctctctcacccttctaggcagtgcatcagtcagctctaaatctggtgcagagggttaacagcataacccttgttggcaaaatggaatagatgttaagacctcaaatagggatttgggatgaaacagctgcagttagcactgttatctgagcatgaaagaactggaaacgctccttacgtcgagatgttggaccttgaagccctcctgaggccaacatgcaaatctggctgtgacggttcatctgacacctgtgtaaagctgaccagcctgctctgtacagtgacaatgaggagcccctctcttccttaagtaggaatctgtgaagcaaaatgtttgctgccaaagacaaatcagactgtcagtcattaaaaacagcattagcaggatgaggatagcaatggggaagggttgtgggcaatgcagtaacagggaaatggcttcagaaatggtttgagttggaagacaacattcttcatctctcaggacttctaattccttgatgctaaaagaagaggcatggattctatgagcttccaagtccctttccactttaaccttctacaaatctttcagaggactgcctagtagcaaaggttattcctggacacaggaaagacgggcattacagggaccaaagctctgaaaggtgacttttattaccaacacactggctggaaaagggacaaaccacatcacgggtgagtgatacttctcagtcttctctactcattcaacaaaggaaatgtgggctggggcagaggtcttttttcatttaatactggaaaaatattgaagagcatccatgttcacttatggctggttttgctatagaaattggaaaataaaggccacttttttgaaatccccagtttaattaaaccagattttggcctattggtataaacacatcagaaggtaagtttgaggttagctagcagctaactagttctaatagaaccagtcacagaatagtgggctaagattagaggtaaaactcattctaggccagtggttctcaactttaccatattgcgagctt

SEQ ID NO: 9934 - protein, 1216 aa, Homo sapiens; identical to SEQ ID NO: 9932

SEQ ID NO: 9935 - DNA, 1920 bp, Homo sapiens
ctgctcctgctcgtgccgctgctgctggctccagcgcccgggtcctcggctcccaaggtgaggcggcagagtgacacctggggaccctggagccagtggagcccctgcagccggacctgtggagggggtgtcagcttccgggagcgcccctgctactcccagaggagagatggaggctccagctgcgtgggccccgcccggagccaccgctcttgtcgcacggagagctgccccgacggcgcccgggacttccgggccgagcagtgcgcggagttcgacggagcggagttccaggggcggcggtatcggtggctgccctactacagcgccccaaacaagtgtgaactgaactgcattcccaagtgctgggattacaggcatgagccaccacgcccagccatcaatgcattttttttattttttttttgagacagagtttcgcacttcttgcccaggctggagtacaatggtgcgatcttggctcactgcaacctccacctcctgggttcaagcgcttctccagcctcagcctcctgagtagctgggattacaggtatgtgccaccatgcctggctaattttgtatttttagtagagacggggtttctccatgttggtcagactggtcttgaactcccgacctcaggtaatccgcccgcctcggcctcccaaaatgctgggattagaggtgtgagccactgtgcccagcccatcaatgtgttttaaagctagctgtcagggttccacttaatttaaagctgggcagggagatgtgtaatgatttcaaagttaacacctgtttgttttctaaagggcatgccaagtcctgctgtatcagggaagtattctgtgctaaaatcagcgatggttcattgctctagtctctctcacccttctaggcagtgcatcagtcagctctaaatctggtgcagagggttaacagcataacccttgttggcaaaatggaatagatgttaagacctcaaatagggatttgggatgaaacagctgcagttagcactgttatctgagcatgaaagaactggaaacgctccttacgtcgagatgttggaccttgaagccctcctgaggccaacatgcaaatctggctgtgacggttcatctgacacctgtgtaaagctgaccagcctgctctgtacagtgacaatgaggagcccctctcttccttaagtaggaatctgtgaagcaaaatgtttgctgccaaagacaaatcagactgtcagtcattaaaaacagcattagcaggatgaggatagcaatggggaagggttgtgggcaatgcagtaacagggaaatggcttcagaaatggtttgagttggaagacaacattcttcatctctcaggacttctaattccttgatgctaaaagaagaggcatggattctatgagcttccaagtccctttccactttaaccttctacaaatctttcagaggactgcctagtagcaaaggttattcctggacacaggaaagacgggcattacagggaccaaagctctgaaaggtgacttttattaccaacacactggctggaaaagggacaaaccacatcacgggtgagtgatacttctcagtcttctctactcattcaacaaaggaaatgtgggctggggcagaggtcttttttcatttaatactggaaaaatattgaagagcatccatgttcacttatggctggttttgctatagaaattggaaaataaaggccacttttttgaaatccccagtttaattaaaccagattttggcctattggtataaacacatcagaaggtaagtttgaggttagctagcagctaactagttctaatagaaccagtcacagaatagtgggctaagattagaggtaaaactcattctaggccagtggttctcaactttaccatattgcgagctt

SEQ ID NO: 9936 - protein, 59 aa, Homo sapiens
MEAPAAWAPPGATALVARRAAPTAPGTSGPSSARSSTERSSRGGGIGGCPTTAPQTSVN

SEQ ID NO: 9937 - DNA, 1682 bp, Homo sapiens
cccttgcctgccccatcggagccgccggaggtggagtccgccccccggacccccgaactcctgtgcgtgcccctccatggtgctctaggctgtggagggcaaggccagtccccgggagcagggtgaggaaggggcccccacgcagccctgctgtggattggcgggaggaccccaggctgggccaacccagcagcccgcggccaggagcgggcatcccaatggggaaatcggccaggaggggctggggaagctggtgccttcgcccgcgccccgtgagctttacctccgtgcgacaagagcggtggctccgggcggggcccacgcagctggagcctccatctctcctgcgggaccagagcaccgggaagacctgaccgagacccaacgtccctgcccccgttctggggctctctgcaggccccaacttctgcgggactctccagtgggagcagcaagggttctcaggaacaacccctatacaaaccgggacagaggcacctcactactccttctgtgccccaccttctccactgaccctgccggagtgcagcacacacagcaagcatttaataaatcgcttgaagtggggaacatctgtactcggtaaagaaaccacaggaattgggaactgccggttgaagattatttaccagttccagcaaaattgactgcacctgccatactgcaggccggtgcagcatcaggagctggagaccaggggcaacaggcagcacgcgtgctccagctcagagtggaaggccctgggaaatggtttgatttcctgcgctgaactgatgctgcttccagaatgaatctgctccttggtgggttctgctgatgtggccagtgctagcctaggccacgaccacctagcccaccacccagaaggcagcatcccctgctcctgctttaacaagctggcccattttcatctctcctacctctgggagtagcaggggcgctcccggaagctgacaccccctccacaggtccggctgcaggggctccactggctccagggtccccaggtgtcactctgccgcctcaccttgggagcctgcagaagacaggaccatgcatcagcattgcccactcacagcctgagcccagaggcccctccaaagatgctctgcctaaaaccctcccctacccatcaaggagtctgggattctcccttccagggcccacctttaggactcagcaacactgccgggcaccccaaaacatattccttttcagaattagcctgctttcctcataaggagctgagagccaggcctggagggcgggagcaggagcagctgggaagagtttggagtttcaggggccactggaggggagggaccctacagccaggggcagtttgagggtccaggcatttgtaggttaaccgtgatgtaggggaggggggcctaaaagaaaataaagggaagcaacgtggggggatcctgctaatctggccgagactcccaggagtaccccaatattcatcccctccttctcccattgtgagagaatgcttgaaaacttgactcagctgggtacctggctgcccaaaatttaaaaaaaaaatacatttcctggactgcctgcagctaactgtggctacatcacttagttctcatcagtgagatgtaaatacaagtgttgggcagctgccgcaaataatctcctcaagagag

SEQ ID NO: 9938 - protein, 80 aa, Homo sapiens
MLCLKPSPTHQGVWDSPFQGPPLGLSNTAGHPKTYSFSELACFPHKELRARPGGREQEQLGRVWSFRGHWRGGTLQPGAV

SEQ ID NO: 9939 - DNA, 487 bp, Homo sapiens
gggatttttcttcgacttgatccttagaggtgcaacagattcatggagacggtcccttctcctggggatggggcggggatctgtgctctgcggggcctgctgcagggctttctgacccatgctttcctgttgctagggtaagccttgggtcttggggaggggcatcatcaacctcaggatctcagtcttgccttcctgcccaccccagccccaaacaagtgtgaactgaactgcattcccaagggggagaacttctactacaagcacagggaggctgtggttgatgggacgccctgcgagcctggcaagagggatgtctgtgtggatggcagctgccgggttgtcggctgtgatcacgagctggactcgtccaagcaggaggacaagtgtctgcggtgtgggggtgacggcacgacctgctaccccgtcgcaggcacctttgacgctaatgacctcagccgaggtgggggtggttccgacaaggggc

SEQ ID NO: 9940 - protein, 67 aa, Homo sapiens
MGRPASLARGMSVWMAAAGLSAVITSWTRPSRRTSVCGVGVTARPATPSQAPLTLMTSAEVGVVPTR

SEQ ID NO: 9941 - DNA, 2401 bp, Homo sapiens
cgtggctcctgggggcaaggccgagcttctgctgacagccttgtccttgcagtgttctgtcagttgtggcgttggcgtccggaagcggagcgttacttgccggggtgaaaggggttctttgctccataccgcagcgtgctccttggaagaccggccacctctgactgagccctgtgtgcatgaggactgccccctcctcagtgaccaggcctggcatgttggcacctggggtctagtgagtgctctccacccccacacctgctgcctgaccctggtctctggcaggtggctgcacccgagcgccgtccttggacctgacacgcgccactgggcaccttcccctgcctctctccatgtgggtccccgcccccagcctcgccctcagcatctctctctctcccactcgtgggcctcagtgctccaagagctgcagctcgggcactcggaggcgacaggtcatctgtgccattgggccgcccagccactgcgggagcctgcagcactccaagcctgtggatgtggagccttgtaacacgcagccctgtcatctcccccagggtaaggacaggagggcagggaggagtccggcctctgacctctctcccactcgctacaaacccagcaagcatgtcctgcctcggggcctctgcctgcactgtgtcatccctctggaccccacttctcccatgtctccccccgctgaaccctttgccatctctaaggcccacctggtgtgcagcccaccaggcagccctgctttcctccactcagcggtagcatgcccctgcccctctggcccccatagcatgctgtcatttctgtgggacccttagattcatttccttgtgctgctgtggttgtatacggcttgtcagacctacccactataagcttcttgaggactgggtccccaacttccatattcctctttatacccccatagaacttacctgacacagttaggtactcagtgaatgtctgttgaatgactgagtgactgactgtgtgctgagggaaggaggcagtccaggaaggagtgtctccacatgccacttctgcctctgtcttcttcccttcatccccatcccactgtgaaaggagcctcacaagcatgagggcctgctggagaaagggcactgaggccagtgtttgcgtggtgtgaggatgccacattgaggaagggtgtgggttgtggtgagctggggatgggggtgggtgggtagcctcccaatactgcagggaggcatgtttggccttgactcactcgtgatggggactctatgagctgtagggaccttgagatgaaggaaggcagaatttctatgagacatgtgacaggtgtggctaagaaccagtggcctcagagtcaacagcaggcttgggttccgatccactccgttgctgaccagttgtgtggccttgggcaagtgccccacctctctgattctcagtttgcccatctgcacagtggggttaaaaagagcgactttccagaccgtggtggtcatgcagcacaacgcctgaccgcatggggtgcttgctagctaagcagagggtggaaggggtggtggtgaggccttgtgggggagctcggccatccggagggcccctggtgcctcagctggggcctggtccttggggctcaccagcaggagagccttggactcccaggggtccagctctccatggagccagtctgttccccagggccttgttggcttctaaaagaggtgatcttaagcctgtcccagggactagcaggacccatatagaaaggaagaaaaagggccaggtgaggattaatcccatgctgggattgcgggcgggagcccgtgcttcgctcattatctagtgtctttctatccctttgtctattcatccaatttttttaaatatggaatttttttatggaggtgaaatttacattcagttaacccttttaaagtgtacaggttggtggtatttagcgcattatttcaatctctttgattatagacatcctagtgggtgggaagcaggacctcattgtggttttgatttgcatttccctgatgactaatgatgttgagtatctttttacgtgtttgttggccatttgcatatcatctttggagaaatgcgtaagttctttacccactttttaattggattgtttgcctttcatcagtccaattttttaaaaaagtatgttctgttttttgttttatgtggctgggatcataacacgtgcacattttatagctggtactttttgctgaacatgtaagattagcatttttcatgctaggtgcagtggctcacacccataatcccagcattttgggaggctgagtcaggaggatcacttgagcccaggagtttgagacaagcctgggcaatatagaaagaccctatctctaaa

SEQ ID NO: 9942 - protein, 107 aa, Homo sapiens
MGCLLAKQRVEGVVVRPCGGARPSGGPLVPQLGPGPWGSPAGEPWTPRGPALHGASLFPRALLASKRGDLKPVPGTSRTHIERKKKGQVRINPMLGLRAGARASLII

SEQ ID NO: 9943 - DNA, 4327 bp, Homo sapiens
gagtcccctgcctcaggtgagagcctggtcccgtcccccactcagagccctgtagtttttgtgtctgagtggatggtacatgggggtgtgggggtcacagttgggtgcagccatggtggaagggagaatggtccaggggacggaggaaggtgggtccaacgtggacaggggtggaggggaggagccaggtggacgcactgtgtgtcttttgcttcttctttctagactccagaggccagtggtgggcagcccaggaacacccctcagccaggggtgaccacaggggagaacgaggtgaccccaggggcgaccaaggcacccacctgtcagccctgggccccgctccctctctgcagcagcccccataccagcaacccctgcggtcgggctcagggccccacgactgcagacacagtcctcacgggtgctgccccgatggccacacggcatctctcgggcctcagtggcaaggctgccctggggccccctgtcagcagagcaggtacgggtgctgccctgacagggtatctgtcgctgaggggccccatcacgctggctgcacaaagtcgtatggtggtgacagcaccgggggcatgcccaggtcaagggcagtggcttctacagtccacaacacccaccagccccaggcccagcagaatgagcccagtgagtgccggggctcccagtttggctgttgctatgacaacgtggccactgcagccggtcctcttggggaaggctgtgtgggccagcccagccatgcctaccccgtgcggtgcctgctgcccagtgcccatggctcttgcgcagactgggctgcccgctggtacttcgttgcctctgtgggccaatgtaaccgcttctggtatggcggctgccatggcaatgccaataactttgcctcggagcaagagtgcatgagcagctgccagggatctctccatgggccccgtcgtccccagcctggggcttctggaaggagcacccacacggatggtggcggcagcagtcctgcaggcgagcaggaacccagccagcacaggacaggggccgcggtgcagagaaagccctggccttctggtggtctctggcggcaagaccaacagcctgggccaggggaggccccccacacccaggcctttggagaatggccatgggggcaggagcttgggtccagggcccctggactgggtggagatgccggatcaccagcgccacccttccacagctcctcctacaggattagcttggcaggtgtggagccctcgttggtgcaggcagccctggggcagttggtgcggctctcctgctcagacgacactgccccggaatcccaggctgcctggcagaaagatggccagcccatctcctctgacaggcacaggctgcagttcgacggatccctgatcatccaccccctgcaggcagaggacgcgggcacctacagctgtggcagcacccggccaggccgcgactcccagaagatccaacttcgcatcatagggggtgacatggccgtgctgtctgaggctgagctgagccgcttccctcagcccagggacccagctcaggactttggccaagcgggggctgctgggcccctgggggccatcccctcttcacacccacagcctgcaaacaggctgcgtttggaccagaaccagccccgggtggtggatgccagtccaggccagcggatccggatgacctgccgtgccgaaggcttcccgcccccagccatcgagtggcagagagatgggcagcctgtctcttctcccagacaccagctgcagcctgatggctccctggtcattagccgagtggctgtagaagatggcggcttctacacctgtgtcgctttcaatgggcaggaccgagaccagcgatgggtccagctcagagttctgggggagctgacaatctcaggactgccccctactgtgacagtgccagagggtgatacggccaggctattgtgtgtggtagcaggagaaagtgtgaacatcaggtggtccaggaacgggctacctgtgcaggctgatggccaccgtgtccaccagtccccagatggcacgctgctcatttacaacttgcgggccagggatgagggctcctacacgtgcagtgcctaccaggggagccaggcagtcagccgcagcaccgaggtgaaggtggtctcaccagcacccaccgcccagcccagggaccctggcagggactgcgtcgaccagccagagctggccaactgtgatttgatcctgcaggcccagctttgtggcaatgagtattactccagcttctgctgtgccagctgttcacgtttccagcctcacgctcagcccatctggcagtagggatgaaggctagttccagccccagtccaaaatagttcatagggctagggagaaaggaagatggactcttggcttcctctctctggctggcaaagggagttatcttctggaatacattagctctttcaaaaacccacccagtgtttagcctcaacggcagccagttaccagcttctctctgtagccttcagcagtgtttgcatctctgacataaccacaggctgctgttttcaagaagagcaatctgtttggataagaaaaacctttactttacagcttccctttataatttgttacacaggaatagttaaatgcatttgtttgtttgttttttgagacagagtttcactcttgttgcccaggctggagggcaatggcgcgatctcagctcactgcaacctccgtctcctgggttcttgattctcctgtgtcagccttctgagtagctaggattacagatgcctatcaccatgcctgggtaatttttgtatttttagttgagatggggtttcaccatgttggccaggctggtctcgaacttctgacctcagatgatctgcccgcctcagcctcccaaagtgctgggattacaggcatgagccaccacgcccagccatcaatgcattttttttattttttttttgagacagagtttcgcacttcttgcccaggctggagtacaatggtgcgatcttggctcactgcaacctccacctcctgggttcaagcgcttctccagcctcagcctcctgagtagctgggattacaggtatgtgccaccatgcctggctaattttgtatttttagtagagacggggtttctccatgttggtcagactggtcttgaactcccgacctcaggtaatccgcccgcctcggcctcccaaaatgctgggattagaggtgtgagccactgtgcccagcccatcaatgtgttttaaagctagctgtcagggttccacttaatttaaagctgggcagggagatgtgtaatgatttcaaagttaacacctgtttgttttctaaagggcatgccaagtcctgctgtatcagggaagtattctgtgctaaaatcagcgatggttcattgctctagtctctctcacccttctaggcagtgcatcagtcagctctaaatctggtgcagagggttaacagcataacccttgttggcaaaatggaatagatgttaagacctcaaatagggatttgggatgaaacagctgcagttagcactgttatctgagcatgaaagaactggaaacgctccttacgtcgagatgttggaccttgaagccctcctgaggccaacatgcaaatctggctgtgacggttcatctgacacctgtgtaaagctgaccagcctgctctgtacagtgacaatgaggagcccctctcttccttaagtaggaatctgtgaagcaaaatgtttgctgccaaagacaaatcagactgtcagtcattaaaaacagcattagcaggatgaggatagcaatggggaagggttgtgggcaatgcagtaacagggaaatggcttcagaaatggtttgagttggaagacaacattcttcatctctcaggacttctaattccttgatgctaaaagaagaggcatggattctatgagcttccaagtccctttccactttaaccttctacaaatctttcagaggactgcctagtagcaaaggttattcctggacacaggaaagacgggcattacagggaccaaagctctgaaaggtgacttttattaccaacacactggctggaaaagggacaaaccacatcacgggtgagtgatacttctcagtcttctctactcattcaacaaaggaaatgtgggctggggcagaggtcttttttcatttaatactggaaaaatattgaagagcatccatgttcacttatggctggttttgctatagaaattggaaaataaaggccacttttttgaaatccccagtttaatt

SEQ ID NO: 9944 - protein, 586 aa, Homo sapiens
MPRSRAVASTVHNTHQPQAQQNEPSECRGSQFGCCYDNVATAAGPLGEGCVGQPSHAYPVRCLLPSAHGSCADWAARWYFVASVGQCNRFWYGGCHGNANNFASEQECMSSCQGSLHGPRRPQPGASGRSTHTDGGGSSPAGEQEPSQHRTGAAVQRKPWPSGGLWRQDQQPGPGEAPHTQAFGEWPWGQELGSRAPGLGGDAGSPAPPFHSSSYRISLAGVEPSLVQAALGQLVRLSCSDDTAPESQAAWQKDGQPISSDRHRLQFDGSLIIHPLQAEDAGTYSCGSTRPGRDSQKIQLRIIGGDMAVLSEAELSRFPQPRDPAQDFGQAGAAGPLGAIPSSHPQPANRLRLDQNQPRVVDASPGQRIRMTCRAEGFPPPAIEWQRDGQPVSSPRHQLQPDGSLVISRVAVEDGGFYTCVAFNGQDRDQRWVQLRVLGELTISGLPPTVTVPEGDTARLLCVVAGESVNIRWSRNGLPVQADGHRVHQSPDGTLLIYNLRARDEGSYTCSAYQGSQAVSRSTEVKVVSPAPTAQPRDPGRDCVDQPELANCDLILQAQLCGNEYYSSFCCASCSRFQPHAQPIWQ

SEQ ID NO: 9945 - DNA, 4682 bp, Homo sapiens
ggcagggaaggccaaaggtccaagggagccggcccagggagccctggccctgacctcccagaggctctagctctgtgggtgaaggctgctgtggcaccagccgggggcaggtctgcacagtggacagactctggtggaagcatcctggatcccagggccaggtcaggcccccagacaggggtgtagacatgctttataagtggggaagggcctgcttcctgagtcggaggctgagaggatggagggtgcagctttagtactgggcacctcagtgacttatatcacacccatgccctgcagcctaccccgtgcggtgcctgctgcccagtgcccatggctcttgcgcagactgggctgcccgctggtacttcgttgcctctgtgggccaatgtaaccgcttctggtatggcggctgccatggcaatgccaataactttgcctcggagcaagagtgcatgagcagctgccagggatctctccatgggccccgtcgtccccagcctggggcttctggaaggagcacccacacggatggtggcggcagcagtcctgcaggcgagcaggaacccagccagcacaggacaggggccgcggtgcagagaaagccctggccttctggtggtctctggcggcaagaccaacagcctgggccaggggaggccccccacacccaggcctttggagaatggccatgggggcaggagcttgggtccagggcccctggactgggtggagatgccggatcaccagcgccacccttccacagctcctcctacaggtgaggcccaccttccccaggtgagggggttaggacgcccagacaaggagcatgccagttggagctaaacccctgaagtcagccggccctccctccccatccctaacttctgtttctcccgagagccctgcctggtgggccttgttgccatcattctacagatggagaagctggggcttcagagacttgaggctactctgatgtctaatagacatctgtgcagatggtggctccggggttctccatcagatctcgccagtataccccggggcctgtctggctggaaaagtttattggcttcgtgacctttggcaagtcacccaacttctccaagcctcagtttcttgacctgtaaaatggtggcattaccttctgccctgtatacctcacaggtgtgggttctggtcaagatgactcctgggactggatcatattaatgaaggatttgggaaggttaaaaacaaaattaaaagcgttgtgttccacatgggtcgagcgtgtagtttagcccccacatgaacctggtgtgtgccgtccctcccgacctctccccaccccttgggctttgcacctaccttgttgctgctacaagaacaggttgaggcagtgatgcttgggggagccgggggcaggttggggagggtagattcctgaatccatgggcttctggggctctgcctcccatagggaccctctagccccaaaagtgcctgtgacaggatgggccccaagctgtctgtcatggaacacactgcttagggtggttctggtcctggcgctcatgccagtcagcagatctcacttcccacctctccaggattagcttggcaggtgtggagccctcgttggtgcaggcagccctggggcagttggtgcggctctcctgctcagacgacactgccccggaatcccaggctgcctggcagaaagatggccagcccatctcctctgacaggcacaggctgcagttcgacggatccctgatcatccaccccctgcaggcagaggacgcgggcacctacagctgtggcagcacccggccaggccgcgactcccagaagatccaacttcgcatcatagggggtgacatggccgtgctgtctgaggctgagctgagccgcttccctcagcccagggacccagctcaggactttggccaagcgggggctgctgggcccctgggggccatcccctcttcacacccacagcctgcaaacaggctgcgtttggaccagaaccagccccgggtggtggatgccagtccaggccagcggatccggatgacctgccgtgccgaaggcttcccgcccccagccatcgagtggcagagagatgggcagcctgtctcttctcccagacaccagctgcagcctgatggctccctggtcattagccgagtggctgtagaagatggcggcttctacacctgtgtcgctttcaatgggcaggaccgagaccagcgatgggtccagctcagagttctgggggagctgacaatctcaggactgccccctactgtgacagtgccagagggtgatacggccaggctattgtgtgtggtagcaggagaaagtgtgaacatcaggtggtccaggaacgggctacctgtgcaggctgatggccaccgtgtccaccagtccccagatggcacgctgctcatttacaacttgcgggccagggatgagggctcctacacgtgcagtgcctaccaggggagccaggcagtcagccgcagcaccgaggtgaaggtggtctcaccagcacccaccgcccagcccagggaccctggcagggactgcgtcgaccagccagagctggccaactgtgatttgatcctgcaggcccagctttgtggcaatgagtattactccagcttctgctgtgccagctgttcacgtttccagcctcacgctcagcccatctggcagtagggatgaaggctagttccagccccagtccaaaatagttcatagggctagggagaaaggaagatggactcttggcttcctctctctggctggcaaagggagttatcttctggaatacattagctctttcaaaaacccacccagtgtttagcctcaacggcagccagttaccagcttctctctgtagccttcagcagtgtttgcatctctgacataaccacaggctgctgttttcaagaagagcaatctgtttggataagaaaaacctttactttacagcttccctttataatttgttacacaggaatagttaaatgcatttgtttgtttgttttttgagacagagtttcactcttgttgcccaggctggagggcaatggcgcgatctcagctcactgcaacctccgtctcctgggttcttgattctcctgtgtcagccttctgagtagctaggattacagatgcctatcaccatgcctgggtaatttttgtatttttagttgagatggggtttcaccatgttggccaggctggtctcgaacttctgacctcagatgatctgcccgcctcagcctcccaaagtgctgggattacaggcatgagccaccacgcccagccatcaatgcattttttttattttttttttgagacagagtttcgcacttcttgcccaggctggagtacaatggtgcgatcttggctcactgcaacctccacctcctgggttcaagcgcttctccagcctcagcctcctgagtagctgggattacaggtatgtgccaccatgcctggctaattttgtatttttagtagagacggggtttctccatgttggtcagactggtcttgaactcccgacctcaggtaatccgcccgcctcggcctcccaaaatgctgggattagaggtgtgagccactgtgcccagcccatcaatgtgttttaaagctagctgtcagggttccacttaatttaaagctgggcagggagatgtgtaatgatttcaaagttaacacctgtttgttttctaaagggcatgccaagtcctgctgtatcagggaagtattctgtgctaaaatcagcgatggttcattgctctagtctctctcacccttctaggcagtgcatcagtcagctctaaatctggtgcagagggttaacagcataacccttgttggcaaaatggaatagatgttaagacctcaaatagggatttgggatgaaacagctgcagttagcactgttatctgagcatgaaagaactggaaacgctccttacgtcgagatgttggaccttgaagccctcctgaggccaacatgcaaatctggctgtgacggttcatctgacacctgtgtaaagctgaccagcctgctctgtacagtgacaatgaggagcccctctcttccttaagtaggaatctgtgaagcaaaatgtttgctgccaaagacaaatcagactgtcagtcattaaaaacagcattagcaggatgaggatagcaatggggaagggttgtgggcaatgcagtaacagggaaatggcttcagaaatggtttgagttggaagacaacattcttcatctctcaggacttctaattccttgatgctaaaagaagaggcatggattctatgagcttccaagtccctttccactttaaccttctacaaatctttcagaggactgcctagtagcaaaggttattcctggacacaggaaagacgggcattacagggaccaaagctctgaaaggtgacttttattaccaacacactggctggaaaagggacaaaccacatcacgggtgagtgatacttctcagtcttctctactcattcaacaaaggaaatgtgggctggggcagaggtcttttttcatttaatactggaaaaatattgaagagcatccatgttcacttatggctggttttgctatagaaattggaaaataaaggccacttttttgaaatccccagtttaatt

SEQ ID NO: 9946 - protein, 280 aa, Homo sapiens [sequence omitted]

SEQ ID NO: 9947 - DNA, 3011 bp, Homo sapiens
agtgcatgagcagctgccagggatctctccatgggccccgtcgtccccagcctggggcttctggaaggagcacccacacggatggtggcggcagcagtcctgcaggcgagcaggaacccagccagcacaggacaggggccgcggtgcagagaaagccctggccttctggtggtctctggcggcaagaccaacagcctgggccaggggaggccccccacacccaggcctttggagaatggccatgggggcaggagcttgggtccagggcccctggactgggtggagatgccggatcaccagcgccacccttccacagctcctcctacaggattagcttggcaggtgtggagccctcgttggtgcaggcagccctggggcagttggtgcggctctcctgctcagacgacactgccccggaatcccaggctgcctggcagaaagatggccagcccatctcctctgacaggcacaggctgcagttcgacggatccctgatcatccaccccctgcaggcagaggacgcgggcacctacagctgtggcagcacccggccaggccgcgactcccagaagatccaacttcgcatcatagggggtgacatggccgtgctgtctgaggctgagctgagccgcttccctcagcccagggacccagctcaggactttggccaagcgggggctgctgggcccctgggggccatcccctcttcacacccacagcctgcaaacaggctgcgtttggaccagaaccagccccgggtggtggatgccagtccaggccagcggatccggatgacctgccgtgccgaaggcttcccgcccccagccatcgagtggcagagagatgggcagcctgtctcttctcccagcacccaccgcccagcccagggaccctggcagggactgcgtcgaccagccagagctggccaactgtgatttgatcctgcaggcccagctttgtggcaatgagtattactccagcttctgctgtgccagctgttcacgtttccagcctcacgctcagcccatctggcagtagggatgaaggctagttccagccccagtccaaaatagttcatagggctagggagaaaggaagatggactcttggcttcctctctctggctggcaaagggagttatcttctggaatacattagctctttcaaaaacccacccagtgtttagcctcaacggcagccagttaccagcttctctctgtagccttcagcagtgtttgcatctctgacataaccacaggctgctgttttcaagaagagcaatctgtttggataagaaaaacctttactttacagcttccctttataatttgttacacaggaatagttaaatgcatttgtttgtttgttttttgagacagagtttcactcttgttgcccaggctggagggcaatggcgcgatctcagctcactgcaacctccgtctcctgggttcttgattctcctgtgtcagccttctgagtagctaggattacagatgcctatcaccatgcctgggtaatttttgtatttttagttgagatggggtttcaccatgttggccaggctggtctcgaacttctgacctcagatgatctgcccgcctcagcctcccaaagtgctgggattacaggcatgagccaccacgcccagccatcaatgcattttttttattttttttttgagacagagtttcgcacttcttgcccaggctggagtacaatggtgcgatcttggctcactgcaacctccacctcctgggttcaagcgcttctccagcctcagcctcctgagtagctgggattacaggtatgtgccaccatgcctggctaattttgtatttttagtagagacggggtttctccatgttggtcagactggtcttgaactcccgacctcaggtaatccgcccgcctcggcctcccaaaatgctgggattagaggtgtgagccactgtgcccagcccatcaatgtgttttaaagctagctgtcagggttccacttaatttaaagctgggcagggagatgtgtaatgatttcaaagttaacacctgtttgttttctaaagggcatgccaagtcctgctgtatcagggaagtattctgtgctaaaatcagcgatggttcattgctctagtctctctcacccttctaggcagtgcatcagtcagctctaaatctggtgcagagggttaacagcataacccttgttggcaaaatggaatagatgttaagacctcaaatagggatttgggatgaaacagctgcagttagcactgttatctgagcatgaaagaactggaaacgctccttacgtcgagatgttggaccttgaagccctcctgaggccaacatgcaaatctggctgtgacggttcatctgacacctgtgtaaagctgaccagcctgctctgtacagtgacaatgaggagcccctctcttccttaagtaggaatctgtgaagcaaaatgtttgctgccaaagacaaatcagactgtcagtcattaaaaacagcattagcaggatgaggatagcaatggggaagggttgtgggcaatgcagtaacagggaaatggcttcagaaatggtttgagttggaagacaacattcttcatctctcaggacttctaattccttgatgctaaaagaagaggcatggattctatgagcttccaagtccctttccactttaaccttctacaaatctttcagaggactgcctagtagcaaaggttattcctggacacaggaaagacgggcattacagggaccaaagctctgaaaggtgacttttattaccaacacactggctggaaaagggacaaaccacatcacgggtgagtgatacttctcagtcttctctactcattcaacaaaggaaatgtgggctggggcagaggtcttttttcatttaatactggaaaaatattgaagagcatccatgttcacttatggctggttttgctatagaaattggaaaataaaggccacttttttgaaatccccagtttaatt

SEQ ID NO: 9948 - protein, 309 aa, Homo sapiens
MSSCQGSLHGPRRPQPGASGRSTHTDGGGSSPAGEQEPSQHRTGAAVQRKPWPSGGLWRQDQQPGPGEAPHTQAFGEWPWGQELGSRAPGLGGDAGSPAPPFHSSSYRISLAGVEPSLVQAALGQLVRLSCSDDTAPESQAAWQKDGQPISSDRHRLQFDGSLIIHPLQAEDAGTYSCGSTRPGRDSQKIQLRIIGGDMAVLSEAELSRFPQPRDPAQDFGQAGAAGPLGAIPSSHPQPANRLRLDQNQPRVVDASPGQRIRMTCRAEGFPPPAIEWQRDGQPVSSPSTHRPAQGPWQGLRRPARAGQL

SEQ ID NO: 9949 - DNA, 3174 bp, Homo sapiens
agtgcatgagcagctgccagggatctctccatgggccccgtcgtccccagcctggggcttctggaaggagcacccacacggatggtggcggcagcagtcctgcaggcgagcaggaacccagccagcacaggacaggggccgcggtgcagagaaagccctggccttctggtggtctctggcggcaagaccaacagcctgggccaggggaggccccccacacccaggcctttggagaatggccatgggggcaggagcttgggtccagggcccctggactgggtggagatgccggatcaccagcgccacccttccacagctcctcctacaggattagcttggcaggtgtggagccctcgttggtgcaggcagccctggggcagttggtgcggctctcctgctcagacgacactgccccggaatcccaggctgcctggcagaaagatggccagcccatctcctctgacaggcacaggctgcagttcgacggatccctgatcatccaccccctgcaggcagaggacgcgggcacctacagctgtggcagcacccggccaggccgcgactcccagaagatccaacttcgcatcatagggggtgacatggccgtgctgtctgaggctgagctgagccgcttccctcagcccagggacccagctcaggactttggccaagcgggggctgctgggcccctgggggccatcccctcttcacacccacagcctgcaaacaggctgcgtttggaccagaaccagccccgggtggtggatgccagtccaggccagcggatccggatgacctgccgtgccgaaggcttcccgcccccagccatcgagtggcagagagatgggcagcctgtctcttctcccagcacccaccgcccagcccagggaccctggcagggactgcgtcgaccagccagagctggccaactgtgatttgatcctgcaggcccagctttgtggcaatgagtattactccagcttctgctgtgccagctgttcacgtttccagcctcacgctcagcccatctggcagtagggatgaaggctagttccagccccagtccaaaatagttcatagggctagggagaaaggaagatggactcttggcttcctctctctggctggcaaagggagttatcttctggaatacattagctctttcaaaaacccacccagtgtttagcctcaacggcagccagttaccagcttctctctgtagccttcagcagtgtttgcatctctgacataaccacaggctgctgttttcaagaagagcaatctgtttggataagaaaaacctttactttacagcttccctttataatttgttacacaggaatagttaaatgcatttgtttgtttgttttttgagacagagtttcactcttgttgcccaggctggagggcaatggcgcgatctcagctcactgcaacctccgtctcctgggttcttgattctcctgtgtcagccttctgagtagctaggattacagatgcctatcaccatgcctgggtaatttttgtatttttagttgagatggggtttcaccatgttggccaggctggtctcgaacttctgacctcagatgatctgcccgcctcagcctcccaaagtgctgggattacaggcatgagccaccacgcccagccatcaatgcattttttttattttttttttgagacagagtttcgcacttcttgcccaggctggagtacaatggtgcgatcttggctcactgcaacctccacctcctgggttcaagcgcttctccagcctcagcctcctgagtagctgggattacaggtatgtgccaccatgcctggctaattttgtatttttagtagagacggggtttctccatgttggtcagactggtcttgaactcccgacctcaggtaatccgcccgcctcggcctcccaaaatgctgggattagaggtgtgagccactgtgcccagcccatcaatgtgttttaaagctagctgtcagggttccacttaatttaaagctgggcagggagatgtgtaatgatttcaaagttaacacctgtttgttttctaaagggcatgccaagtcctgctgtatcagggaagtattctgtgctaaaatcagcgatggttcattgctctagtctctctcacccttctaggcagtgcatcagtcagctctaaatctggtgcagagggttaacagcataacccttgttggcaaaatggaatagatgttaagacctcaaatagggatttgggatgaaacagctgcagttagcactgttatctgagcatgaaagaactggaaacgctccttacgtcgagatgttggaccttgaagccctcctgaggccaacatgcaaatctggctgtgacggttcatctgacacctgtgtaaagctgaccagcctgctctgtacagtgacaatgaggagcccctctcttccttaagtaggaatctgtgaagcaaaatgtttgctgccaaagacaaatcagactgtcagtcattaaaaacagcattagcaggatgaggatagcaatggggaagggttgtgggcaatgcagtaacagggaaatggcttcagaaatggtttgagttggaagacaacattcttcatctctcaggacttctaattccttgatgctaaaagaagaggcatggattctatgagcttccaagtccctttccactttaaccttctacaaatctttcagaggactgcctagtagcaaaggttattcctggacacaggaaagacgggcattacagggaccaaagctctgaaaggtgacttttattaccaacacactggctggaaaagggacaaaccacatcacgggtgagtgatacttctcagtcttctctactcattcaacaaaggaaatgtgggctggggcagaggtcttttttcatttaatactggaaaaatattgaagagcatccatgttcacttatggctggttttgctatagaaattggaaaataaaggccacttttttgaaatccccagtttaattaaaccagattttggcctattggtataaacacatcagaaggtaagtttgaggttagctagcagctaactagttctaatagaaccagtcacagaatagtgggctaagattagaggtaaaactcattctaggccagtggttctcaactttaccatattgcgagctt

SEQ ID NO: 9950 - protein, 309 aa, Homo sapiens; identical to SEQ ID NO: 9948

SEQ ID NO: 9951 - DNA, 8564 bp, Homo sapiens
cctcgctccctctccggtaatgagggggctgagctgtccctccgaggagggggcctggtgtggataaaagagacgaaaaagccgggggaggtttccaaaaataaaaccgtccgggtccccttcagacggctgcaggcacagggaggaggcgcgaaggtgcagcagccgtgcgagcccagctggagtaggagcgcggactcgaggctcggggcgcgcagccctcgttccgccgagagccgggcccccagtcggccgcttcagggccccctagactcagagaagctggccgccgggcggggccgggagaacagcccgcgggcgtccagcgtgccgaccacaaagctcttcgcggtgcccgcgcgcaccactctccagccgccccgcgccatgaggccgcggaccaaagcccgcagcccggggcgcgccctgcggaacccctggagaggcttcctgccgctcaccctggctctcttcgtgggcgcgggtcatgcccaaagggaccccgtagggagatacgagccggctggtggagacgcgaatcgactgcggcgccctgggggcagctacccggcagcggctgcagccaaggtgtacagtctgttccgggagcaggacgcgcctgtcgcgggcttgcagcccgtggagcgggcccagccgggctgggggagccccaggaggcccaccgaggcggaggccaggaggccgtcccgcgcgcagcagtcgcggcgtgtccagccacctgcgcagacccggagaagcactcccctgggccagcagcaaccagcaccccggacccgggccgcgccggctctcccacgcctggggaccccacagcggtctggggctgcgcccccaaccccgccgcgagggcggctcacggggaggaacgtctgcgggggacagtgctgcccaggatggacaacagcaaacagcaccaaccactgtatcaaacccgtttgcgagccgccgtgccagaaccggggctcctgcagccgcccgcagctctgtgtctgccgctctggtttccgtggagcccgctgcgaggaggtcattcccgatgaggaatttgacccccagaactccaggctggcacctcgacgctgggccgagcgttcacccaacctgcgcaggagcagtgcggctggagagggcaccttggccagagcacagccgccagcaccacagtcgccgcccgcaccacagtcgccaccagctgggaccctgagtggcctcagccagacccacccttcccagcagcacgtggggttgtcccgcactgtccgacttcacccgactgccacggccagtagccagctctcttccaacgccctgcccccgggaccaggccttgagcagagagatggcacccaacaggcggtacctctggagcacccctcatccccctgggggctgaacctcacggagaaaatcaagaagatcaagatcgtcttcactcccaccatctgcaagcagacctgtgcccgtggacactgtgccaacagctgtgagaggggcgacaccaccaccctgtacagccagggcggccatgggcacgatcccaagtctggcttccgcatctatttctgccagatcccctgcctgaacggaggccgctgcatcggcagggacgaatgctggtgccccgccaactccaccgggaagttctgccacctgcctatcccgcagccggacagggagcctccagggagggggtcccgccccagggccttgctggaagccccactgaagcagtccactttcacactgccgctctccaaccagctggcctccgtgaacccctccctggtgaaggtgcacattcaccacccacccgaggcctcagtgcagatccaccaggtggcccaggtgcggggcggggtggaggaggccctagtggagaacagcgtggagaccagacccccgccctggctgcctgccagccctggccacagcctctgggacagcaacaacatccctgctcggtctggagagccccctcggccactgcccccagcagcacccaggcctcgaggactgctgggccggtgttacctgaacactgtgaacggacagtgtgccaaccctctgctggagctgactacccaggaggactgctgtggcagtgtgggagccttctggggggtgactttgtgtgccccatgcccacccagaccagcctccccggtgattgagaatggccagctggagtgtcctcaggggtacaagagactgaacctcactcactgccaagatatcaacgagtgcttgaccctgggcctgtgcaaggacgcggagtgtgtgaataccaggggcagctacctgtgcacatgcagacctggcctcatgctggatccatcgcggagccgctgtgtgtcggacaaggcaatctccatgctgcagggactgtgctaccggtcgctggggcccggcacctgcaccctgcctttggcccagcggatcaccaagcagatatgctgctgcagccgcgtgggcaaagcatggggcagcgagtgtgagaaatgccctctgcctggcacagaggccttcagagagatctgccctgccggccacggctacacctacgcgagctccgacatccgcctgtccatgaggaaagccgaggaggaggaactggcaaggcccccaagggagcaagggcagaggagcagcggggcactgcccgggccagcagagaggcagcccctccgggtcgtcacggacacctggcttgaggccgggaccatccctgacaagggtgactctcaggctggccaggtcacgaccagtgtcactcatgcacctgcctgggtcacagggaatgccacaaccccaccaatgcctgaacaggggattgcagagatacaggaagaacaagtgaccccctccactgatgtgctggtgaccctgagcaccccaggcattgacagatgcgctgctggagccaccaacgtctgtggccctggaacctgcgtgaacctccccgatggatacagatgtgtctgcagccctggctaccagctgcaccccagccaggcctactgcacagatgacaacgagtgtctgagggacccctgcaagggaaaagggcgctgcatcaaccgcgtggggtcctactcctgcttctgctaccctggctacactctggccacctcaggggcgacacaggagtgtcaagatatcaatgagtgtgagcagccaggggtgtgcagcggggggcagtgcaccaacaccgagggctcgtaccactgcgagtgtgatcagggctacatcatggtcaggaaaggacactgccaagatatcaacgaatgccgtcaccccggtacctgccctgatgggagatgcgtcaattcccctggctcctacacttgtctggcctgtgaggagggctaccggggccagagtgggagctgtgtagatgtgaatgagtgtctgactcccggggtctgtgcccatggaaagtgcaccaacctagaaggctccttcagatgctcttgtgagcagggctatgaggtcacctcagatgagaagggctgccaagatgtggatgagtgtgccagccgggcctcatgccccacaggcctctgcctcaacacggagggctccttcgcctgctctgcctgtgagaacgggtactgggtgaatgaagacggcactgcctgtgaagacctagatgagtgtgccttcccgggagtctgcccctccggagtctgcaccaacacggctggctccttctcctgcaaggactgcgatgggggctaccggcccagccccctgggtgactcctgtgaagatgtggatgaatgtgaagacccccagagcagctgcctgggaggcgagtgcaagaacactgtgggctcctaccagtgcctctgtccccagggcttccagctggccaatggcaccgtgtgtgaggatgtgaatgagtgcatgggggaggagcactgcgcaccccacggcgagtgcctcaacagccacgggtctttcttctgtctgtgcgcgcctggcttcgtcagcgcagaggggggcaccagctgccaggatgtggacgagtgtgccaccacagacccgtgtgtgggagggcactgtgtcaacaccgagggctccttcaactgtctatgtgagactggcttccagccctccccagagagtggagagtgtgtggatattgacgagtgtgaggactatggagacccggtgtgtggcacctggaagtgtgaaaacagccctggctcctaccgctgtgttctgggctgccagcctggcttccacatggccccgaacggagactgcattgacatagacgagtgcgccaacgacaccatgtgtggcagccacggcttctgtgacaacactgatggctccttccgctgcctctgtgaccagggcttcgagatctctccctcaggctgggactgtgtggatgtgaacgagtgtgagcttatgctggcggtatgtggggccgcgctctgtgagaacgtggagggctccttcctgtgcctctgtgccagtgacctggaggagtacgatgcccaggaggggcactgccgcccacggggggctggaggtcagagtatgtctgaggccccaacgggggaccatgccccggcccccacccgcatggactgctactccgggcagaagggccatgcgccctgctccagtgtcctgggccggaacaccacacaggctgaatgctgctgcacccagggcgctagctggggagatgcctgtgacctctgcccgtctgaggactcagctgaattcagcgagatctgccctagtggaaaaggctacattcctgtggaaggagcctggacgtttggacagaccatgtacacagatgcggatgagtgtgtgatattcgggcctggtctctgcccgaacggccggtgcctcaacaccgtgcctggttatgtctgcctgtgcaatcccggcttccactacgatgcttcccacaagaagtgtgaggatcacgatgagtgccaggacctggcctgtgagaatggcgagtgcgtcaacacggagggctccttccactgcttctgcagccccccgctcaccctggacctcagccagcagcgctgcatgaacagcaccagcagcacggaggacctccctgaccacgacatccacatggacatctgctggaaaaaagtcaccaatgatgtgtgcagcgaacccctgcgtgggcaccgcaccacctacacggaatgctgctgccaggacggcgaggcctggagccagcagtgtgctctgtgtcccccgaggagctctgaggtctatgctcagctgtgcaacgtggctcgcattgaggcagagcgggaggccggggtccacttccggccaggctatgagtatggccccgggcccgatgacctgcactacagcatctatggcccagatggggcccccttctacaactacctgggccccgaggacaccgtccctgagcctgccttccccaacacagccggtcactcagcggaccgcacacccatccttgagtctcctttgcagccctcagaactccagccccactacgtggccagccatccagagcccccagccggcttcgaagggcttcaggcggaggagtgcggcatcctgaacggctgtgagaatggccgctgtgtgcgcgtgcgggagggctacacctgtgactgttttgagggcttccagctggatgcggcccacatggcctgcgtagatgtgaatgagtgtgatgacttgaacgggcctgctgtgctctgtgtccatggttactgcgagaacacagagggctcctaccgctgccactgctccccgggatatgtggctgaggcagggcccccccactgcactgccaaggagtagcagtcaggggtcagtgtggcaactacctggaaatggcctccagtcacaggcaggggccttgaggatgatttcctagctgggaagacaccgtgacatcaggccagaggtttccaatcagccttgcctgctttcatctctcccagcttagcctctggctgtaagcttcggtcattgcctccatgcccttgcttggctcaagcaccaccaatcgctttaatgcttcagccaccgcatgaggccctgtccaccacctttcctggccttgctatgggatgcttaccaaaggatggccctcatccaccctcccaagctgtgcgagcatgcaaggccccatggcctcacactgcagacacccctttccagccacaatccaccatcatcctgacgatcccacaactgggacagaggctacatctgccctagggaggtccttcagaatctgtggagcaagaaaggatttggggaagcttggggactgactccagagccccctcctaagaaccatcaccaccactcagccaatctgttctgggccctgattttgccacacctccatcctgtagcccattctctgaccccaaggagtggcagaagatcccttcactcagagaagcaaggctgatattagcttgttgaatgtaagagacacaaatgaagaagaacaaagagcctgagaaagcagcaagaggacatgatgaaaaatacgtggagttgatgagaaaggggagccaaggctttatacgtctaaagaaaatattcagtagctgaatccgcccagtgatagcctgtgggcaccagcagcaagggctgccatgggatacagcacccatctacaaagacctctattacataaacactgcttcttacaggaaacaaacctcttctgggatctccttttgtgaaaaccagtttgatgtgctaaaagtaaaaagtctattttccagtgtggtcttgttcagaagcagccagatttccaatgttgtttttcccctccactcagaaacccctgccctttcccttcagaaaacgatggcaggcattcctctgagtttacaagcagagactcactccaacccaaactagctgggagttcagaaccatggtggaataaagaaatgtgcatctggtctcttctgttgtttttatttcatatcagattaaatttctttaccatgttggctaagtctaaatattagagatgaggctgtgcctactccctggccagctctgctgatagcctatgatgggttccaatgggaaatgactctttactattaaaagacaaggaaagctctgacttcgtacttctctgatgaatggcaatgtaaatgaacaaggctccatgtgactggagcatggaagtgaatgctactttcttaatttaatctgccctgtcctacctgctcctctgattgttagccatcacataacttattgaatgcttgccatgtgccaggcactgtgctgagtgccatacatacatttcatttaattatccaataatcctacttactattgtttattctcaatttacaggtgaggaaactgagacatagaaagcttaaataatttgctctaggtccctatactaattgagatgttttcagcagacaaaaataagtcactcttacgcatgtaaaaatattctttcactcataataaaagaaatgcaacttaaaaccatactgagatcctttttaaaactgtcagattggcaaagatcaaaaagcttgttaagactcctagctggcaagcatgtgggaaataggtactctcataacagctgacagaagtacatattgaagaggacaatatggcaatgtccttcaaaattataaaagcactaactctttgatccagtagtttccacttctaggaacttaaccttcagatatattttcaccagatataaaatgacatacgtaagaagttattactgcatcatttgtaatagctaaagattagaaacaattaattgctatggaacccttaaaaaaggtggctctaaattccttaagaaagatatccaaaacaaattaaggggaaaagggagggttgcataacagcatgtaacataacactatttgtctaaagaatggggaaagagaagcggttgtctgttcacctcatccttgccactccgccttatacctcaccatcggagaacttaccatcccccaaatatatcctgctggcactacaccttcgtaactgctgttcccactgcccccacaacactccaatctccaccttcctgccaaccttgagatattgtatgcatatatacatatttcctttgtttaaaatacaaatagcatactatgcatgctgttctgcactttgctttttttttatacttgcaattagagctgcctcatttcattttacagctgtatactattccattgaatggataaaccataatttatttaatcagtccctcactgacagacgtttccattgtttcctgtcttttgctataaataatgctgtaatgaatattcttgtgcatatttcacattaatttatgggattacatctgcaggataaattcttagaaccaatggtggtttgtggggagggtgacagggtggataggtacaggattgggagacttttcactgtatctccttttgtatttttttgaattttgtaccatatgtatcacctattcaaaaaaaataaaatatttttaaatacagttgctggcc

SEQ ID NO: 9952 - protein, 1821 aa, Homo sapiens; identical to SEQ ID NO: 1581

SEQ ID NO: 9953 - DNA, 6983 bp, Homo sapiens
cctcgctccctctccggtaatgagggggctgagctgtccctccgaggagggggcctggtgtggataaaagagacgaaaaagccgggggaggtttccaaaaataaaaccgtccgggtccccttcagacggctgcaggcacagggaggaggcgcgaaggtgcagcagccgtgcgagcccagctggagtaggagcgcggactcgaggctcggggcgcgcagccctcgttccgccgagagccgggcccccagtcggccgcttcagggccccctagactcagagaagctggccgccgggcggggccgggagaacagcccgcgggcgtccagcgtgccgaccacaaagctcttcgcggtgcccgcgcgcaccactctccagccgccccgcgccatgaggccgcggaccaaagcccgcagcccggggcgcgccctgcggaacccctggagaggcttcctgccgctcaccctggctctcttcgtgggcgcgggtcatgcccaaagggaccccgtagggagatacgagccggctggtggagacgcgaatcgactgcggcgccctgggggcagctacccggcagcggctgcagccaaggtgtacagtctgttccgggagcaggacgcgcctgtcgcgggcttgcagcccgtggagcgggcccagccgggctgggggagccccaggaggcccaccgaggcggaggccaggaggccgtcccgcgcgcagcagtcgcggcgtgtccagccacctgcgcagacccggagaagcactcccctgggccagcagcaaccagcaccccggacccgggccgcgccggctctcccacgcctggggaccccacagcggtctggggctgcgcccccaaccccgccgcgagggcggctcacggggaggaacgtctgcgggggacagtgctgcccaggatggacaacagcaaacagcaccaaccactgtatcaaacccgtttgcgagccgccgtgccagaaccggggctcctgcagccgcccgcagctctgtgtctgccgctctggtttccgtggagcccgctgcgaggaggtcattcccgatgaggaatttgacccccagaactccaggctggcacctcgacgctgggccgagcgttcacccaacctgcgcaggagcagtgcggctggagagggcaccttggccagagcacagccgccagcaccacagtcgccgcccgcaccacagtcgccaccagctgggaccctgagtggcctcagccagacccacccttcccagcagcacgtggggttgtcccgcactgtccgacttcacccgactgccacggccagtagccagctctcttccaacgccctgcccccgggaccaggccttgagcagagagatggcacccaacaggcggtacctctggagcacccctcatccccctgggggctgaacctcacggagaaaatcaagaagatcaagatcgtcttcactcccaccatctgcaagcagacctgtgcccgtggacactgtgccaacagctgtgagaggggcgacaccaccaccctgtacagccagggcggccatgggcacgatcccaagtctggcttccgcatctatttctgccagatcccctgcctgaacggaggccgctgcatcggcagggacgaatgctggtgccccgccaactccaccgggaagttctgccacctgcctatcccgcagccggacagggagcctccagggagggggtcccgccccagggccttgctggaagccccactgaagcagtccactttcacactgccgctctccaaccagctggcctccgtgaacccctccctggtgaaggtgcacattcaccacccacccgaggcctcagtgcagatccaccaggtggcccaggtgcggggcggggtggaggaggccctagtggagaacagcgtggagaccagacccccgccctggctgcctgccagccctggccacagcctctgggacagcaacaacatccctgctcggtctggagagccccctcggccactgcccccagcagcacccaggcctcgaggactgctgggccggtgttacctgaacactgtgaacggacagtgtgccaaccctctgctggagctgactacccaggaggactgctgtggcagtgtgggagccttctggggggtgactttgtgtgccccatgcccacccagaccagcctccccggtgattgagaatggccagctggagtgtcctcaggggtacaagagactgaacctcactcactgccaagatatcaacgagtgcttgaccctgggcctgtgcaaggacgcggagtgtgtgaataccaggggcagctacctgtgcacatgcagacctggcctcatgctggatccatcgcggagccgctgtgtgtcggacaaggcaatctccatgctgcagggactgtgctaccggtcgctggggcccggcacctgcaccctgcctttggcccagcggatcaccaagcagatatgctgctgcagccgcgtgggcaaagcatggggcagcgagtgtgagaaatgccctctgcctggcacagaggccttcagagagatctgccctgccggccacggctacacctacgcgagctccgacatccgcctgtccatgaggaaagccgaggaggaggaactggcaaggcccccaagggagcaagggcagaggagcagcggggcactgcccgggccagcagagaggcagcccctccgggtcgtcacggacacctggcttgaggccgggaccatccctgacaagggtgactctcaggctggccaggtcacgaccagtgtcactcatgcacctgcctgggtcacagggaatgccacaaccccaccaatgcctgaacaggggattgcagagatacaggaagaacaagtgaccccctccactgatgtgctggtgaccctgagcaccccaggcattgacagatgcgctgctggagccaccaacgtctgtggccctggaacctgcgtgaacctccccgatggatacagatgtgtctgcagccctggctaccagctgcaccccagccaggcctactgcacagatgacaacgagtgtctgagggacccctgcaagggaaaagggcgctgcatcaaccgcgtggggtcctactcctgcttctgctaccctggctacactctggccacctcaggggcgacacaggagtgtcaagatatcaatgagtgtgagcagccaggggtgtgcagcggggggcagtgcaccaacaccgagggctcgtaccactgcgagtgtgatcagggctacatcatggtcaggaaaggacactgccaagatatcaacgaatgccgtcaccccggtacctgccctgatgggagatgcgtcaattcccctggctcctacacttgtctggcctgtgaggagggctaccggggccagagtgggagctgtgtagatgtgaatgagtgtctgactcccggggtctgtgcccatggaaagtgcaccaacctagaaggctccttcagatgctcttgtgagcagggctatgaggtcacctcagatgagaagggctgccaagatgtggatgagtgtgccagccgggcctcatgccccacaggcctctgcctcaacacggagggctccttcgcctgctctgcctgtgagaacgggtactgggtgaatgaagacggcactgcctgtgaagacctagatgagtgtgccttcccgggagtctgcccctccggagtctgcaccaacacggctggctccttctcctgcaaggactgcgatgggggctaccggcccagccccctgggtgactcctgtgaagatgtggatgaatgtgaagacccccagagcagctgcctgggaggcgagtgcaagaacactgtgggctcctaccagtgcctctgtccccagggcttccagctggccaatggcaccgtgtgtgaggatgtgaatgagtgcatgggggaggagcactgcgcaccccacggcgagtgcctcaacagccacgggtctttcttctgtctgtgcgcgcctggcttcgtcagcgcagaggggggcaccagctgccaggatgtggacgagtgtgccaccacagacccgtgtgtgggagggcactgtgtcaacaccgagggctccttcaactgtctatgtgagactggcttccagccctccccagagagtggagagtgtgtggatattgacgagtgtgaggactatggagacccggtgtgtggcacctggaagtgtgaaaacagccctggctcctaccgctgtgttctgggctgccagcctggcttccacatggccccgaacggagactgcattgacatagacgagtgcgccaacgacaccatgtgtggcagccacggcttctgtgacaacactgatggctccttccgctgcctctgtgaccagggcttcgagatctctccctcaggctgggactgtgtggatgtgaacgagtgtgagcttatgctggcggtatgtggggccgcgctctgtgagaacgtggagggctccttcctgtgcctctgtgccagtgacctggaggagtacgatgcccaggaggggcactgccgcccacggggggctggaggtcagagtatgtctgaggccccaacgggggaccatgccccggcccccacccgcatggactgctactccgggcagaagggccatgcgccctgctccagtgtcctgggccggaacaccacacaggctgaatgctgctgcacccagggcgctagctggggagatgcctgtgacctctgcccgtctgaggactcagctgaattcagcgagatctgccctagtggaaaaggctacattcctgtggaaggagcctggacgtttggacagaccatgtacacagatgcggatgagtgtgtgatattcgggcctggtctctgcccgaacggccggtgcctcaacaccgtgcctggttatgtctgcctgtgcaatcccggcttccactacgatgcttcccacaagaagtgtgaggatcacgatgagtgccaggacctggcctgtgagaatggcgagtgcgtcaacacggagggctccttccactgcttctgcagccccccgctcaccctggacctcagccagcagcgctgcatgaacagcaccagcagcacggaggacctccctgaccacgacatccacatggacatctgctggaaaaaagtcaccaatgatgtgtgcagcgaacccctgcgtgggcaccgcaccacctacacggaatgctgctgccaggacggcgaggcctggagccagcagtgtgctctgtgtcccccgaggagctctgaggtctatgctcagctgtgcaacgtggctcgcattgaggcagagcgggaggccggggtccacttccggccaggctatgagtatggccccgggcccgatgacctgcactacagcatctatggcccagatggggcccccttctacaactacctgggccccgaggacaccgtccctgagcctgccttccccaacacagccggtcactcagcggaccgcacacccatccttgagtctcctttgcagccctcagaactccagccccactacgtggccagccatccagagcccccagccggcttcgaagggcttcaggcggaggagtgcggcatcctgaacggctgtgagaatggccgctgtgtgcgcgtgcgggagggctacacctgtgactgttttgagggcttccagctggatgcggcccacatggcctgcgtagatgtgaatgagtgtgatgacttgaacgggcctgctgtgctctgtgtccatggttactgcgagaacacagagggctcctaccgctgccactgctccccgggatatgtggctgaggcagggcccccccactgcactgccaaggagtagcagtcaggggtcagtgtggcaactacctggaaatggcctccagtcacaggcaggggccttgaggatgatttcctagctgggaagacaccgtgacatcaggccagaggtttccaatcagccttgcctgctttcatctctcccagcttagcctctggctgtaagcttcggtcattgcctccatgcccttgcttggctcaagcaccaccaatcgctttaatgcttcagccaccgcatgaggccctgtccaccacctttcctggccttgctatgggatgcttaccaaaggatggccctcatccaccctcccaagctgtgcgagcatgcaaggccccatggcctcacactgcagacacccctttccagccacaatccaccatcatcctgacgatcccacaactgggacagaggctacatctgccctagggaggtccttcagaatctgtggagcaagaaaggatttggggaagcttggggactgactccagagccccctcctaagaaccatcaccaccactcagccaatctgttctgggccctgattttgccacacctccatcctgtagcccattctctgaccccaaggagtggcagaagatcccttcactcagagaagcaaggctgatattagcttgttgaatgtaagagacacaaatgaagaagaacaaagagcctgagaaagcagcaagaggacatgatgaaaaatacgtggagttgatgagaaaggggagccaaggctttatacgtctaaagaaaatattcagtagctgaatccgcccagtgatagcctgtgggcaccagcagcaagggctgccatgggatacagcacccatctacaaagacctctattacataaacactgcttcttacaggaaacaaacctcttctgggatctccttttgtgaaaaccagtttgatgtgctaaaagtaaaaagtctattttccagtgtggtcttgttcagaagcagccagatttccaatgttgtttttcccctccactcagaaacccctgccctttcccttcagaaaacgatggcaggcattcctctgagtttacaagcagagactcactccaacccaaactagctgggagttcagaaccatggtggaataaagaaatgtgcatctggtct

SEQ ID NO: 9954 - protein, 1821 aa, Homo sapiens; identical to SEQ ID NO: 1581

SEQ ID NO: 9955 - DNA, 1001 bp, Homo sapiens
agttctgataactccacatctccaggttctgcagaaacagtggtgagcaacgcagacaagatatctgttgctttagagctgtcattgtggtttgggaagtcagacaagaaatgattttataggttgttgaataggacttttcctctgctcttggaatatctgctgaagccacaaagatagaacaatgagggctaaatattcttgcattctgaagagaagtactagacaccttactaaaggcagaacaggttcaacagcaatcaaactacatccctcaattccagtctacaaatgaaagggattgaagaaagtcactgaagcataacactgctgcatttgtgggcagggctgagatttcccctgagggaactccccaactcaaaccaaatgaagggagctcccagagagaaccagtcatctgcaagaagaggaggctctgtccctataactgtccccccactgatgctgactatgttgctggatgttacaggcacctcggtgcattaaactacagcaagacagttcatgggagaacccaacatatgtctttaggaattgaggacgtacataaatgaagagacttgtgtgcacttcctgtctggagaattctgatcgtggagcctcgctggagtggcctgtgtggcaaggtgagaagtgggcagggtgaggagcggccaacccaccattgttttgcctggcataggtgggacagtcctatgagagacagaggatgcaggggtctccgagaggttggccagagagtaatttgctatggcaactcagggtggaggtcctgtagagaacctcccaaaaacccacatatgtgcccatgaaaaagccagcgcttggcacctgccaaccaagggtacctgtcacataagactttgctacttttcctctaacacctctctcccagccttgacaaagaggagccacagcagaaaagggaggtcaggaaaacagaccacaccccactctcaccactgcaggatctctagcaa

SEQ ID NO: 9956 - protein, 75 aa, Homo sapiens
MATQGGGPVENLPKTHICAHEKASAWHLPTKGTCHIRLCYFSSNTSLPALTKRSHSRKGRSGKQTTPHSHHCRIS

SEQ ID NO: 9957 - DNA, 4384 bp, Homo sapiens
agcggaaactccttggggaaagggcaatcccccgagccggttcccaggccgggtggagaccaactctggggtctgttggtgggagagtggggagcccgtcttctgctgagtgctgccgccccttcccaggacagcggaggtggaacttcgtcgcgctgcaacccccggctcgggatcctggggcgtcctttggcagtcgattgcaccctgcactagagagaagtccaggaatgatatattcttgggctgtatttctctaccctggagttcatccagttcatcccagaaacactgacctgattactgtgacaaagtctgatggatagaccctttctgttgaccttgtggcgtttttctttcatgtggaagttggaagacaaggtgaaaggggccaaaagttacctgctttggtgaataggagtgctctacttggttctcagaacatgggccctcgtttaaagctgcagctgtgatcctcggctgtctgttggcattgacgggacctgatgttttacgttattggtggaatcacagtgtctgtggttgcattcttcttcacaattaagttcctctttgagcttgccgcacgtgtagtcagcttcctccagaatgaggaccgcgagcgccgaggggaccggactatttatgactacgtgcggggaaattacctggatccccggtcttgcaaagtctcctgggattggaaggacccctatgaggtgggccacagcatggccttccgagtgcatttattctataagaacgggcagcctttccctgcacatcggcctgtgggactaagagttcacatctctcatgtcgagctagcagtggaaattccagtgacccaggaagtccttcaggagcccaattccaacgtagtaaaagtggccttcactgtgcgcaaggctgggcgttatgaaatcacagtgaagcttggtggattaaatgtggcatatagtccctactacaaaatttttcaacctggaatggtggttccttctaagaccaaaattgtgtgccacttttctactcttgtattgacctgtgggcagccgcacacccttcaaatagtaccccgagatgagtatgataatcccaccaacaattccatgtccttgagagatgagcacaattacaccttgtccattcatgagctcggccctcaagaagaagagagtactggtgtctcatttgagaaatcagtaacatccaacaggcagactttccaggtgttcttgcgactcaccctgcattctcgaggctgcttccatgcttgcatttcataccaaaatcagccaatcaataatggtgaatttgacattattgtcctaagtgaggatgagaagaatatcgtcgaacgcaatgtgtccacttcaggcgtgagcatttactttgaggcttatctttataatgctaccaactgtagcagcactccatggcacctgccacccatgcacatgacctcttcccagcgccggccatccactgctgttgacgaggaagatgaagactcgccctctgagtgccacacccctgagaaggtgaagaaaccgaagaaggtgtactgctatgtgtcaccaaagcaattctcagtgaaggagttctacctgaagatcatcccctggcgcctttacaccttccgagtgtgtccaggaacaaaattttcataccttggtcctgaccctgtccataagctgctcacactggtggtggatgatggcattcaacctcctgtggagctcagctgtaaggagaggaacattctagcagccacttttatccgctccctgcataagaacataggaggctctgagacctttcaggacaaggtgaactttttccagcgagagcttcggcaggtacatatgaaaagaccacattccaaagtcaccctgaaggtcagcagacatgccttgttggaatcgtctctgaaagccactcggaatttctccatctcagattggagcaagaactttgaggttgttttccaggatgaagaagctctggactggggagggcctcgccgggaatggtttgagctaatctgcaaagcactatttgataccaccaatcagctcttcacccggttcagtgacaacaaccaagcattagtgcatcccaaccctaatcgccccgctcatctgcgcctgaaaatgtatgagtttgcgggacggctcgtgggcaagtgtctctatgagtcctctctaggaggagcctacaagcagttggtccgagctcgcttcacccgctctttcctggcccaaatcataggactgcgtatgcattacaagtactttgaaacagatgacccagaattctacaaatctaaagtttgttttatcctcaacaatgacatgagtgagatggagctggtctttgcagaagagaaatataataaatcaggtcaattggataaggttgtagaactcatgacaggtggagctcaaactccagtcaccaatgcgaataaaatcttctatttaaatttgctggcccaatatcggctggccagtcaagtgaaagaggaggtggaacatttcctaaaaggcctgaatgaattggtccctgagaaccttttggctatttttgatgagaatgagcttgagctgctgatgtgtgggactggagacatcagtgtgtctgacttcaaagcccatgcagtagttgttggtggctcatggcatttcagagaaaaggtcatgaggtggttttggactgtggtttccagtctgacccaggaggagttggctcggctacttcagttcacaacaggctcctctcagctaccacctggaggctttgccgccctctgtccctcatttcagattattgccgctccgacccatagcacgctgcctactgcacacacatgaaattcaatatagaaaatttggaaataagaaaaagaacaagggaaataggtaagttgctatccagaggtaatcaccgttaacactttgataaatagccttttgattttcatatttaagcacacatttgtctcccaacatctccctcacccacaaggggtttgggagtggcaaacaaaaatactgctcctaagaagtttgttggcggcaagtcttaccgattcttttcagcttacaaaggtaagcttggaagagaagaaaaaaaacagacctctgatttgggcctagaaggagtagtattaaggaccctgactttcttgggaaagtaattatgatgtcttgtatattggttcccaatctggaaaatgttaaaaaaattcccttttgaatttaaaaacaaaacaaaacagatccttgcccccaccccaaacagtgcattctcctcttacctcatcaagctcctgagtgatatgagatatcttaaagggccaggcacagtgactcatatgtataatcccagtactttggaacactgcaaggcaggagggtcacttgaacccaggagttcgaggctgcagtgagctatgcctgtgtcactgtgctctagcctgggtgacagagcgagacactgtctctctttctctttttttttgaaaaggtggggttttggcatgtttcccaggctgatcttgaactcctgggctcaagtgatccacccacctctaaaagtgctgggatcacaagcatgagccatggggcccagccaaatgttcatatttttatttttaactcccgtggttcaactttgggcaagacaaccttctttcagtatcagtttcctgacctgcaaaatgatgctattaaccaattaagaaaatcgactaataacttaagagttcttgggaaaaaagttttcctatatatagtatgtgtgttaccatgctgactgtgacttagggccctggtagtttctgtagcaggaggctgtatgggtctgggggcagttgagaatgctagagtcgatgactggtgtggaaattcccagggggtggtgactctgtttttcaccttgccgtgtccaggcaggccagagagaatgagtactcaagacacctggcccaaacattcatgaagaagacaccaagtcagaagagacttcctcctttgcatgatcctgtaaggacggaagagctagcagctgtggatactccgaacagaccagtgaggcagagcagcaaaagcagcctggaactggaggcggccaggagaggagcagcaagccggtgcccacagtcagccacggcaccctcagcaggcccattaggaggaattgagaagcttctccagtgtttgccctaaaatctcaatccattttaagtgacagaaagtgacaaaaaacaccccagaggaaaatactggggcctaagggagtaatctcagaactcttgtaataataataataatagcagccaacatctaatacatgcttactctgtgccaggccctattct

SEQ ID NO: 9958 - protein, 789 aa, Homo sapiens
MFYVIGGITVSVVAFFFTIKFLFELAARVVSFLQNEDRERRGDRTIYDYVRGNYLDPRSCKVSWDWKDPYEVGHSMAFRVHLFYKNGQPFPAHRPVGLRVHISHVELAVEIPVTQEVLQEPNSNVVKVAFTVRKAGRYEITVKLGGLNVAYSPYYKIFQPGMVVPSKTKIVCHFSTLVLTCGQPHTLQIVPRDEYDNPTNNSMSLRDEHNYTLSIHELGPQEEESTGVSFEKSVTSNRQTFQVFLRLTLHSRGCFHACISYQNQPINNGEFDIIVLSEDEKNIVERNVSTSGVSIYFEAYLYNATNCSSTPWHLPPMHMTSSQRRPSTAVDEEDEDSPSECHTPEKVKKPKKVYCYVSPKQFSVKEFYLKIIPWRLYTFRVCPGTKFSYLGPDPVHKLLTLVVDDGIQPPVELSCKERNILAATFIRSLHKNIGGSETFQDKVNFFQRELRQVHMKRPHSKVTLKVSRHALLESSLKATRNFSISDWSKNFEVVFQDEEALDWGGPRREWFELICKALFDTTNQLFTRFSDNNQALVHPNPNRPAHLRLKMYEFAGRLVGKCLYESSLGGAYKQLVRARFTRSFLAQIIGLRMHYKYFETDDPEFYKSKVCFILNNDMSEMELVFAEEKYNKSGQLDKVVELMTGGAQTPVTNANKIFYLNLLAQYRLASQVKEEVEHFLKGLNELVPENLLAIFDENELELLMCGTGDISVSDFKAHAVVVGGSWHFREKVMRWFWTVVSSLTQEELARLLQFTTGSSQLPPGGFAALCPSFQIIAAPTHSTLPTAHT

SEQ ID NO: 9959 - DNA, 2943 bp, Homo sapiens
catagtaacaccttaccatctttttccagctgctgatgtgtgggactggagacatcagtgtgtctgacttcaaagcccatgcagtagttgttggtggctcatggcatttcagagaaaaggtcatgaggtggttttggactgtggtttccagtctgacccaggaggagttggctcggctacttcagttcacaacaggctcctctcagctaccacctggaggctttgccgccctctgtccctcatttcagattattgccgctccgacccatagcacgctgcctactgcacacacatggtaggtatctgcccgcctgatgcatgcccagtgtttttggtggtatgagttaatcacttctcccttgcccttccagttttaaccagctgtgcctccctacatatgactcctatgaagaggtgcacaggatgctgcagctggccatcagcgagggttgcgagggctttggcatgctctgaccactctcctgtcatccagttggctcccatgctctctggagcttctgggcgcaagttacagacatcataaccactgatcctaacacacataaccatcagccagaagatgccgcatgctcccctgtgtctggaggattttgtcacctacaagccttgtctttacctcacctgctccctgcccatatctaccacaggccactttggcatggtatgtaagctgagctcttcattctgtcatgagaagaggaccatgctgctatcatttatttggtcctttgaagatctcagtagctgagggagatggcacacggggctcagccctgttgggaaactggtgtggagacccttaaatccacactgtgctccaaaactccctctgctgatactccttggagacaccctctttggccctcactacttgaccagactggtacttgagtccttctcatgggtggggtgattgcctcttctcatcaggagccaggagagagggggacagataggaggtggcccataggagcagtcccgctgcacaatggtaggcataggccatggcactggactgcctctaaggactgctaaaaagaatatttttttgtggtgtcagaactggaaaaagcactttcccttcgggcatttctggaaatgattattaatccacaaagaagaactctgtaagctttttcttgaattgtagccagtgagaaaagcagatagactgaagaatatgaaggatagctgagctgtagcctccagagtggggcatgcctaggcatatggctggcttggagactactgatgcttttccctgagtttgttattggcactgaagtatggccggcttgggccactgacttccccattatgtagtctgctaaaagctggggatcctttagcattctactgaagaaaattttgtagcaaaagattagaacagtaagaatagtatgccagcaatccctgattctctctctgcttggtgttctctggcagcactaagacaaaggaacagggactaggagtttacgtgcttatcacaggtccttggcgtcaggacactagggatgaacatggaggtgatatgttacacagtaaacacctgccaacccctgtactcccctttgctccatcagttatcaggaaggagaactaaggagggaggaagcttattaggttcactgttgaatgatgattgaagagtacctgctgctgtatcttggaagatgacaacatcctttttcattactgtttgattgaaaataatttcaagattcaaaatctcattgacttcccaaatttgtgtttttaagaaggctttgctgcaagctaccattcccaatggggcagtcaactctgagaatattacaagccatctttattgccaaaaccagcaagtacacagagtcctgaaacaaggcaggactttggcaatgccttggcctcctggaagcatgtctgagccctcctgttcgcagggatcatgaggaacaagccctcctgagctgctacagttcctgcctgacctcagtctttcgcagtcatcatttgtcctttcttggcacatgggtgctgacctcactcatccttggggtccgggatccagcatcagggtctctataccccaggatcctccatgccacatggtcactgctctcctcagggaccaggacaaggtgctgctgcttgcccaaatgttttcccatgggatatgtaccggaaggtttatcaccaccctgggaaacataatgctgccccttgggcccagaaaggggtttccagctgggggcacgtggactggttctgctgtttttggcagtcgcttttctgaattctcccctccggcagccttccagagactgatcctggagattgagttgattgtcttggctagacctgtcattttaagctctagtcatagcactttttcagagcatcttaggcaccattgcaacccaaccagggaagctgcatccctgtggtggtccttaggcaccagtctttgttaaacaaaaccctttggcactattgtggttttctattctctgtctgaactctattcaaaagtatctttgctctcttgggccttttcttttactgttttgttttttttttttctaatcctgctttcatactagccagtgtggggaaaaggtacaatatgtcaaagagatgagagagtgttatttcttgggcaattttctattagtgtttcttattttggccagttcttttatttatgtccttgtgacccaggtacttggggggccagctacccttctggccttttagcgtctttgaaggagaccagacatgagtgaatacctaggagagtgtcagcatgtttctggaaaattggcagagaccaagccctgctgcagattcgtcaggccaggtgaaagggccaggcagttgcagctgatgatgtaaatattttgtacagtagataaataaatgtttaaaagaactaag

SEQ ID NO: 9960 - protein, 87 aa, Homo sapiens
MCGTGDISVSDFKAHAVVVGGSWHFREKVMRWFWTVVSSLTQEELARLLQFTTGSSQLPPGGFAALCPSFQIIAAPTHSTLPTAHTW

SEQ ID NO: 9961 - DNA, 5447 bp, Homo sapiens
agcggaaactccttggggaaagggcaatcccccgagccggttcccaggccgggtggagaccaactctggggtctgttggtgggagagtggggagcccgtcttctgctgagtgctgccgccccttcccaggacagcggaggtggaacttcgtcgcgctgcaacccccggctcgggatcctggggcgtcctttggcagtcgattgcaccctgcactagagagaagtccaggaatgatatattcttgggctgtatttctctaccctggagttcatccagttcatcccagaaacactgacctgattactgtgacaaagtctgatggatagaccctttctgttgaccttgtggcgtttttctttcatgtggaagttggaagacaaggtgaaaggggccaaaagttacctgctttggtgaataggagtgctctacttggttctcagaacatgggccctcgtttaaagctgcagctgtgatcctcggctgtctgttggcattgacgggacctgatgttttacgttattggtggaatcacagtgtctgtggttgcattcttcttcacaattaagttcctctttgagcttgccgcacgtgtagtcagcttcctccagaatgaggaccgcgagcgccgaggggaccggactatttatgactacgtgcggggaaattacctggatccccggtcttgcaaagtctcctgggattggaaggacccctatgaggtgggccacagcatggccttccgagtgcatttattctataagaacgggcagcctttccctgcacatcggcctgtgggactaagagttcacatctctcatgtcgagctagcagtggaaattccagtgacccaggaagtccttcaggagcccaattccaacgtagtaaaagtggccttcactgtgcgcaaggctgggcgttatgaaatcacagtgaagcttggtggattaaatgtggcatatagtccctactacaaaatttttcaacctggaatggtggttccttctaagaccaaaattgtgtgccacttttctactcttgtattgacctgtgggcagccgcacacccttcaaatagtaccccgagatgagtatgataatcccaccaacaattccatgtccttgagagatgagcacaattacaccttgtccattcatgagctcggccctcaagaagaagagagtactggtgtctcatttgagaaatcagtaacatccaacaggcagactttccaggtgttcttgcgactcaccctgcattctcgaggctgcttccatgcttgcatttcataccaaaatcagccaatcaataatggtgaatttgacattattgtcctaagtgaggatgagaagaatatcgtcgaacgcaatgtgtccacttcaggcgtgagcatttactttgaggcttatctttataatgctaccaactgtagcagcactccatggcacctgccacccatgcacatgacctcttcccagcgccggccatccactgctgttgacgaggaagatgaagactcgccctctgagtgccacacccctgagaaggtgaagaaaccgaagaaggtgtactgctatgtgtcaccaaagcaattctcagtgaaggagttctacctgaagatcatcccctggcgcctttacaccttccgagtgtgtccaggaacaaaattttcataccttggtcctgaccctgtccataagctgctcacactggtggtggatgatggcattcaacctcctgtggagctcagctgtaaggagaggaacattctagcagccacttttatccgctccctgcataagaacataggaggctctgagacctttcaggacaaggtgaactttttccagcgagagcttcggcaggtacatatgaaaagaccacattccaaagtcaccctgaaggtcagcagacatgccttgttggaatcgtctctgaaagccactcggaatttctccatctcagattggagcaagaactttgaggttgttttccaggatgaagaagctctggactggggagggcctcgccgggaatggtttgagctaatctgcaaagcactatttgataccaccaatcagctcttcacccggttcagtgacaacaaccaagcattagtgcatcccaaccctaatcgccccgctcatctgcgcctgaaaatgtatgagtttgcgggacggctcgtgggcaagtgtctctatgagtcctctctaggaggagcctacaagcagttggtccgagctcgcttcacccgctctttcctggcccaaatcataggactgcgtatgcattacaagtactttgaaacagatgacccagaattctacaaatctaaagtttgttttatcctcaacaatgacatgagtgagatggagctggtctttgcagaagagaaatataataaatcaggtcaattggataaggttgtagaactcatgacaggtggagctcaaactccagtcaccaatgcgaataaaatcttctatttaaatttgctggcccaatatcggctggccagtcaagtgaaagaggaggtggaacatttcctaaaaggcctgaatgaattggtccctgagaaccttttggctatttttgatgagaatgagcttgagctgctgatgtgtgggactggagacatcagtgtgtctgacttcaaagcccatgcagtagttgttggtggctcatggcatttcagagaaaaggtcatgaggtggttttggactgtggtttccagtctgacccaggaggagttggctcggctacttcagttcacaacaggctcctctcagctaccacctggaggctttgccgccctctgtccctcatttcagattattgccgctccgacccatagcacgctgcctactgcacacacatgttttaaccagctgtgcctccctacatatgactcctatgaagaggtgcacaggatgctgcagctggccatcagcgagggttgcgagggctttggcatgctctgaccactctcctgtcatccagttggctcccatgctctctggagcttctgggcgcaagttacagacatcataaccactgatcctaacacacataaccatcagccagaagatgccgcatgctcccctgtgtctggaggattttgtcacctacaagccttgtctttacctcacctgctccctgcccatatctaccacaggccactttggcatggtatgtaagctgagctcttcattctgtcatgagaagaggaccatgctgctatcatttatttggtcctttgaagatctcagtagctgagggagatggcacacggggctcagccctgttgggaaactggtgtggagacccttaaatccacactgtgctccaaaactccctctgctgatactccttggagacaccctctttggccctcactacttgaccagactggtacttgagtccttctcatgggtggggtgattgcctcttctcatcaggagccaggagagagggggacagataggaggtggcccataggagcagtcccgctgcacaatggtaggcataggccatggcactggactgcctctaaggactgctaaaaagaatatttttttgtggtgtcagaactggaaaaagcactttcccttcgggcatttctggaaatgattattaatccacaaagaagaactctgtaagctttttcttgaattgtagccagtgagaaaagcagatagactgaagaatatgaaggatagctgagctgtagcctccagagtggggcatgcctaggcatatggctggcttggagactactgatgcttttccctgagtttgttattggcactgaagtatggccggcttgggccactgacttccccattatgtagtctgctaaaagctggggatcctttagcattctactgaagaaaattttgtagcaaaagattagaacagtaagaatagtatgccagcaatccctgattctctctctgcttggtgttctctggcagcactaagacaaaggaacagggactaggagtttacgtgcttatcacaggtccttggcgtcaggacactagggatgaacatggaggtgatatgttacacagtaaacacctgccaacccctgtactcccctttgctccatcagttatcaggaaggagaactaaggagggaggaagcttattaggttcactgttgaatgatgattgaagagtacctgctgctgtatcttggaagatgacaacatcctttttcattactgtttgattgaaaataatttcaagattcaaaatctcattgacttcccaaatttgtgtttttaagaaggctttgctgcaagctaccattcccaatggggcagtcaactctgagaatattacaagccatctttattgccaaaaccagcaagtacacagagtcctgaaacaaggcaggactttggcaatgccttggcctcctggaagcatgtctgagccctcctgttcgcagggatcatgaggaacaagccctcctgagctgctacagttcctgcctgacctcagtctttcgcagtcatcatttgtcctttcttggcacatgggtgctgacctcactcatccttggggtccgggatccagcatcagggtctctataccccaggatcctccatgccacatggtcactgctctcctcagggaccaggacaaggtgctgctgcttgcccaaatgttttcccatgggatatgtaccggaaggtttatcaccaccctgggaaacataatgctgccccttgggcccagaaaggggtttccagctgggggcacgtggactggttctgctgtttttggcagtcgcttttctgaattctcccctccggcagccttccagagactgatcctggagattgagttgattgtcttggctagacctgtcattttaagctctagtcatagcactttttcagagcatcttaggcaccattgcaacccaaccagggaagctgcatccctgtggtggtccttaggcaccagtctttgttaaacaaaaccctttggcactattgtggttttctattctctgtctgaactctattcaaaagtatctttgctctcttgggccttttcttttactgttttgttttttttttttctaatcctgctttcatactagccagtgtggggaaaaggtacaatatgtcaaagagatgagagagtgttatttcttgggcaattttctattagtgtttcttattttggccagttcttttatttatgtccttgtgacccaggtacttggggggccagctacccttctggccttttagcgtctttgaaggagaccagacatgagtgaatacctaggagagtgtcagcatgtttctggaaaattggcagagaccaagccctgctgcagattcgtcaggccaggtgaaagggccaggcagttgcagctgatgatgtaaatattttgtacagtagataaataaatgtttaaaagaactaag

SEQ ID NO: 9962 - protein, 823 aa, Homo sapiens; identical to SEQ ID NO: 1583

SEQ ID NO: 9963 - DNA, 598 bp, Homo sapiens
gggctttggcatgctctgaccactctcctgtcatccagttggctcccatgctctctggagcttctgggcgcaagttacagacatcataaccactgatcctaacacacataaccatcagccagaagatgccgcatgctcccctgtgtctggaggattttgtcacctacaagccttgtctttacctcacctgctccctgcccatatctaccacaggccactttggcatggtatgtaagctgagctcttcattctgtcatgagaagaggaccatgctgctatcatttatttggtcctttgaagatctcagtagctgagggagatggcacacggggctcagccctgttgggaaactggtgtggagacccttaaatccacactgtgctccaaaactccctctgctgatactccttggagacaccctctttggccctcactacttgaccagaatgagtgaatacctaggagagtgtcagcatgtttctggaaaattggcagagaccaagccctgctgcagattcgtcaggccaggtgaaagggccaggcagttgcagctgatgatgtaaatattttgtacagtagataaataaatgtttaaaag

SEQ ID NO: 9964 - protein, 44 aa, Homo sapiens
MAHGAQPCWETGVETLKSTLCSKTPSADTPWRHPLWPSLLDQNE

SEQ ID NO: 9965 - DNA, 2404 bp, Homo sapiens
agaagtattgcgccgttggtgattacggaagaaccaggagtttggcgtgaccatggggaagcaaaagaaaacaaggaagtatgcgaccatgaagcgaatgcttagtctcagagatcagaggcttaaagaaaaggatagattaaaacctaaaaagaaagaaaagaaggatcccagcgcattaaaggaaagagaagttccccaacacccttcctgcttatttttccaatataatacacagctgggcccaccttaccacatcctcgttgataccaactttatcaacttttccataaaagccaaactggacttagtgcagtcaatgatggactgtctgtatgccaagtgtatcccatgtataaccgattgtgtaatggctgaaattgagaaattggggcagaagtatcgagtggctctaaggattgccaaggatccaagatttgaacgattaccatgtacacacaaaggaacctatgcagatgactgcttagtacagagagtaactcagcataagtgttacattgtggccacagttgaccgggacctgaaaagaagaatccgtaagattcctggagttcctatcatgtacatttctaaccatagatacaacattgaacggatgccagatgattatggagcccctcgattctaattcttacaagacacagttcctctgcctttcttcgaccaactttctcttgttgccagttcattacacaaaatgtagcgggatttttaaggaatcagagagactgatggagttcagggagatatttattatttaggtgcaccagcccagtcagattaacatccaaaggactgaaccctgaacagagttaagttaccttttaagcattttgtggggccgcgggggttggggggaatctgtgcagggggaagcatattacagaagcaagaaagacagttattcaattaactgagacatgcattacatcatttcttacttttcaaggaaaatcatgttttacgacttgagtttatctgtctagttaccttgcagctgcacagctagagaaacagggtatttacaatgcctgggaaaggaggagagataaggctcactagccacagaaaaacaggcagttaatttttaaaggactccagctctttctctttctcacggggaattggattttcttacatgcaactgaatttctgcttacacatttttaaatttcttttaattgcttttccaatgcaatagcatgaattattattctgttgacctatttgccttactatgagctgagggtagttcaatatgctcactcttttttttttttttcttgagatgaagttttgctctgtcaccaggctggagtgcagtggcgtgatctgggctcactgcaacccctgcctcccatccttcaagtgattctcctgcctcagcctcccgagtagctgggattacaggtacacaccaccatgctcaactaatttttcttttttgggcggggggggtggatatttttagtagagacaaatacttttgtatttttaatacagaaaagtatgcctcggcctcccaaagtgctggaattacagacatgagccactgtgcctggcctgctcactttctgatgctgcttttttgttgtttgtttgtttatttgtttgttttgagacggagtctcgctctgtcaccaggctggagtgcagtggcgcaatctcggctcattgcaacctccgcctcccaggttcaagcgattctcctgcctcagcctgcggagtagctgggactataggtgcgtgccaccacgtccagccactgatgctgttttgccactgatgctgttttgaaattgatattttgtctcataaaaactaggccaggcatggtggctcattcctgtaatcccagcactttgggaggccaaggtgggtggatcacctgaggtcaggagttggagatgagcctggacaacatggcaaaaccccacctctactaaaaatacaaaaaaaattagctgggtatggtgtcacgtgcctgtaatcccagccactggggaggctgaggcaggagaacctcttgaacccaggaggtggaggttgcagtgagctgagattgcgccactgcattccagcctgggtgacagagtgagactgtctcaaaaaaaaaaaaaaattaatgatggtcaaagggtataaaatctcagacaggaagaatatgttttatgctttttttgagttctgttgtacagtgtggtgcctatacttaataatggggtattatacatttcaaaattgatgttctcatcacagaaatgtatttgaagtattgcatatgttaactagcttgatttaactattccatattgtatccacaatttatgatatcactttgtaacccatacatttatacaattataaattgtcaatttacaat

SEQ ID NO: 9966 - protein, 198 aa, Homo sapiens; identical to SEQ ID NO: 1585

SEQ ID NO: 9967 - DNA, 1665 bp, Homo sapiens
agaagtattgcgccgttggtgattacggaagaaccaggagtttggcgtgaccatggggaagcaaaagaaaacaaggaagtatgcgaccatgaagcgaatgcttagtctcagagatcagaggcttaaagaaaaggatagattaaaacctaaaaagaaagaaaagaaggatcccagcgcattaaaggaaagagaagttccccaacacccttcctgcttatttttccaatataatacacagctgggcccaccttaccacatcctcgttgataccaactttatcaacttttccataaaagccaaactggacttagtgcagtcaatgatggactgtctgtatgccaagtgtatcccatgtataaccgattgtgtaatggctgaaattgagaaattggggcagaagtatcgagtggctctaaggattgccaaggatccaagatttgaacgattaccatgtacacacaaaggaacctatgcagatgactgcttagtacagagagtaactcagcataagtgttacattgtggccacagttgaccgggacctgaaaagaagaatccgtaagattcctggagttcctatcatgtacatttctaaccatagatacaacattgaacggatgccagatgattatggagcccctcgattctaattcttacaagacacagttcctctgcctttcttcgaccaactttctcttgttgccagttcattacacaaaatgtagcgggatttttaaggaatcagagagactgatggagttcagggagatatttattatttaggtgcaccagcccagtcagattaacatccaaaggactgaaccctgaacagagttaagttaccttttaagcattttgtggggccgcgggggttggggggaatctgtgcagggggaagcatattacagaagcaagaaagacagttattcaattaactgagacatgcattacatcatttcttacttttcaaggaaaatcatgttttacgacttgagtttatctgtctagttaccttgcagctgcacagctagagaaacagggtatttacaatgcctgggaaaggaggagagataaggctcactagccacagaaaaacaggcagttaatttttaaaggactccagctctttctctttctcacggggaattggattttcttacatgcaactgaatttctgcttacacatttttaaatttcttttaattgcttttccaatgcaatagcatgaattattattctgttgacctatttgccttactatgagctgagggtagttcaatatgctcactcttttttttttttttcttgagatgaaattgcgccactgcattccagcctgggtgacagagtgagactgtctcaaaaaaaaaaaaaaattaatgatggtcaaagggtataaaatctcagacaggaagaatatgttttatgctttttttgagttctgttgtacagtgtggtgcctatacttaataatggggtattatacatttcaaaattgatgttctcatcacagaaatgtatttgaagtattgcatatgttaactagcttgatttaactattccatattgtatccacaatttatgatatcactttgtaacccatacatttatacaattataaattgtcaatttacaataaaaaatttttgttgcgtctttttagaaa

SEQ ID NO: 9968 - protein, 198 aa, Homo sapiens; identical to SEQ ID NO: 1585

SEQ ID NO: 9969 - DNA, 1064 bp, Homo sapiens
agaagtattgcgccgttggtgattacggaagaaccaggagtttggcgtgaccatggggaagcaaaagaaaacaaggaagtatgcgaccatgaagcgaatgcttagtctcagagatcagaggcttaaagaaaaggatagattaaaacctaaaaagaaagaaaagaaggatcccagcgcattaaaggaaagagaagttccccaacacccttcctgcttatttttccaatataatacacagctgggcccaccttaccacatcctcgttgataccaactttatcaacttttccataaaagccaaactggacttagtgcagtcaatgatggactgtctgtatgccaagtgtatcccatgtataaccgattgtgtaatggctgaaattgagaaattggggcagaagtatcgagtggctctaaggattgccaaggatccaagatttgaacgattaccatgtacacacaaaggaacctatgcagatgactgcttagtacagagagtaactcagcataagtgttacattgtggccacagttgaccgggacctgaaaagaagaatccgtaagattcctggagttcctatcatgtacatttctaaccatagatacaacattgaacggatgccagatgattatggagcccctcgattctaattcttacaagacacagttcctctgcctttcttcgaccaactttctcttgttgccagttcattacacaaaatgtagcgggatttttaaggaatcagagagatgtctcaaaaaaaaaaaaaaattaatgatggtcaaagggtataaaatctcagacaggaagaatatgttttatgctttttttgagttctgttgtacagtgtggtgcctatacttaataatggggtattatacatttcaaaattgatgttctcatcacagaaatgtatttgaagtattgcatatgttaactagcttgatttaactattccatattgtatccacaatttatgatatcactttgtaacccatacatttatacaattataaattgtcaatttacaataaaaaatttttgttgcgtctttttagaaatcag

SEQ ID NO: 9970 - protein, 198 aa, Homo sapiens; identical to SEQ ID NO: 1585

SEQ ID NO: 9971 - DNA, 182 bp, Homo sapiens
gcgccgttggtgattacggaagaaccaggagtttggcgtgaccatggggaagcaaaagaaaacaaggaagtatgcgaccatgaagcgaatgcttagtctcagagatcagaggctgtgagtgtctggaatcaactgcccagggatattctaataagagtctagagaggataagtagtaaaaat

SEQ ID NO: 9972 - protein, 31 aa, Homo sapiens
APLVITEEPGVWRDHGEAKENKEVCDHEANA

SEQ ID NO: 9973 - DNA, 455 bp, Homo sapiens
ggggccggtatggcgggagcagccactatccgccgccaccggtcccaccgccgccgccagtggcgcttcctgaggcctcgccggggcccgggtactcgagctcgacgactcccgcggccccctcctcctcgggcttcatgagcttccgcgaacagcacttggcgcagctccagcagctgcagcagatgcaccagaagcaaatgcagtgcgtgcttcagccccaccaccttcctccgccccctctgccgcccccgccagtgatgccggggggcggctacggagactggcagccgccaccgccaccgatgcccccgccacccgggccggccctcagctatcagaagcagcagcagtacaaacaatctttaccaagaatgggagcgagagtttcagctatgggaggaacaactccattcctatcctcataaagatcagcttcaggagtatgagaagca

SEQ ID NO: 9974 - protein, 96 aa, Homo sapiens
MSFREQHLAQLQQLQQMHQKQMQCVLQPHHLPPPPLPPPPVMPGGGYGDWQPPPPPMPPPPGPALSYQKQQQYKQSLPRMGARVSAMGGTTPFLSS

SEQ ID NO: 9975 - DNA, 407 bp, Homo sapiens
cagactacaattgtgagtcctgaactgtagctgcctcaaagcgccttcatgatactattctgaagtgactactctgaaatgtggacagtgaagtttggtgaatttggtcatttagtttcttcaaagataatgagattgtgtttcccctaaggatgtatttacagctagtcagtggaaactgaatccattcccagttttaatgcttttccagttcaaacgtgatatgcatgtatgtgtctctttctaacccttcgagcttctctctgtgtacgatttagggttacattccgaaaagcaaatgggagatggacacatctgaggcaaagctagacaagttggatggcttgaggactggtactaaaaggaaacgtgactgggaggccattgccagcagaatggaggattat

SEQ ID NO: 9976 - protein, 33 aa, Homo sapiens
MDTSEAKLDKLDGLRTGTKRKRDWEAIASRMED

SEQ ID NO: 9977 - DNA, 1292 bp, Homo sapiens
gctcctctttaagtctcctcccctgccttataccttgacttcagatagtttttaactcttgaaccactcaccaaaaccaacattagagcacaggagatcctacaggtagcaaagaatacagaatgctgtacattactcattccttcttgggtttctttgtttctgtgattcagcttgttacagatatcagatgggttcttgggattaacttcctctataacaaaaacgtggttctgtagagttggttatattagaattttgcctaaatggctaggctttaaaatataatttacttttaaaatatttgcttgcttgggtataaaatggtagcttacttggactttaatttgtatttctttgatgactatggaaggtgaacctttcccttgtttgtttgctgaatttgtatattttagaaatacttatagttacagtggatgaaatataagtacctcaaacctttgagggctagttaagatttttctgtattataacaaatttatttttacaggaaaaaacaacagcaaaaatgtcgtaagtctcaaaagtacctctaggaaaattaaaagggacactgatattcaagaagccatttcaagctgaaagtcattattctgctccttgtatgtttagtggttcggtaatcatttattcattccatatgttgaatgtctttgtacgaagtctatgaatgagtcctcttaaggagctgacatccagtggaggaattcaacatgtaaataaataattttactatagcatcagtataaattagagatattaacaaaatacaatagtttccaaaatattttaattccaacttcatttgttttttgtttttttgttttttatttttgagacagagtctcactctgttgcccagcctggagtgcagtggtgattttggctcactgcaacctctgcctcccaggttcaagccattctcatgcctcagcctcctgagtagctgggattacaggcacccactgtgcctggcctaattccaatgttaaaatcttgaacatttattcgcaaacatactactcatttcaaaaacacctacacattttttcttctaatcctatattctttattttatctgagtttaaaacttagaatttaaactgtagatttaaaagtagcaaggtgagattgatcagtatatttaactatgtgctgaggttgataagtatatttaaggcatcctgagcacagtattgtgttttcacataaatgcccaagacttagttcgtaatgatctttcgctaaaatgtgtatccttgatccaggtg

SEQ ID NO: 9978 - protein, 38 aa, Homo sapiens
MLYITHSFLGFFVSVIQLVTDIRWVLGINFLYNKNVVL

SEQ ID NO: 9979 - DNA, 1045 bp, Homo sapiens
gctcctctttaagtctcctcccctgccttataccttgacttcagatagtttttaactcttgaaccactcaccaaaaccaacattagagcacaggagatcctacaggtagcaaagaatacagaatgctgtacattactcattccttcttgggtttctttgtttctgtgattcagcttgttacagatatcagatgggttcttgggattaacttcctctataacaaaaacgtggttctgtagagttggttatattagaattttgcctaaatggctaggctttaaaatataatttacttttaaaatatttgcttgcttgggtataaaatggtagcttacttggactttaatttgtatttctttgatgactatggaaggtgaacctttcccttgtttgtttgctgaatttgtatattttagaaatacttatagttacagtggatgaaatataagtacctcaaacctttgagggctagttaagatttttctgtattataacaaatttatttttacaggaaaaaacaacagcaaaaatgtcgtaagtctcaaaagtacctctaggaaaattaaaagggacactgatattcaagaagccatttcaagctgaaagtcattattctgctccttgtatgtttagtggttcggtaatcatttattcattccatatgttgaatgtctttgtacgaagtctatgaatgagtcctcttaaggagctgacatccagtggaggaattcaacatgtaaataaataattttactatagcatcagtataaattagagatattaacaaaatacaatagtttccaaaatattttaattccaacttcatttgttttttgtttttttgttttttatttttgagacagagtctcactctgttgcccagcctggagtgcagtggtgattttggctcactgcaacctctgcctcccaggttcaagccattctcatgcttgtaatcctagcactttgggcggccaaggcaggaggattgcttgagtccagcagtttgagaccagcctgggcaacatagtgagactctgactct

SEQ ID NO: 9980 - protein, 38 aa, Homo sapiens; identical to SEQ ID NO: 9978

SEQ ID NO: 9981 - DNA, 2475 bp, Homo sapiens
tcaaaagcagacatatcaaaatccggaagttaactgtggaaagcagtgattatttgattggcaaaggaaaaaggggtaagtcagggaaggatgactagactcatgccaagtggataaggttagggaaaagacatttcaggaagaatgactagtacatatatgcagagttatagagacatgaaatggtgcgatgcgctctgagtgctagaaggaagtctgtattgtttgtataaaatgccataggcactggccagagatgttgcaggaaagtgtagttggggccagatcaagagggacctgagttcttggactttgcctggtaggtaggggaaggagttaaagcaaatgaatcacaactgtgtgttttaggaagatcactctggcagcatgaatctggagcgggtgagtacagacaggaagactaggtagagattagtgctttgctttcaggtgaaaaaaaaatgaggtcagtgaattattaaataaaaaggaatggcagaggagaaagagaggacaggattgagctgaactgttcaggagctggaatggttaggacttggattgtccagagagttttctctttgtgacttaaaatatatggcttttcccagttttcctgggttagtttttaattttttaaacttgcggtttcaaatgagtcattctaccccttagactgtccagagagggagggggctctttgcatatttatttttcctaaagctcagcctaatgctatgttctttttaggtcagatgggcagacctggaagagaagaaggatgcagataggaaaagggccataggttttgtggtcggacagactgattgggagaagatcacagatgaaagtggtcacctggctgaaaaagccctcaatcgaaccaaatatatatgagacttagtttttgaacggagtcattattcctctaaggtggttcgctttgaggtggtctgaagccaaggcctcgcggagcttctttgtgtgtcaccttgcttccacgtttcagttcttgttttgtttctactgctttagttttttttaaagttctccagtgtccccaagaggtattagaatcttgctgtacccaagcaagacgttaatttttcttttaactgttttggggagggagggagtgatagcttaactgctgaagccaggcgggggtctgctggaggattccaacagagagtatttcctccactgtacaatgtcacagactatctctatcatcattgctttgtggctgtttctgttttttactgtatgtaactggtagctgattgtactaggattaaaaacaataaactttcatgataaagccgatgagattcatgggctatacagcatgggcccttttctcttgttttcttaattttatttttaattgctttttaaatatggtatgtcctaattaaatgctagctgaacatcccaaaacctttttttcattgaatattatatggctcaatgattccgtagcacatgttgtaaaacacagggttcaaatgatgttcaaaacactcatctttgttttatagctgatttctctatctttgtgtcttgaagactgaccaagttcaaatattcatcagttccctggagcatatccattctgtaacatgatgctttatttaaaaattttttttgatcctctctctgttcttccctctcttctttccttccttcttcttttcactttctgcctttatgctgttaggtttttattttttcctgatctggctttgaattctggtagacagaactgatgtattctgtggaactcaagcttgttgccttcatttgaacttgaattgtggatttttaaatgaagattgcagggaaagagtataaagatgcagagcactctggcatgtaacctttaagcctgtcaggttttcaagttcttgccagattgttcattactggaaagcatggccttctgcacagaatttcctctcttgtggttaataccaggtggaacccagaaacatacagagataaaacccaaatattatttctatgtaaacacagaaaagggactcttccctttttcatcctgcaaagaaaaaagtcatcttttagcatgaaagaagatgagagagccttcttcctcaagcataatttgcattttgtaatccaactcagtaatttgtaaatgtgttcactgaagacttcaatattttgaaatattctctttcaggccacagatgaaaatcctttacttttatgacctacattaaagactgtatgaatagagctaatagttactagcatttgaatagtatcactttgggttcaacaaattgatattatagtactgaatacccctaatttaatggaaattctaacaactttctgtacttttatcttccctgaaaatctgaatttttaagcaagtgactttaagttcattaagtcaatattgaatgtataaattgctacattaaataacttctgctgtttgtagtattt

SEQ ID NO: 9982 - protein, 51 aa, Homo sapiens
MAFCTEFPLLWLIPGGTQKHTEIKPKYYFYVNTEKGLFPFSSCKEKSHLLA

SEQ ID NO: 9983 - DNA, 1276 bp, Homo sapiens
aaacatcaggttttattacatataaatattttgagcagcacctttttactagtattttggaaaagcatttctgtcttcattgagcgaagtggcaatacatatgtaatatactgatgctgaatttgcggtgggttgatttttgtccattgttggctttcacatggaagcatgaatattgtctccccgctaccccttttgagtgacatccttccagtacctccatttctcaagttgcaggaaggatctgagtctctccctgcggagacagccctgaagaactcctgtaacgtcaagctggcaatttccaagaagcaatctggaacctgcatttccaaagagacccacaagaaagaaaagacgtgaggttgggaagcactggtgccagagccctcactagcgggtgctgcctgtttcttgggtagtgggctaggagcatccctgctctagtggcccctgattctgcaaccctaggactcctctgcttcctcatcagacacaaaccttgataagacagctccagtgagaaagccctgggagaaggtgaattaaggacacttcctttgtaggaggagctgatctcgctaatgggcgactttttaactaagcaggtcagaaaatcttactgaaagtaaatctgtggctcaaagagacttcggtattcttttccctagtactaactgtggaaaggagtgcccccaagcttctgactgtcatacctcattccactgccttttagggctgggtctgaagagcttacactcctgctttcagagctggttgacgggggtgctgttctagaatcctaacccagactggcaccatgaatgatgggttgccccactgccaagctccagacccagcttggcttggggcttgctgccactgcaggtcaaatgaccaccctatgtggaaagatgcagcagtgctgcctgtcccatactggccgtgaccccttgagcctcagaaagggagacatggacaattttccccacaggtagtcttagctttccaaacatactctgactcaccagtcaaccagtggatgaccacagttcttgtattttttggaggtatcaataaaccactctttgtgatcacagtcaagggagaagtcaagaagagggaagtgtaatctgtgaccagatatacccggcacctgcagaatcagatgccagcctaacagctgtcagctgtgcatgaggcaacatgcatctcttgattaggaatgtgcgccagtgacacctaggctcacctttcactgacgctttacctctga

SEQ ID NO: 9984 - protein, 64 aa, Homo sapiens
MNIVSPLPLLSDILPVPPFLKLQEGSESLPAETALKNSCNVKLAISKKQSGTCISKETHKKEKT

SEQ ID NO: 9985 - DNA, 3359 bp, Homo sapiens
atggatccaaactccatcttgctttctcctcagccccagatctgctcccacctagcagaagcttgtacggaaggcgagagaagctcatcccctccagagctggatagagactccccgtttccctggagtcaggtccccagctccagccctacagaccccgaatggtttggtgatgagcacatccaggcaaagagggccagagtggagaccattgtccgaggcatgtgtctctccccgaatcctctggtgccaggcaatgcgcaagctggggtcagcccacgctgcccaaagaaggcccgagagaggaagaggaagcagaaccttcccacaccgcaaggcctcctgatgccagcccctgcctgggaccagggcaacaggaaggggggccctcgtgtgagagaacaacttcatctgctgaagcaacagctaagacatctgcaagagcacatcctacaggctgccaagcccagggacacagctcaggggccaggaggctgtggcacggggaaaggccctctgagtgcaaagcaggggaatggctgtgggcctcgcccctgggttgtggacggtgaccaccagcaaggtaccagcaaggacctctctggggcagaaaaacaccaagagtctgagaagcccagtttccttccttctggagcaccagcttcactagagattctgaggaaagagctgaccagggcagtgtcccaggctgtggactcggtattacaaaagttcaaccgctgcattacctcccagatgatcaagtggttcagcaactttcgtgagttttattacatccaaatggaaaaatctgcccggcaagcaatttcagatggtgtcacaaatcccaaaatgctggtggttctccgcaattcagaactttttcaagctctcaatatgcactacaacaagggaaatgactttgaggttccagattgcttcttggaaattgccagcttgacgttacaggagttcttcagggctgtctccgcagggagagactcagatccttcctggaagaaacccatttataaaattatttcgaaactggacagtgacatcccagagatattcaaatcttccagctatccccagtagctgtttcggggttaagatcccacaacgtgaggagtgactggctagggtttcctgggtttgtcttaaagggcaatttagctgtagtcatataaaaagggcacaaggaaatctcctctatcaaaacaggtactattaccattttgatcatttatttccctttccagaatcatcagaaatttaactataaaatgtactaactatattggtgtattggtagtatattgtaaaaggaacacaagtttccaatcagaagacttgaagctcaactccattgtttccaggtgttgtgaccctgggaacttcctggtatctctgtatctgtaaaatgaggttgttaaggattaaaggacagtatgtcctatgcaatgtcattcacacacaaatgtcagttttttgagcccctctttcagataaggttatcttatttggggtttttacaaattgctgtttttagtcacctaattataaagcgccatctatttgctagatactttcacatactttaagcttttcaccctgaaaagtagttattatcatcatttaaaagatgaccaaacagaagctttagaactgcaaggtaactcgccaaagcctatgaggctaggacatctgggttgatagggacagtcaggagcctggaggaaccaagactttctgatgcccaactgcatgctggacccatctcctgcagctaactcaggatctcaagcaggaccccacccctagtaagcatccagcgctgacagggcaccgtcacctgacaactcctgcccagcacttaggagcacttcaccgcccaagatttctgctgatcatttcagcaaactcaagacaaactttatgcaggacttgagtgttgctgtttattcacatttgtctgctggaagagtttatcagctggataatgcaaatagtctccagctgaccattgcaattggtgccccaacctcatatatgcagaagaagctgaacttcagactgtgaaaggtagaaagggccttaggagatcatctggcccatgctgcttaaattgggaaggaagaaccgcagtccagacaggaggcttgcacaggctgtgcacagccttgcagatgataaatggcataactgggacaaatgcagcatcacacagaaatggaaattctcccactccataacaaaattacagtccatggctgaccttccactgatgaaggaattcatgaaatcaacatttccccctgctgctggcccagcacaattgtgacccactcttgagtatataggcaaggcatgtacaaagctgagtaactgcatctgtcttctaagctagtcaggatcaagtctttgtaagcactgccaaaggtacgccgggtggggtggggtgggggtaatacacagctcgggctttgtagtcctgataaggggtgtctgtgagttcattagcttctttcctgtctatataaaacaagtttcatattcggctactcaacttccataatttttctggtggggtgttgctggagcagatgagataaaatccctaaactattactagaactatcagcataaaaagtatgaaagatgaattttcctttgaattttctcttcaaacagctgaaaggaaaaacaaaacagacttagcccaaacccatctttacaggctaaaggttaagtgccctccagtacatccaattgcactcagaagatctttgccctattttcacaaaaatgaaggaatctgccaaacctaagttttaaacacaggcaagcatggagtgctctgagcaagggcaatcagttttctgtgtccggacatagtagaagaaccctctatccagagtgacattacatacctaagttagacatacaggggaaacaagttcacatgactgtccaatagagagcagcccttcttctgtcccaaacctgaaattcattagtgtgtgtttaaagactgagccaagtcacctccagggcagtgaaccttgtctcagggaccaatgagatgaaatgtacaagctcaaattgaaaacatttgtgtactgcagtctttccaggaagtgttctctaaccactgagctaaacacagaagaatgtataaatatgtatgctctgccaacagaagaattctatttgattataattttctgtttctatcaagtgcgtatccctctctgttggaaacacatggagtgtaagctgagtgggttattattttagcaatcatactttgccaaagatctggtcattttttccactaaggtatatgagggcactat

SEQ ID NO: 9986 - protein, 365 aa, Homo sapiens
MDPNSILLSPQPQICSHLAEACTEGERSSSPPELDRDSPFPWSQVPSSSPTDPEWFGDEHIQAKRARVETIVRGMCLSPNPLVPGNAQAGVSPRCPKKARERKRKQNLPTPQGLLMPAPAWDQGNRKGGPRVREQLHLLKQQLRHLQEHILQAAKPRDTAQGPGGCGTGKGPLSAKQGNGCGPRPWVVDGDHQQGTSKDLSGAEKHQESEKPSFLPSGAPASLEILRKELTRAVSQAVDSVLQKFNRCITSQMIKWFSNFREFYYIQMEKSARQAISDGVTNPKMLVVLRNSELFQALNMHYNKGNDFEVPDCFLEIASLTLQEFFRAVSAGRDSDPSWKKPIYKIISKLDSDIPEIFKSSSYPQ

SEQ ID NO: 9987 - DNA, 8921 bp, Homo sapiens
cccaaagaggaaacatacccagcaaactcagttgattaaacatcaaacagacatacagacagatcccaaatcttctgttcaactggaaaggtcttttctctggagtcctgggaggcaagttatgggcagcactgcttctggccgcaccatgaagcctgagtctgcttgcgctctgcccagggccctgctctgtctgagcattgggcttctagctgcccccctccccacagcctgccgctgctaggaggtagaactttaggagtggtccttggcctgtttctacctgtcacctggctcacctcaccactcactcctcctccatcacagcaccccggccctccctgtccctggcctccctggctggggcatttgggggtccgctgggaggagtgcatcgctgaaggcttcttcctactctcctgcaccttctcctccttgagtcaaggcctccggatccacatggatagctgagatcttttcttggagaaagacgctttcctctttactccagtccctcacttccccacctgattttcctcctcttctgctggtcctgtctttttctactgcctctttattcaatttcttgcttgtgtgcccctctgggactctcttgtacactttcctccatctccactatctcaggatctgtgtgtgtgctgccttcctcctgtgtgctttctgtccccccatctctgtcttgtctttcccacttctattgccaaagggagagatcctctccgggctgttccctggcctgtctgctcctccgggctctgtcccagcagcgacaatgagctccacactccactcggttttcttcaccctgaaggtcagcatcctgctggggtccctgctggggctctgcctgggccttgagttcatgggcctccccaaccagtgggcccgctacctccgctgggatgccagcacacgcagtgacctgagtttccagttcaagaccaacgtctctacggggctgctcctctacctggatgatggcggcgtctgcgacttcctatgcctctccctggtggatggccgcgttcagctccgcttcagcatggactgtgccgagactgccgtgctgtccaacaagcaggtgaatgacagcagctggcacttcctcatggtgagccgtgaccgcctgcgcacggtgctgatgcttgatggcgagggccagtctggggagctgcagccccagcggccctacatggatgtggtcagtgacttgttccttggtggagtccctactgacatacgaccttctgccctgacccttgatggagttcaggccatgcccggcttcaaggggttaattctggatctcaagtatggaaactcggagcctcggcttctggggagccggggtgtccagatggatgccgagggaccctgtggtgagcgtccctgtgaaaatggtgggatctgctttctcctggacggccaccccacctgtgactgttctaccactggctatggtggcaagctctgctcagaaggcctctcccacctcatgatgagtgaacaaggtagaagtaaagctcgagaggagaatgtggccactttccgaggctcagagtatctgtgctacgacctgtctcagaacccgatccagagcagcagtgatgaaatcaccctctcctttaagacctggcagcgtaacggcctcatcctgcacacgggcaagtcggctgactatgtcaacctggctctgaaggatggtgcggtctccttggtcattaacctggggtccggggcctttgaggccattgtggagccagtgaatggaaaattcaacgacaacgcctggcatgatgtcaaagtgacacgcaacctccggcaggtgacaatctctgtggatggcattcttaccacgacgggctacactcaagaggactataccatgctgggctcggacgacttcttctatgtaggaggaagcccaagtaccgctgacttgcctggctcccctgtcagcaacaacttcatgggctgccttaaagaggttgtttataagaataatgacatccgtctggagctgtctcgcctggcccggattgcggacaccaagatgaaaatctatggcgaagttgtgtttaagtgtgagaatgtggccacactggaccccatcaactttgagaccccagaggcttacatcagcttgcccaagtggaacactaaacgtatgggctccatctcctttgacttccgcaccacagagcccaatggcctgatcctcttcactcatggaaagccccaagagaggaaggatgctcggagccagaagaatacaaaagtagacttctttgccgtggaactcctcgatggcaacctgtacttgctgcttgacatgggctctggcaccatcaaagtgaaagccactcagaagaaagccaatgatggggaatggtaccatgtggacattcagcgagatggcagatcaggtactatatcagtgaacagcaggcgcacgccattcaccgccagtggggagagcgagatcctggacctggaaggagacatgtacctgggagggctgccggagaaccgtgctggccttattctccccaccgagctgtggactgccatgctcaactatggctacgtgggctgcatccgcgacctattcattgatgggcgcagcaagaacattcgacagctggcagagatgcagaatgctgcgggtgtcaagtcctcctgttcacggatgagtgccaagcagtgtgacagctacccctgcaagaataatgctgtgtgcaaggacggctggaaccgcttcatctgcgactgcaccggcaccggatactggggaagaacctgcgaaagggaggcatccatcctgagctatgatggtagcatgtacatgaagatcatcatgcccatggtcatgcatactgaggcagaggatgtgtccttccgcttcatgtcccagcgagcttatgggctgctggtggctacgacctccagggactctgccgacaccctgcgtctggagctggatggggggcgtgtcaagctcatggttaacttaggcaaaggaccagagaccttgtatgcagggcagaagctcaatgacaacgagtggcacaccgttcgggtggtgcggagaggaaaaagccttaagttaaccgtggatgatgatgtggctgagggtacaatggtgggagaccatacccgtttggagttccacaacattgaaacgggaatcatgactgagaaacgctacatctccgttgtcccctccagctttattggccatctgcagagcctcatgtttaatggccttctctacattgacttgtgcaaaaatggtgacattgattattgtgagctgaaggctcgttttggactgaggaacatcatcgctgaccctgtcacctttaagaccaagagcagctacctgagccttgccactcttcaggcttacacctccatgcacctcttcttccagttcaagaccacctcaccagatggcttcattctcttcaatagtggtgatggcaatgacttcattgcagtcgagcttgtcaaggggtatatacactacgtttttgacctcggaaacggtcccaatgtgatcaaaggcaacagtgaccgccccctgaatgacaaccagtggcacaatgtcgtcatcactcgggacaatagtaacactcatagcctgaaagtggacaccaaagtggtcactcaggttatcaatggtgccaaaaatctggatttgaaaggtgatctctatatggctggtctggcccaaggcatgtacagcaacctcccaaagctcgtggcctctcgagatggctttcagggctgtctagcatcagtggacttgaatggacgcctgccagacctcatcaatgatgctcttcatcggagcggacagatcgagcgtggctgtgaaggacccagtaccacctgccaggaagattcatgtgccaaccagggggtctgcatgcaacaatgggagggcttcacctgtgattgttctatgacctcttattctggaaaccagtgcaatgatcctggcgctacgtacatctttgggaaaagtggtgggcttatcctctacacctggccagccaatgacaggcccagcacgcggtctgaccgccttgccgtgggcttcagcaccactgtgaaggatggcatcttggtccgcatcgacagtgctccaggacttggtgacttcctccagcttcacatagaacaggggaaaattggagttgtcttcaacattggcacagttgacatctccatcaaagaggagagaacccctgtaaatgacggcaaataccatgtggtacgcttcaccaggaacggcggcaacgccaccctgcaggtggacaactggccagtgaatgaacattatcctacaggcaacactgataatgaacgcttccaaatggtaaaacagaaaatccccttcaaatataatcggcctgtagaggagtggctgcaggaaaaaggccggcagttaaccatcttcaacactcaggcgcaaatagccattggtggaaaggacaaaggacgcctcttccaaggccaactctctgggctctattatgatggtttgaaagtactgaacatggcggctgagaacaaccccaatattaaaatcaatggaagtgttcggctggttggagaagtcccatcaattttgggaacaacacagacgacctccatgccaccagaaatgtctactactgtcatggaaaccactactacaatggcgactaccacaacccgtaagaatcgctctacagccagcattcagccaacatcagatgatcttgtttcatctgctgaatgttcaagtgatgatgaagactttgttgaatgtgagccgagtacaggtaggtcagccagaagctctaatgcagctagatcactccgtgccgcccttacatggacatggcgactcacttacacatttactcctatcatcttcatctcctgtgtagttcactcatagatatgaccctccccttcctgcatctttccttcccattctccccctttctttagcattgttaaaatttatgtgctgtcatccatctccctaaattaaagaaagcctaaaatttgtcaaaaagacaaaaaaatatatatatctgaaaacttataaatgcagaaattcattcaaaacccgttagagtcatagaattttttgaaaggcaaattataaaagtaaacaggtttttttgtttggtttttcaatcatagcaatcggaattattttaaattcaaaaattgatgccctcccaaaccccccaaagtaaaaatttgttaaagtgcagattttttttttctttttatgttatgtggtgtggatgtatgtgttgttgcctccctgtatcatcctctgttgtaaattattatatttgaaaaattagacattttgctcaaaagtttttaagaaatgacaacaaaaaaagcaagttacaagaatgtggcaattctatttgtccaagagcattcttacacaactttcttttgtaaatttttctttcatgccaaaaaacatgcgggcaatttgttgatgaggtgaattagttatccctcttcttgtagaagaccctttagctacccctcctattgctactcgtgcaccttccattacactcccccctacctttcgccccctcctcaccattattgagaccaccaaagattccctgtccatgacctctgaggcggggttaccttgcttgtcggaccaaggcagcgatggttgtgatgatgatggcttggtgatatctgggtatggctcaggggaaacctttgactctaacctgccccctactgatgatgaagatttttacaccaccttctccttggtaacagataagagtctttccacttcaatcttcgaaggtggctacaaagcacatgcgcccaagtgggaatccaaggactttagacctaacaaagtctccgaaactagtaggactactaccacatctttatcccctgagctgatccgcttcacagcttcctcctcgtctgggatggtgcccaaattgccagctggcaaaatgaataaccgtgatctcaaaccccagcctgatatagtcttgcttccgttgcccactgcctatgagctagacagcaccaaactgaagagcccactaattacttcccccatgttccgtaatgtgcccacagcaaaccccacggagccgggaatcagacgggttccgggggcctcagaggtgatccgggagtcgagcagcacaacagggatggtcgtcggcattgtggctgctgccgccctctgcatcttgatcctcctgtacgccatgtacaagtacaggaacagggacgaggggtcctatcaagtggacgagacgcggaactacatcagcaactccgcccagagcaacggcacgctcatgaaggagaagcagcagagctcgaagagcggccacaagaaacagaaaaacaaggacagggagtattacgtgtaaacatgcgaacactgctcacacgcgagttttcacagttatttctatccacgcctatgaatctttggacggtgagatctcacagatgtcagaactgctggaactatgaaatggggtatataaccacgactctggtggggaaaaccgttttttaaaggacacacacacacacagcgatgcatctctctctaaagctcagccacggctgcggcaaggtcccagcggtcgctgggagacagaaggttttgtgccctgctgtatcataaagcacacacttagcgctctggagccggacggtggctccaccacttccgcaggcctggaaacttccttctccggaggaccttttactaaaaggtagaagacttcatggcttacttgttccataactccaagtgagtctgtaatgtttgtgaagcttgactgtaaccatgttttttctgtttaattatgtaaaaaacaaaactacaacaacaaaaaaagaaaaaagttaaaaaagaaaaaaacaccaaaaaacaaaaacaaacaaaaaaaaaaacccacaacccttatctggttctgaccagtgtgcgtgtaactttatgatctgaggggaaaaatggcttttgggtttttgtttatttttttgataatgactggacatcagaagaggaaaaaaactcaaaacaaaagcgagagagactattgccatatgaactcaaaagctatcatggtgttcactctacatatcaggttatggtgtctctagaatctgttgtttgtttcctataagatgctttgctgaacacatagcaaaattcatgtgacggatgataaattgattcgaaaagctggtcccccaggatctaatttcagaatttaccacccaaacccggaacagatgggtttagggctggtgttatcagagctattggctttacgtaacaatattgttcctgtccattcacccagccaaattgtgttaaagaggaaagccccacaaactaaaacagcctttcctagggaagaggaaggggaggtgggctggatctgtgactgattgaaatgcatgcaaataaaaaagacaatattaaagtctgttatcaaaccagacagtaggggagttcaactcgtgatggaaccacaaaaggtcacacaagccaaccatgtcatgccagagtacaaaacacatagttctttccccgccccgaatgtgacaatggttttcatagtggtttaattttgtagcctgacatttatggataactctgtccttccatttgctcacttctctcttcacccatcttttttaaaaacaaataaatgaataaagctgctgtgacacacacacaaaaggaatttaatagtataatatatatataaataaatatatatacagatatatttatcatggtatgtttgatgggatgactgacacaggaaatctgttaaagtcttaaaatggaatgagaatgttgttttaaaagaaaatagcaaaacaacaaaaaagcaaaccttaaaatgtgaagaaagtgtgaattttagttttgtcacagttaactgtgtcaaagagaattaaaaaaaaaaacttcagattttgtttacatattttactacatttttgctggtataattccttagccacctatgtacatactgctttaagaaatgtttttttcctgtttatttctgtttggtttatattctggttgtctttttctttttgtaaagaggaaacaatgtacagaaaaacaataaactggttgtatggccatagctatccgaaaagcaagagacaaagcaagacaaatattcacacaaaaatgaagtgtgtcctctggagggtcagatatacaatttcttttgtacagatgaaaatcaatcagctgcttagatttagaaatctactcttgctggtctttgtaagttgcatgaatatttgactttgaaaaaatatcttaacgacatggggcaaaaagtgcaatctaaatggtagcctttactaatgtgtgtggaaagaggtgttcctcattatctaatatttcaatgtgttaagagtttaatttttttgttatcattaaaaaagacaggattataaagagatatcaaagcacgattttagataacctaaacggcccagcctatacgaagttgattatatctcgatgtctgtaaaagattgctgttcttggagtcttgaggtcttgtgaattgatttcctgctttctttcatttttttcaatttaagtaataatacatttgttatattcctttcagtgtaagtttctatttggacaattttatgggaacatgtgcattctctatgtgagcttctatcatattcctgttttattagcagaacctaaaggaatttatttaatgatgttgtgacattactgctttttcttttttcttttcttagttcatatttgcattttcgttcaaggatatgcttagcaataaaatgttcttcccaaa

SEQ ID NO: 9988 - protein, 1392 aa, Homo sapiens
MSSTLHSVFFTLKVSILLGSLLGLCLGLEFMGLPNQWARYLRWDASTRSDLSFQFKTNVSTGLLLYLDDGGVCDFLCLSLVDGRVQLRFSMDCAETAVLSNKQVNDSSWHFLMVSRDRLRTVLMLDGEGQSGELQPQRPYMDVVSDLFLGGVPTDIRPSALTLDGVQAMPGFKGLILDLKYGNSEPRLLGSRGVQMDAEGPCGERPCENGGICFLLDGHPTCDCSTTGYGGKLCSEGLSHLMMSEQGRSKAREENVATFRGSEYLCYDLSQNPIQSSSDEITLSFKTWQRNGLILHTGKSADYVNLALKDGAVSLVINLGSGAFEAIVEPVNGKFNDNAWHDVKVTRNLRQVTISVDGILTTTGYTQEDYTMLGSDDFFYVGGSPSTADLPGSPVSNNFMGCLKEVVYKNNDIRLELSRLARIADTKMKIYGEVVFKCENVATLDPINFETPEAYISLPKWNTKRMGSISFDFRTTEPNGLILFTHGKPQERKDARSQKNTKVDFFAVELLDGNLYLLLDMGSGTIKVKATQKKANDGEWYHVDIQRDGRSGTISVNSRRTPFTASGESEILDLEGDMYLGGLPENRAGLILPTELWTAMLNYGYVGCIRDLFIDGRSKNIRQLAEMQNAAGVKSSCSRMSAKQCDSYPCKNNAVCKDGWNRFICDCTGTGYWGRTCEREASILSYDGSMYMKIIMPMVMHTEAEDVSFRFMSQRAYGLLVATTSRDSADTLRLELDGGRVKLMVNLGKGPETLYAGQKLNDNEWHTVRVVRRGKSLKLTVDDDVAEGTMVGDHTRLEFHNIETGIMTEKRYISVVPSSFIGHLQSLMFNGLLYIDLCKNGDIDYCELKARFGLRNIIADPVTFKTKSSYLSLATLQAYTSMHLFFQFKTTSPDGFILFNSGDGNDFIAVELVKGYIHYVFDLGNGPNVIKGNSDRPLNDNQWHNVVITRDNSNTHSLKVDTKVVTQVINGAKNLDLKGDLYMAGLAQGMYSNLPKLVASRDGFQGCLASVDLNGRLPDLINDALHRSGQIERGCEGPSTTCQEDSCANQGVCMQQWEGFTCDCSMTSYSGNQCNDPGATYIFGKSGGLILYTWPANDRPSTRSDRLAVGFSTTVKDGILVRIDSAPGLGDFLQLHIEQGKIGVVFNIGTVDISIKEERTPVNDGKYHVVRFTRNGGNATLQVDNWPVNEHYPTGNTDNERFQMVKQKIPFKYNRPVEEWLQEKGRQLTIFNTQAQIAIGGKDKGRLFQGQLSGLYYDGLKVLNMAAENNPNIKINGSVRLVGEVPSILGTTQTTSMPPEMSTTVMETTTTMATTTTRKNRSTASIQPTSDDLVSSAECSSDDEDFVECEPSTGRSARSSNAARSLRAALTWTWRLTYTFTPIIFISCVVHS

SEQ ID NO: 9989 - DNA, 6140 bp, Homo sapiens
caggactggagggcttgaggaatgtggtggtccctctcttcgttgtttctgccccctgaggttgtgctttctcagggatatgcactctgcacttccattcctgcagtgaaattaactcgagcttggcagctcgagaggagaatgtggccactttccgaggctcagagtatctgtgctacgacctgtctcagaacccgatccagagcagcagtgatgaaatcaccctctcctttaagacctggcagcgtaacggcctcatcctgcacacgggcaagtcggctgactatgtcaacctggctctgaaggatggtgcggtctccttggtcattaacctggggtccggggcctttgaggccattgtggagccagtgaatggaaaattcaacgacaacgcctggcatgatgtcaaagtgacacgcaacctccggcaggtgacaatctctgtggatggcattcttaccacgacgggctacactcaagaggactataccatgctgggctcggacgacttcttctatgtaggaggaagcccaagtaccgctgacttgcctggctcccctgtcagcaacaacttcatgggctgccttaaagaggttgtttataagaataatgacatccgtctggagctgtctcgcctggcccggattgcggacaccaagatgaaaatctatggcgaagttgtgtttaagtgtgagaatgtggccacactggaccccatcaactttgagaccccagaggcttacatcagcttgcccaagtggaacactaaacgtatgggctccatctcctttgacttccgcaccacagagcccaatggcctgatcctcttcactcatggaaagccccaagagaggaaggatgctcggagccagaagaatacaaaagtagacttctttgccgtggaactcctcgatggcaacctgtacttgctgcttgacatgggctctggcaccatcaaagtgaaagccactcagaagaaagccaatgatggggaatggtaccatgtggacattcagcgagatggcagatcaggtactatatcagtgaacagcaggcgcacgccattcaccgccagtggggagagcgagatcctggacctggaaggagacatgtacctgggagggctgccggagaaccgtgctggccttattctccccaccgagctgtggactgccatgctcaactatggctacgtgggctgcatccgcgacctattcattgatgggcgcagcaagaacattcgacagctggcagagatgcagaatgctgcgggtgtcaagtcctcctgttcacggatgagtgccaagcagtgtgacagctacccctgcaagaataatgctgtgtgcaaggacggctggaaccgcttcatctgcgactgcaccggcaccggatactggggaagaacctgcgaaagggaggcatccatcctgagctatgatggtagcatgtacatgaagatcatcatgcccatggtcatgcatactgaggcagaggatgtgtccttccgcttcatgtcccagcgagcttatgggctgctggtggctacgacctccagggactctgccgacaccctgcgtctggagctggatggggggcgtgtcaagctcatggttaacttagactgtatcaggataaactgtaactccagcaaaggaccagagaccttgtatgcagggcagaagctcaatgacaacgagtggcacaccgttcgggtggtgcggagaggaaaaagccttaagttaaccgtggatgatgatgtggctgagggtacaatggtgggagaccatacccgtttggagttccacaacattgaaacgggaatcatgactgagaaacgctacatctccgttgtcccctccagctttattggccatctgcagagcctcatgtttaatggccttctctacattgacttgtgcaaaaatggtgacattgattattgtgagctgaaggctcgttttggactgaggaacatcatcgctgaccctgtcacctttaagaccaagagcagctacctgagccttgccactcttcaggcttacacctccatgcacctcttcttccagttcaagaccacctcaccagatggcttcattctcttcaatagtggtgatggcaatgacttcattgcagtcgagcttgtcaaggggtatatacactacgtttttgacctcggaaacggtcccaatgtgatcaaaggcaacagtgaccgccccctgaatgacaaccagtggcacaatgtcgtcatcactcgggacaatagtaacactcatagcctgaaagtggacaccaaagtggtcactcaggttatcaatggtgccaaaaatctggatttgaaaggtgatctctatatggctggtctggcccaaggcatgtacagcaacctcccaaagctcgtggcctctcgagatggctttcagggctgtctagcatcagtggacttgaatggacgcctgccagacctcatcaatgatgctcttcatcggagcggacagatcgagcgtggctgtgaaggacccagtaccacctgccaggaagattcatgtgccaaccagggggtctgcatgcaacaatgggagggcttcacctgtgattgttctatgacctcttattctggaaaccagtgcaatgatcctggcgctacgtacatctttgggaaaagtggtgggcttatcctctacacctggccagccaatgacaggcccagcacgcggtctgaccgccttgccgtgggcttcagcaccactgtgaaggatggcatcttggtccgcatcgacagtgctccaggacttggtgacttcctccagcttcacatagaacaggggaaaattggagttgtcttcaacattggcacagttgacatctccatcaaagaggagagaacccctgtaaatgacggcaaataccatgtggtacgcttcaccaggaacggcggcaacgccaccctgcaggtggacaactggccagtgaatgaacattatcctacaggccggcagttaaccatcttcaacactcaggcgcaaatagccattggtggaaaggacaaaggacgcctcttccaaggccaactctctgggctctattatgatggtttgaaagtactgaacatggcggctgagaacaaccccaatattaaaatcaatggaagtgttcggctggttggagaagtcccatcaattttgggaacaacacagacgacctccatgccaccagaaatgtctactactgtcatggaaaccactactacaatggcgactaccacaacccgtaagaatcgctctacagccagcattcagccaacatcagatgatcttgtttcatctgctgaatgttcaagtgatgatgaagactttgttgaatgtgagccgagtacaggtaggtcagcaaaccccacggagccgggaatcagacgggttccgggggcctcagaggtgatccgggagtcgagcagcacaacagggatggtcgtcggcattgtggctgctgccgccctctgcatcttgatcctcctgtacgccatgtacaagtacaggaacagggacgaggggtcctatcaagtggacgagacgcggaactacatcagcaactccgcccagagcaacggcacgctcatgaaggagaagcagcagagctcgaagagcggccacaagaaacagaaaaacaaggacagggagtattacgtgtaaacatgcgaacactgctcacacgcgagttttcacagttatttctatccacgcctatgaatctttggacggtgagatctcacagatgtcagaactgctggaactatgaaatggggtatataaccacgactctggtggggaaaaccgttttttaaaggacacacacacacacagcgatgcatctctctctaaagctcagccacggctgcggcaaggtcccagcggtcgctgggagacagaaggttttgtgccctgctgtatcataaagcacacacttagcgctctggagccggacggtggctccaccacttccgcaggcctggaaacttccttctccggaggaccttttactaaaaggtagaagacttcatggcttacttgttccataactccaagtgagtctgtaatgtttgtgaagcttgactgtaaccatgttttttctgtttaattatgtaaaaaacaaaactacaacaacaaaaaaagaaaaaagttaaaaaagaaaaaaacaccaaaaaacaaaaacaaacaaaaaaaaaaacccacaacccttatctggttctgaccagtgtgcgtgtaactttatgatctgaggggaaaaatggcttttgggtttttgtttatttttttgataatgactggacatcagaagaggaaaaaaactcaaaacaaaagcgagagagactattgccatatgaactcaaaagctatcatggtgttcactctacatatcaggttatggtgtctctagaatctgttgtttgtttcctataagatgctttgctgaacacatagcaaaattcatgtgacggatgataaattgattcgaaaagctggtcccccaggatctaatttcagaatttaccacccaaacccggaacagatgggtttagggctggtgttatcagagctattggctttacgtaacaatattgttcctgtccattcacccagccaaattgtgttaaagaggaaagccccacaaactaaaacagcctttcctagggaagaggaaggggaggtgggctggatctgtgactgattgaaatgcatgcaaataaaaaagacaatattaaagtctgttatcaaaccagacagtaggggagttcaactcgtgatggaaccacaaaaggtcacacaagccaaccatgtcatgccagagtacaaaacacatagttctttccccgccccgaatgtgacaatggttttcatagtggtttaattttgtagcctgacatttatggataactctgtccttccatttgctcacttctctcttcacccatcttttttaaaaacaaataaatgaataaagctgctgtgacacacacacaaaaggaatttaatagtataatatatatataaataaatatatatacagatatatttatcatggtatgtttgatgggatgactgacacaggaaatctgttaaagtcttaaaatggaatgagaatgttgttttaaaagaaaatagcaaaacaacaaaaaagcaaaccttaaaatgtgaagaaagtgtgaattttagttttgtcacagttaactgtgtcaaagagaattaaaaaaaaaaacttcagattttgtttacatattttactacatttttgctggtataattccttagccacctatgtacatactgctttaagaaatgtttttttcctgtttatttctgtttggtttatattctggttgtctttttctttttgtaaagaggaaacaatgtacagaaaaacaataaactggttgtatggccatagctatccgaaaagcaagagacaaagcaagacaaatattcacacaaaaatgaagtgtgtcctctggagggtcagatatacaatttcttttgtacagatgaaaatcaatcagctgcttagatttagaaatctactcttgctggtctttgtaagttgcatgaatatttgactttgaaaaaatatcttaacgacatggggcaaaaagtgcaatctaaatggtagcctttactaatgtgtgtggaaagaggtgttcctcattatctaatatttcaatgtgttaagagtttaatttttttgttatcattaaaaaagacaggattataaagagatatcaaagcacgattttagataacctaaacggcccagcctatacgaagttgattatatctcgatgtctgtaaaagattgctgttcttggagtcttgaggtcttgtgaattgatttcctgctttctttcatttttttcaatttaagtaataatacatttgttatattcctttcagtgtaagtttctatttggacaattttatgggaacatgtgcattctctatgtgagcttctatcatattcctgttttattagcagaacctaaaggaatttatttaatgatgttgtgacattactgctttttcttttttcttttcttagttcatatttgcattttcgttcaaggatatgcttagcaataaaatgttcttcccaaa

SEQ ID NO: 9990 - protein, 1064 aa, Homo sapiens
MLGSDDFFYVGGSPSTADLPGSPVSNNFMGCLKEVVYKNNDIRLELSRLARIADTKMKIYGEVVFKCENVATLDPINFETPEAYISLPKWNTKRMGSISFDFRTTEPNGLILFTHGKPQERKDARSQKNTKVDFFAVELLDGNLYLLLDMGSGTIKVKATQKKANDGEWYHVDIQRDGRSGTISVNSRRTPFTASGESEILDLEGDMYLGGLPENRAGLILPTELWTAMLNYGYVGCIRDLFIDGRSKNIRQLAEMQNAAGVKSSCSRMSAKQCDSYPCKNNAVCKDGWNRFICDCTGTGYWGRTCEREASILSYDGSMYMKIIMPMVMHTEAEDVSFRFMSQRAYGLLVATTSRDSADTLRLELDGGRVKLMVNLDCIRINCNSSKGPETLYAGQKLNDNEWHTVRVVRRGKSLKLTVDDDVAEGTMVGDHTRLEFHNIETGIMTEKRYISVVPSSFIGHLQSLMFNGLLYIDLCKNGDIDYCELKARFGLRNIIADPVTFKTKSSYLSLATLQAYTSMHLFFQFKTTSPDGFILFNSGDGNDFIAVELVKGYIHYVFDLGNGPNVIKGNSDRPLNDNQWHNVVITRDNSNTHSLKVDTKVVTQVINGAKNLDLKGDLYMAGLAQGMYSNLPKLVASRDGFQGCLASVDLNGRLPDLINDALHRSGQIERGCEGPSTTCQEDSCANQGVCMQQWEGFTCDCSMTSYSGNQCNDPGATYIFGKSGGLILYTWPANDRPSTRSDRLAVGFSTTVKDGILVRIDSAPGLGDFLQLHIEQGKIGVVFNIGTVDISIKEERTPVNDGKYHVVRFTRNGGNATLQVDNWPVNEHYPTGRQLTIFNTQAQIAIGGKDKGRLFQGQLSGLYYDGLKVLNMAAENNPNIKINGSVRLVGEVPSILGTTQTTSMPPEMSTTVMETTTTMATTTTRKNRSTASIQPTSDDLVSSAECSSDDEDFVECEPSTGRSANPTEPGIRRVPGASEVIRESSSTTGMVVGIVAAAALCILILLYAMYKYRNRDEGSYQVDETRNYISNSAQSNGTLMKEKQQSSKSGHKKQKNKDREYYV

SEQ ID NO: 9991 - DNA, 2490 bp, Homo sapiens
gagcgcaagggccccctgtgacctctggaggggtatcctcctttgattaggtgactaatcgggtgacttggagttaataaaaaaaggagacaatccctggagcctgcatcaggtgagccctgggccctccctgaaagacatttgaggtgtgagagggctcagatgagaggaagcatccccatgtttggcttttgggttttgaagatgaaggggccacctggcaggaatgcaggcgacctccaggagctgagggtcagcaaggaatgagggcctcatccctacagccacaaggagctcaatccagccagcatatgaatgggctgggaaacgtgttcttccctggggccatcacatagggtacaataaatccctggggtcctgaaccacctaggatggaggtggccaacacctgccgtatgaggcatccctggccctgcctgaccgcagagagccagccgagctaggcactggctttgcaagacgtctccagatcatgcagggtcaaacgtttctactttttgcatgcctactaattttttattgtatgctgaacatcatgaatgatacatttcagaccttttgattctgtgtcttcctgtgaagaatgttgatataagtaacttgtggatcacctgactcctgcagagacgtggttttaagctttgtcagggcaggtccatttatattcatgccttagtcctggaatgtagccattgattctgggatgtggcccttgtgggtttctcatggaattccaaaatgcttataaagaaacaaagataaactctgaaaagcagaaaataaagaacaactgatcatgtacagggagaagtgattaatggctgacttcttatcagaattaatgataacaagaagacagtcaaatgccattcaatgtgcaaaagaaaaaaactcaaccaaaaattctatagctagtaaatccttcaaaattgaatgagcaataaaaacattctcagacaaacaaaaagaatgagtttctagaaggtctgctctataagaatgagtaaaggaagtgcctcaggctaacaggaaatgtatctacaggaagaaaggaagaacgctggaaatggtaaatatgtggatactatgaaagactgagtacacacatacacaaaagtaaacacatgcttaatgttttttaaacaccagcaagactgtctaaggcaaaaattataacactgtatcatttgatttattaaatacagtagacggcttctacttctggaagatggagtagatactttttctattcacgcttgctaagtacagctaaatgccttggacgttatatataaaacaaacataagaaatacaaaaaagtgaaaagaagaaagaaagctggctagggacctcaggatctcaagaacaccatggaattggcgtgtacagctaaatgccttggacgttatatataaaacaaacataagaaatacaaaaaagtgaaaagaagaaagaaagctggctagggacctcaggatctcaagaacatcatggaattgagttccctgggttttctttttgccttaaatatcccagacttggtgttaaataatctgggaacatggaaatgccaatgtgtgcagaccaaaacagccccaacaaaagcctgttctctcttggtaaaggatgagtaaatgggcaagctagtaatatagaaaatttttagacaagaacctctccacacctgtcaaataccacacaaacagctgcagccctaactccacccttgccctttaaaactgcagggggagcgtagctctctagccctgtggggttgtaagaaggcacatcagcccctccactggggtagcgtcaaagaaggctgaatgaggagtaaggactttcatccatgccaggggacactacaccccacagagtcaggggagaccacgtggagagcctggatttccattatcactcatcgctaatgagtgacccctccccatccctactgaagtggaatcaagacataaaggtcagcagtcgcaaggtcaccccagggtcaatggaagcaatgtggggatgagtgatgaggcatccctgggcctttcagccaaggtttaatcagtgcagccctagcagaggattttaactcctacccctgcccaacagtaaggaggagtctctcctttccttgcgtctcagtggaggctgagaggaaactttgatttccacctccacctggcagcaacaaaacagcattcctctttctccagtggggcagtgtcagtggaggcctgatgcaataggtttaaatatattctaggatccaaaaatataacacccaaaatgtcaggttttcaatttaaaaattactaattataccaagaaacaaaaaaataacagcttgaatgaagaaagacaatcaacagatgcttaaaccaagactccatagatgttgaaattctcagatgaaggctttaaaacagctatactaaaaatgcctcgaaaaacacgttcaacccaaat

SEQ ID NO: 9992 - protein, 58 aa, Homo sapiens
MPGDTTPHRVRGDHVESLDFHYHSSLMSDPSPSLLKWNQDIKVSSRKVTPGSMEAMWG

SEQ ID NO: 9993 - DNA, 490 bp, Homo sapiens
atgcttcagagaagggagaaagcagaacatcacagttcgccaatccaaggcagcctggcagataccacagtcgcaaacccactgtgtgcctggcgcccttgcggtcatcccagatttttgcccacatccctctgttccacccagaggccacctgcatgcaggcatggtggatggttgctgtgtgcagtgatggcctcctgggacctcttgctggccacggagttaaccaggagggaccatcaacctcggaaggcccagctccatgatgatgcctctctccagagacctcctgacctcctgacctgcacagcccgggagaccacagcccacagccgctgccccaggtgtccacaagcatctcagcccctccacagcccacgcatctcctctttcattggctcatggggagtgaaggacaatgtctgaattaaatgccgtgctttaaactgaaagggaaacttagcaaataaatgagagtaacaacactaga

SEQ ID NO: 9994 - protein, 141 aa, Homo sapiens [sequence omitted]

SEQ ID NO: 9995 - DNA, 2034 bp, Homo sapiens
ttaaggataagatgtttgttcctagcacattatttaaatgatctctagtgtcttttggcttttgcaaatgcaccatattttccattttttatttctaggtgacaactgttgatagatttcaaggtcaacagaatgactatattcttctttctctggtacgaaccagggcagtgggccatctgagggatgtccgtcgcttggtagtggccatgtctagagccagacttggactttatatcttcgccagagtatccctcttccaaaactgttttgaactgactccagctttcagtcagctcacagctcgcccccttcatttgcatataattccaacagaacctttcccaactactagaaagaatggagagagaccatctcatgaagtacaaataataaaaaatatgccccagatggcaaactttgtatacaacatgtacatgcatttgatacagactacacatcattatcatcagactttattacaactaccacctgctatggtagaagagggtgaggaagttcaaaatcaagaaacagaattggaaacagaagaagaggccatgactgttcaagctgacatcatacccagtccaacagacaccagctgccgtcaagaaactccagcctttcaaactgacaccacccccagtgagacaggagccacttccactccagaagccatccctgctttatctgagaccacccctactgtggtaggagctgtatctgcaccggcagaagctaacacacctcaggatgccacatctgccccggaagagaccaagtagccaaactgtagtccttctaaaggaggacatggcagtcaaaaagtctgagtaaagctgttttttgtattttatatttgcttctgccattttactgtcactaattaatgtttagttcttatatttgttaactgatttcggtgtcttgaatatatttttttaaattatgtgtatgaacaattctagtttcatttgttcaatcagaagagcaaataaccattcctttcatgttttgatcactgagtgtgtctgtaatcatacctacattaaaatcattttctatgaatatataatatatacttcacatttttagtgaacttctctaaagaagaggacagaatatactggacttaaccacgaatacccttgagtgtccaaattgggaaggaacttgtttcttctgttatactatcaaatgcttaaattctgtttccttttttcttacctttgtttgctgtctttatgtaaagatattattagcagtaagatacaggtttcttcaatctatcaaagtggttacatgcatttccttctctcaaatcttagaatgccttagaatcacctaagatgtctgtttattcttgaggcacacctcagactgaatgagtcagaatctcaggattagagcctaggaatctatattttaggaggttctccacaccactaatgtttgggttgctggcagagtggcatcagccaaggctggttaggctgagccaggatttgtcatcagctaaataggaggactctgccaaatcaatctgggcaagaagcaggatcctgagtctgggcaatgagagtcagagaacttaactcctgtgtgcagggtagaattttcccatggcagaaattctgagttttctgccttatttttcttgggataaccagccacaaggagaccttcaggtaaaatgtggttcaaatatgggaaggcagaggtacctgggaccttgctactcaagtatgatttgtgaaccaacagcatcaacatcgtattgaagtttgttatttatagaaatgcagaagtttgggctctgctccaaacctattaaatctaaatctacattgcaacaaagtccccaggtgattcacaggcactttgtagtttgagaagcactgtactaagattactgtgttgtcttcacatgaatgaggctataatgtagaattaccagtgaatgtgactaatgttttctgacaagggacctctgcttacaaggtccctgggcatggtgcccagaactggaaa

SEQ ID NO: 9996 - protein, 192 aa, Homo sapiens
MSRARLGLYIFARVSLFQNCFELTPAFSQLTARPLHLHIIPTEPFPTTRKNGERPSHEVQIIKNMPQMANFVYNMYMHLIQTTHHYHQTLLQLPPAMVEEGEEVQNQETELETEEEAMTVQADIIPSPTDTSCRQETPAFQTDTTPSETGATSTPEAIPALSETTPTVVGAVSAPAEANTPQDATSAPEETK

SEQ ID NO: 9997 - DNA, 5959 bp, Homo sapiens
caaagctcttggctcgctagctcagccccaacgcctgcatgaacttccggctacacgccattccgcttcccgaggaacgcttgggctgttgtacgggttccctacgggactctgaaggctgaggatatccggcccggagcgtttgtgcggcgcggagttaagcgccccggcagtaacttaagggaagtggaccagggttgccgctgcccagagcggtcctttagtttccactggagtggagggaagagtgctgccatggcagcccctgcgcagcccaagaagatcgtggcccctacggtgtcccaaatcaatgcggagttcgtgacccagttagcatgtaaatactgggctccccacatcaagaagaaatcaccttttgatataaaggttattgaagatatatatgaaaaagagattgtcaaatcaaggtttgctattagaaagataatgctcttggaatttagccagtatcttgaaaattatctctggatgaattattctcctgaggtatctagcaaggcctatttaatgtcaatctgctgtatggtgaatgagaagtttagagaaaacgtgcctgcatgggagatttttaagaagaagccagaccacttcccattcttttttaaacacatcttgaaggcggcattagctgaaactgatggtgaattttcacttcatgaacagacagtcttactactttttcttgatcattgcttcaatagtttggaagtagacttgatacgaagtcaagtacagcagcttatctccctcccaatgtggatgggcttacagctggcacgattggaattagaattaaaaaagacacctaagctaagaaaattctggaacttgattaaaaagaatgatgaaaagatggatccagaagcaagagaacaggcatatcaagagaggagatttctttcacaactcatccagaagtttatctctgtgctgaaatcagtcccactttctgaacctgtcactatggacaaagttcattactgtgaaagattcattgaacttatgattgatctagaggccctgctacccacaaggcgctggtttaataccatcctggatgattcccaccttctggttcactgttacctttccaatcttgttcgtagagaagaggatggccatcttttttcccagcttttggacatgcttaaattctatactggttttgaaattaatgaccaaactggaaatgctctgacagagaatgagatgaccacaattcactatgatagaattacttctctacagagagctgcttttgcacattttcctgaactctatgattttgccctctcaaatgtggcagaagtagatactcgggagtccttggtcaagttttttggacctcttagttcaaacacactccaccaggtggcatcatacctctgcttgttgccaactcttcctaaaaatgaagacacaacttttgataaagaatttcttctagaattgctggtatctcgtcatgaacgtcgaatttctcagattcagcagttgaaccagatgcctttgtatccaactgagaaaattatatgggatgaaaatattgtcccaactgagtactattctggagaaggttgtcttgctcttcccaaattgaatttgcagtttttgactcttcatgactacctgctaaggaactttaacctcttccgcttagaatcaacttatgaaattcgtcaggacattgaagatagtgtcagcagaatgaagccatggcaatctgaatatggcggtgtagtgtttggtggttgggcgcgaatggcccagcccattgtggctttcactgtcgttgaagtggccaaacccaacataggtgaaaactggccaacccgagttcgtgcagatgttaccataaatctcaatgtcagagatcacatcaaagatgaatgggaaggtcttcgtaagcatgatgtatgctttttaattaccgtacgtcccacaaaaccttatggcactaagtttgaccggaggagaccttttattgagcaggttggcctggtttatgtcagaggctgtgaaattcagggcatgctggatgataaaggacgtgtcattgaagatggacctgaacccagacccaatcttagaggagaatcaaggacatttagagtgtttttggatccaaaccagtatcaacaagatatgaccaatactatacaaaatggagcagaggatgtgtatgaaacttttaatataataatgaggagaaaaccaaaggaaaataactttaaggctgtgctggagactattcggaacctgatgaatactgattgtgtggtacctgactggctgcacgatatcattttaggttatggggacccaagtagtgcacattattcgaaaatgcccaatcagattgccacccttgatttcaatgatacatttctctccattgagcatttaaaagccagcttccctggtcataatgttaaagtaactgtagaagaccctgctctacaaataccccctttcaggataacttttccagtaagaagtggaaaagggaagaaaaggaaagatgcggatgtggaagatgaagacaccgaggaagcaaaaaccttaattgttgagccccatgttattcctaataggggtccttatccttataatcaacccaaacgtaatacgattcagttcactcatacacagatagaagccatccgtgctggaatgcagcctgggctgactatggttgtgggcccacctggtacaggcaaaacagatgtggcagttcagatcatatccaacatctaccacaacttcccagaacagaggactctaattgttactcattccaatcaggccctaaaccagttgtttgagaaaatcatggcattagacattgatgagcgccacctactgcgtcttggtcatggagaagaagagctggagacagagaaagatttcagcaggtatggaagagttaattatgttctggctcgaagaatagaacttttagaagaagtcaaacgattgcaaaagagtctaggggttccaggagatgcctcatatacctgtgaaactgcaggctatttcttcttataccaggtaatgtctcgctgggaagagtatatcagcaaagtgaaaaataaaggtagtacattgccagatgttacggaagtctccactttcttccctttccatgaatactttgcaaatgctcctcaacccatttttaaaggaagatcttatgaagaagacatggaaattgctgaaggatgtttcaggcatattaagaaaatctttacgcagcttgaggaattcagagcctctgaattgcttcgaagtggactggacagatctaaataccttttagtgaaagaagccaaaattattgctatgacctgtactcatgctgccttaaaacgacatgacttggtcaagctaggtttcaagtatgacaacattttgatggaagaggctgctcagattctggagatagaaacttttatccctcttcttctacagaatcctcaggatggatttagccgactaaaacgatggattatgattggcgatcatcaccagttacctccagttattaagaacatggcctttcaaaagtactcaaacatggagcagtctctcttcactcgctttgttcgcgttggagttccgactgttgaccttgatgctcaagggagagccagagcaagcttgtgcaacctctacaactggcgatacaagaatctaggaaacttaccccatgtgcagctcttgccagagtttagtacagcaaatgctggcttactgtatgacttccagctcattaatgttgaagattttcaaggagtgggagaatctgaacctaatccttacttctatcagaatcttggagaggcagaatatgtagtagcactttttatgtacatgtgtttacttggttaccctgctgacaaaatcagtattctaacaacatataatggccaaaagcatcttattcgcgacatcatcaatagacgatgtggaaacaatccattgattggaagaccaaacaaggtgacaactgttgatagatttcaaggtcaacagaatgactatattcttctttctctggtacgaaccagggcagtgggccatctgagggatgtccgtcgcttggtagtggccatgtctagagccagacttggactttatatcttcgccagagtatccctcttccaaaactgttttgaactgactccagctttcagtcagctcacagctcgcccccttcatttgcatataattccaacagaacctttcccaactactagaaagaatggagagagaccatctcatgaagtacaaataataaaaaatatgccccagatggcaaactttgtatacaacatgtacatgcatttgatacagactacacatcattatcatcagactttattacaactaccacctgctatggtagaagagggtgaggaagttcaaaatcaagaaacagaattggaaacagaagaagaggccatgactgttcaagctgacatcatacccagtccaacagacaccagctgccgtcaagaaactccagcctttcaaactgacaccacccccagtgagacaggagccacttccactccagaagccatccctgctttatctgagaccacccctactgtggtaggagctgtatctgcaccggcagaagctaacacacctcaggatgccacatctgccccggaagagaccaagtagccaaactgtagtccttctaaaggaggacatggcagtcaaaaagtctgagtaaagctgttttttgtattttatatttgcttctgccattttactgtcactaattaatgtttagttcttatatttgttaactgatttcggtgtcttgaatatatttttttaaattatgtgtatgaacaattctagtttcatttgttcaatcagaagagcaaataaccattcctttcatgttttgatcactgagtgtgtctgtaatcatacctacattaaaatcattttctatgaatatataatatatacttcacatttttagtgaacttctctaaagaagaggacagaatatactggacttaaccacgaatacccttgagtgtccaaattgggaaggaacttgtttcttctgttatactatcaaatgcttaaattctgtttccttttttcttacctttgtttgctgtctttatgtaaagatattattagcagtaagatacaggtttcttcaatctatcaaagtggttacatgcatttccttctctcaaatcttagaatgccttagaatcacctaagatgtctgtttattcttgaggcacacctcagactgaatgagtcagaatctcaggattagagcctaggaatctatattttaggaggttctccacaccactaatgtttgggttgctggcagagtggcatcagccaaggctggttaggctgagccaggatttgtcatcagctaaataggaggactctgccaaatcaatctgggcaagaagcaggatcctgagtctgggcaatgagagtcagagaacttaactcctgtgtgcagggtagaattttcccatggcagaaattctgagttttctgccttatttttcttgggataaccagccacaaggagaccttcaggtaaaatgtggttcaaatatgggaaggcagaggtacctgggaccttgctactcaagtatgatttgtgaaccaacagcatcaacatcgtattgaagtttgttatttatagaaatgcagaagtttgggctctgctccaaacctattaaatctaaatctacattgcaacaaagtccccaggtgattcacaggcactttgtagtttgagaagcactgtactaagattactgtgttgtcttcacatgaatgaggctataatgtagaattaccagtgaatgtgactaatgttttctgacaagggacctctgcttacaaggtccctgggcatggtgcccagaactggaaa

SEQ ID NO: 9998 - protein, 1485 aa, Homo sapiens; identical to SEQ ID NO: 1595

SEQ ID NO: 9999 - DNA, 1228 bp, Homo sapiens
ttaaggataagatgtttgttcctagcacattatttaaatgatctctagtgtcttttggcttttgcaaatgcaccatattttccattttttatttctaggtgacaactgttgatagatttcaaggtcaacagaatgactatattcttctttctctggtacgaaccagggcagtgggccatctgagggatgtccgtcgcttggtagtggccatgtctagagccagacttggactttatatcttcgccagagtatccctcttccaaaactgttttgaactgactccagctttcagtcagctcacagctcgcccccttcatttgcatataattccaacagaacctttcccaactactagaaagaatggagagagaccatctcatgaagtacaaataataaaaaatatgccccagatggcaaactttgtatacaacatgtacatgcatttgatacagactacacatcattatcatcagactttattacaactaccacctgctatggtagaagagggtgaggaagttcaaaatcaagaaacagaattggaaacagaagaagaggccatgactgttcaagctgacatcatacccagtccaacagacaccagctgccgtcaagaaactccagcctttcaaactgacaccacccccagtgagacaggagccacttccactccagaagccatccctgctttatctgagaccacccctactgtggtaggagctgtatctgcaccggcagaagctaacacacctcaggatgccacatctgccccggaagagaccaagtagccaaactgtagtccttctaaaggaggacatggcagtcaaaaagtctgagtaaagctgttttttgtattttatatttgcttctgccattttactgtcactaattaatgtttagttcttatatttgttaactgatttcggtgtcttgaatatatttttttaaattatgtgtatgaacaattctagtttcatttgttcaatcagaagagcaaataaccattcctttcatgttttgatcactgagtgtgtctgtaatcatacctacattaaaatcattttctatgaatatataatatatacttcacatttttagtgaacttctctaaagaagaggacagaatatactggacttaaccacgaatacccttgagtgtccaaattgggaaggaacttgtttcttctgttatactatcaaatgcttaaattctgtttccttttttctt

SEQ ID NO: 10000 - protein, 192 aa, Homo sapiens; identical to SEQ ID NO: 9996

SEQ ID NO: 10001 - DNA, 5771 bp, Homo sapiens
attccgcttcccgaggaacgcttgggctgttgtacgggttccctacgggactctgaaggctgaggatatccggcccggagcgtttgtgcggcgcggagttaagcgccccggcagtaacttaagggaagtggaccagggttgccgctgcccagagcggtcctttagtttccactggagtggagggaagagtgctgccatggcagcccctgcgcagcccaagaagatcgtggcccctacggtgtcccaaatcaatgcggagttcgtgacccagttagcatgtaaatactgggctccccacatcaagaagaaatcaccttttgatataaaggttattgaagatatatatgaaaaagagattgtcaaatcaaggtttgctattagaaagataatgctcttggaatttagccagtatcttgaaaattatctctggatgaattattctcctgaggtatctagcaaggcctatttaatgtcaatctgctgtatggtgaatgagaagtttagagaaaacgtgcctgcatgggagatttttaagaagaagccagaccacttcccattcttttttaaacacatcttgaaggcggcattagctgaaactgatggtgaattttcacttcatgaacagacagtcttactactttttcttgatcattgcttcaatagtttggaagtagacttgatacgaagtcaagtacagcagcttatctccctcccaatgtggatgggcttacagctggcacgattggaattagaattaaaaaagacacctaagctaagaaaattctggaacttgattaaaaagaatgatgaaaagatggatccagaagcaagagaacaggcatatcaagagaggagatttctttcacaactcatccagaagtttatctctgtgctgaaatcagtcccactttctgaacctgtcactatggacaaagttcattactgtgaaagattcattgaacttatgattgatctagaggccctgctacccacaaggcgctggtttaataccatcctggatgattcccaccttctggttcactgttacctttccaatcttgttcgtagagaagaggatggccatcttttttcccagcttttggacatgcttaaattctatactggttttgaaattaatgaccaaactggaaatgctctgacagagaatgagatgaccacaattcactatgatagaattacttctctacagagagctgcttttgcacattttcctgaactctatgattttgccctctcaaatgtggcagaagtagatactcgggagtccttggtcaagttttttggacctcttagttcaaacacactccaccaggtggcatcatacctctgcttgttgccaactcttcctaaaaatgaagacacaacttttgataaagaatttcttctagaattgctggtatctcgtcatgaacgtcgaatttctcagattcagcagttgaaccagatgcctttgtatccaactgagaaaattatatgggatgaaaatattgtcccaactgagtactattctggagaaggttgtcttgctcttcccaaattgaatttgcagtttttgactcttcatgactacctgctaaggaactttaacctcttccgcttagaatcaacttatgaaattcgtcaggacattgaagatagtgtcagcagaatgaagccatggcaatctgaatatggcggtgtagtgtttggtggttgggcgcgaatggcccagcccattgtggctttcactgtcgttgaagtggccaaacccaacataggtgaaaactggccaacccgagttcgtgcagatgttaccataaatctcaatgtcagagatcacatcaaagatgaatgggaaggtcttcgtaagcatgatgtatgctttttaattaccgtacgtcccacaaaaccttatggcactaagtttgaccggaggagaccttttattgagcaggttggcctggtttatgtcagaggctgtgaaattcagggcatgctggatgataaaggacgtgtcattgaagatggacctgaacccagacccaatcttagaggagaatcaaggacatttagagtgtttttggatccaaaccagtatcaacaagatatgaccaatactatacaaaatggagcagaggatgtgtatgaaacttttaatataataatgaggagaaaaccaaaggaaaataactttaaggctgtgctggagactattcggaacctgatgaatactgattgtgtggtacctgactggctgcacgatatcattttaggttatggggacccaagtagtgcacattattcgaaaatgcccaatcagattgccacccttgatttcaatgatacatttctctccattgagcatttaaaagccagcttccctggtcataatgttaaagtaactgtagaagaccctgctctacaaataccccctttcaggataacttttccagtaagaagtggaaaagggaagaaaaggaaagatgcggatgtggaagatgaagacaccgaggaagcaaaaaccttaattgttgagccccatgttattcctaataggggtccttatccttataatcaacccaaacgtaatacgattcagttcactcatacacagatagaagccatccgtgctggaatgcagcctgggctgactatggttgtgggcccacctggtacaggcaaaacagatgtggcagttcagatcatatccaacatctaccacaacttcccagaacagaggactctaattgttactcattccaatcaggccctaaaccagttgtttgagaaaatcatggcattagacattgatgagcgccacctactgcgtcttggtcatggagaagaagagctggagacagagaaagatttcagcaggtatggaagagttaattatgttctggctcgaagaatagaacttttagaagaagtcaaacgattgcaaaagagtctaggggttccaggagatgcctcatatacctgtgaaactgcaggctatttcttcttataccaggtaatgtctcgctgggaagagtatatcagcaaagtgaaaaataaaggtagtacattgccagatgttacggaagtctccactttcttccctttccatgaatactttgcaaatgctcctcaacccatttttaaaggaagatcttatgaagaagacatggaaattgctgaaggatgtttcaggcatattaagaaaatctttacgcagcttgaggaattcagagcctctgaattgcttcgaagtggactggacagatctaaataccttttagtgaaagaagccaaaattattgctatgacctgtactcatgctgccttaaaacgacatgacttggtcaagctaggtttcaagtatgacaacattttgatggaagaggctgctcagattctggagatagaaacttttatccctcttcttctacagaatcctcaggatggatttagccgactaaaacgatggattatgattggcgatcatcaccagttacctccagttattaagaacatggcctttcaaaagtactcaaacatggagcagtctctcttcactcgctttgttcgcgttggagttccgactgttgaccttgatgctcaagggagagccagagcaaggtaaaagagacaggaaaaaaaatcattcccatttaaggacatttgttccatgatccaagtatttgtgaatagcttttgtgtagactattagcattcttggctatccaggaacttggctatccataaatccaaaagcacttttgtcgacttctgcaagagatgtgaatggaccaaataatttatttccttcatttcattcattaatattaatttaagtaacttataatctaaaggcttcttttcattgtcccttctcctttcttcatgtccccaaaagatatacagttaatataattttaaaatctaaaaataaagtgaacaagaggagaacacaccaattcttacttcataaaggatgcaggccccatctcatagttacccccaaatgtcctcaatttttagtcttccttgattttttaatttaagggataaagatagcattgacctcagagagcgtaatagaactctcatttttgtagtaccttcagtcttctgacccttggttacttgaagtagggaagctaaggttgaaagagcattattgcttaaaagatgagccaaaatggctaacatgaaaatttaaaagaagcacagaaacagaaacctccttatgtatattaaaagagattttacactgctaatattttctgtttgtgggggaatttgtctttggaaagcttgtgcaacctctacaactggcgatacaagaatctaggaaacttaccccatgtgcagctcttgccagagtttagtacagcaaatgctggcttactgtatgacttccagctcattaatgttgaagattttcaaggagtgggagaatctgaacctaatccttacttctatcagaatcttggagaggcagaatatgtagtagcactttttatgtacatgtgtttacttggttaccctgctgacaaaatcagtattctaacaacatataatggccaaaagcatcttattcgcgacatcatcaatagacgatgtggaaacaatccattgattggaagaccaaacaaggtgacaactgttgatagatttcaaggtcaacagaatgactatattcttctttctctggtacgaaccagggcagtgggccatctgagggatgtccgtcgcttggtagtggccatgtctagagccagacttggactttatatcttcgccagagtatccctcttccaaaactgttttgaactgactccagctttcagtcagctcacagctcgcccccttcatttgcatataattccaacagaacctttcccaactactagaaagaatggagagagaccatctcatgaagtacaaataataaaaaatatgccccagatggcaaactttgtatacaacatgtacatgcatttgatacagactacacatcattatcatcagactttattacaactaccacctgctatggtagaagagggtgaggaagttcaaaatcaagaaacagaattggaaacagaagaagaggccatgactgttcaagctgacatcatacccagtccaacagacaccagctgccgtcaagaaactccagcctttcaaactgacaccacccccagtgagacaggagccacttccactccagaagccatccctgctttatctgagaccacccctactgtggtaggagctgtatctgcaccggcagaagctaacacacctcaggatgccacatctgccccggaagagaccaagtagccaaactgtagtccttctaaaggaggacatggcagtcaaaaagtctgagtaaagctgttttttgtattttatatttgcttctgccattttactgtcactaattaatgtttagttcttatatttgttaactgatttcggtgtcttgaatatatttttttaaattatgtgtatgaacaattctagtttcatttgttcaatcagaagagcaaataaccattcctttcatgttttgatcactgagtgtgtctgtaatcatacctacattaaaatcattttctatgaatatataatatatacttcacatttttagtgaacttctctaaagaagaggacagaatatactggacttaaccacgaatacccttgagtgtccaaattgggaaggaacttgtttcttctgttatactatcaaatgcttaaattctgtttccttttttctt

SEQ ID NO: 10002 - protein, 1142 aa, Homo sapiens
MAAPAQPKKIVAPTVSQINAEFVTQLACKYWAPHIKKKSPFDIKVIEDIYEKEIVKSRFAIRKIMLLEFSQYLENYLWMNYSPEVSSKAYLMSICCMVNEKFRENVPAWEIFKKKPDHFPFFFKHILKAALAETDGEFSLHEQTVLLLFLDHCFNSLEVDLIRSQVQQLISLPMWMGLQLARLELELKKTPKLRKFWNLIKKNDEKMDPEAREQAYQERRFLSQLIQKFISVLKSVPLSEPVTMDKVHYCERFIELMIDLEALLPTRRWFNTILDDSHLLVHCYLSNLVRREEDGHLFSQLLDMLKFYTGFEINDQTGNALTENEMTTIHYDRITSLQRAAFAHFPELYDFALSNVAEVDTRESLVKFFGPLSSNTLHQVASYLCLLPTLPKNEDTTFDKEFLLELLVSRHERRISQIQQLNQMPLYPTEKIIWDENIVPTEYYSGEGCLALPKLNLQFLTLHDYLLRNFNLFRLESTYEIRQDIEDSVSRMKPWQSEYGGVVFGGWARMAQPIVAFTVVEVAKPNIGENWPTRVRADVTINLNVRDHIKDEWEGLRKHDVCFLITVRPTKPYGTKFDRRRPFIEQVGLVYVRGCEIQGMLDDKGRVIEDGPEPRPNLRGESRTFRVFLDPNQYQQDMTNTIQNGAEDVYETFNIIMRRKPKENNFKAVLETIRNLMNTDCVVPDWLHDIILGYGDPSSAHYSKMPNQIATLDFNDTFLSIEHLKASFPGHNVKVTVEDPALQIPPFRITFPVRSGKGKKRKDADVEDEDTEEAKTLIVEPHVIPNRGPYPYNQPKRNTIQFTHTQIEAIRAGMQPGLTMVVGPPGTGKTDVAVQIISNIYHNFPEQRTLIVTHSNQALNQLFEKIMALDIDERHLLRLGHGEEELETEKDFSRYGRVNYVLARRIELLEEVKRLQKSLGVPGDASYTCETAGYFFLYQVMSRWEEYISKVKNKGSTLPDVTEVSTFFPFHEYFANAPQPIFKGRSYEEDMEIAEGCFRHIKKIFTQLEEFRASELLRSGLDRSKYLLVKEAKIIAMTCTHAALKRHDLVKLGFKYDNILMEEAAQILEIETFIPLLLQNPQDGFSRLKRWIMIGDHHQLPPVIKNMAFQKYSNMEQSLFTRFVRVGVPTVDLDAQGRARAR

SEQ ID NO: 10003 - DNA, 5153 bp, Homo sapiens
caaagctcttggctcgctagctcagccccaacgcctgcatgaacttccggctacacgccattccgcttcccgaggaacgcttgggctgttgtacgggttccctacgggactctgaaggctgaggatatccggcccggagcgtttgtgcggcgcggagttaagcgccccggcagtaacttaagggaagtggaccagggttgccgctgcccagagcggtcctttagtttccactggagtggagggaagagtgctgccatggcagcccctgcgcagcccaagaagatcgtggcccctacggtgtcccaaatcaatgcggagttcgtgacccagttagcatgtaaatactgggctccccacatcaagaagaaatcaccttttgatataaaggttattgaagatatatatgaaaaagagattgtcaaatcaaggtttgctattagaaagataatgctcttggaatttagccagtatcttgaaaattatctctggatgaattattctcctgaggtatctagcaaggcctatttaatgtcaatctgctgtatggtgaatgagaagtttagagaaaacgtgcctgcatgggagatttttaagaagaagccagaccacttcccattcttttttaaacacatcttgaaggcggcattagctgaaactgatggtgaattttcacttcatgaacagacagtcttactactttttcttgatcattgcttcaatagtttggaagtagacttgatacgaagtcaagtacagcagcttatctccctcccaatgtggatgggcttacagctggcacgattggaattagaattaaaaaagacacctaagctaagaaaattctggaacttgattaaaaagaatgatgaaaagatggatccagaagcaagagaacaggcatatcaagagaggagatttctttcacaactcatccagaagtttatctctgtgctgaaatcagtcccactttctgaacctgtcactatggacaaagttcattactgtgaaagattcattgaacttatgattgatctagaggccctgctacccacaaggcgctggtttaataccatcctggatgattcccaccttctggttcactgttacctttccaatcttgttcgtagagaagaggatggccatcttttttcccagcttttggacatgcttaaattctatactggttttgaaattaatgaccaaactggaaatgctctgacagagaatgagatgaccacaattcactatgatagaattacttctctacagagagctgcttttgcacattttcctgaactctatgattttgccctctcaaatgtggcagaagtagatactcgggagtccttggtcaagttttttggacctcttagttcaaacacactccaccaggtggcatcatacctctgcttgttgccaactcttcctaaaaatgaagacacaacttttgataaagaatttcttctagaattgctggtatctcgtcatgaacgtcgaatttctcagattcagcagttgaaccagatgcctttgtatccaactgagaaaattatatgggatgaaaatattgtcccaactgagtactattctggagaaggttgtcttgctcttcccaaattgaatttgcagtttttgactcttcatgactacctgctaaggaactttaacctcttccgcttagaatcaacttatgaaattcgtcaggacattgaagatagtgtcagcagaatgaagccatggcaatctgaatatggcggtgtagtgtttggtggttgggcgcgaatggcccagcccattgtggctttcactgtcgttgaagtggccaaacccaacataggtgaaaactggccaacccgagttcgtgcagatgttaccataaatctcaatgtcagagatcacatcaaagatgaatgggaaggtcttcgtaagcatgatgtatgctttttaattaccgtacgtcccacaaaaccttatggcactaagtttgaccggaggagaccttttattgagcaggttggcctggtttatgtcagaggctgtgaaattcagggcatgctggatgataaaggacgtgtcattgaagatggacctgaacccagacccaatcttagaggagaatcaaggacatttagagtgtttttggatccaaaccagtatcaacaagatatgaccaatactatacaaaatggagcagaggatgtgtatgaaacttttaatataataatgaggagaaaaccaaaggaaaataactttaaggctgtgctggagactattcggaacctgatgaatactgattgtgtggtacctgactggctgcacgatatcattttaggttatggggacccaagtagtgcacattattcgaaaatgcccaatcagattgccacccttgatttcaatgatacatttctctccattgagcatttaaaagccagcttccctggtcataatgttaaagtaactgtagaagaccctgctctacaaataccccctttcaggataacttttccagtaagaagtggaaaagggaagaaaaggaaagatgcggatgtggaagatgaagacaccgaggaagcaaaaaccttaattgttgagccccatgttattcctaataggggtccttatccttataatcaacccaaacgtaatacgattcagttcactcatacacagatagaagccatccgtgctggaatgcagcctgggctgactatggttgtgggcccacctggtacaggcaaaacagatgtggcagttcagatcatatccaacatctaccacaacttcccagaacagaggactctaattgttactcattccaatcaggccctaaaccagttgtttgagaaaatcatggcattagacattgatgagcgccacctactgcgtcttggtcatggagaagaagagctggagacagagaaagatttcagcaggtatggaagagttaattatgttctggctcgaagaatagaacttttagaagaagtcaaacgattgcaaaagagtctaggggttccaggagatgcctcatatacctgtgaaactgcaggctatttcttcttataccaggtaatgtctcgctgggaagagtatatcagcaaagtgaaaaataaaggtagtacattgccagatgttacggaagtctccactttcttccctttccatgaatactttgcaaatgctcctcaacccatttttaaaggaagatcttatgaagaagacatggaaattgctgaaggatgtttcaggcatattaagaaaatctttacgcagcttgaggaattcagagcctctgaattgcttcgaagtggactggacagatctaaataccttttagtgaaagaagccaaaattattgctatgacctgtactcatgctgccttaaaacgacatgacttggtcaagctaggtttcaagtatgacaacattttgatggaagaggctgctcagattctggagatagaaacttttatccctcttcttctacagaatcctcaggatggatttagccgactaaaacgatggattatgattggcgatcatcaccagttacctccagttattaagaacatggcctttcaaaagtactcaaacatggagcagtctctcttcactcgctttgttcgcgttggagttccgactgttgaccttgatgctcaagggagagccagagcaagcttgtgcaacctctacaactggcgatacaagaatctaggaaacttaccccatgtgcagctcttgccagagtttagtacagcaaatgctggcttactgtatgacttccagctcattaatgttgaagattttcaaggagtgggagaatctgaacctaatccttacttctatcagaatcttggagaggcagaatatgtagtagcactttttatgtacatgtgtttacttggttaccctgctgacaaaatcagtattctaacaacatataatggccaaaagcatcttattcgcgacatcatcaatagacgatgtggaaacaatccattgattggaagaccaaacaaggtgacaactgttgatagatttcaaggtcaacagaatgactatattcttctttctctggtacgaaccagggcagtgggccatctgagggatgtccgtcgcttggtagtggccatgtctagagccagacttggactttatatcttcgccagagtatccctcttccaaaactgttttgaactgactccagctttcagtcagctcacagctcgcccccttcatttgcatataattccaacagaacctttcccaactactagaaagaatggagagagaccatctcatgaagtacaaataataaaaaatatgccccagatggcaaactttgtatacaacatgtacatgcatttgatacagactacacatcattatcatcagactttattacaactaccacctgctatggtagaagagggtgaggaagttcaaaatcaagaaacagaattggaaacagaagaagaggccatgactgttcaagctgacatcatacccagtccaacagacaccagctgccgtcaagaaactccagcctttcaaactgacaccacccccagtgagacaggagccacttccactccagaagccatccctgctttatctgagaccacccctactgtggtaggagctgtatctgcaccggcagaagctaacacacctcaggatgccacatctgccccggaagagaccaagtagccaaactgtagtccttctaaaggaggacatggcagtcaaaaagtctgagtaaagctgttttttgtattttatatttgcttctgccattttactgtcactaattaatgtttagttcttatatttgttaactgatttcggtgtcttgaatatatttttttaaattatgtgtatgaacaattctagtttcatttgttcaatcagaagagcaaataaccattcctttcatgttttgatcactgagtgtgtctgtaatcatacctacattaaaatcattttctatgaatatataatatatacttcacatttttagtgaacttctctaaagaagaggacagaatatactggacttaaccacgaatacccttgagtgtccaaattgggaaggaacttgtttcttctgttatactatcaaatgcttaaattctgtttccttttttctt

SEQ ID NO: 10004 - protein, 1485 aa, Homo sapiens; identical to SEQ ID NO: 1595

SEQ ID NO: 10005 - DNA, 3636 bp, Homo sapiens
gaaaaaacataaagataatactaatgataaaattaggactttggctatgaacatggctatgtaaaagctcaccttttttggaaattatgcaaatgtaacaggaaaatgagaaaaagaggggacaaactatttttatagactatctgtgcagtagcagaagaaaagagggccttttgttatgaaaaccgtccagccttcagaaaacagccttgctcaccccatcttcatgtctcccacatagctaatctaagaaacttacttattcagtgatgaatagtataaagggaactagcacaagctcaatttataggaaaaaatgaagaacagcaaaacatagataggatacatgctccagaaaccatgttggcctggaaaagatgaaattttcaaatatacattttgctgtaaattgggaaatacttaatgaagtaaccatatctttgaggaaaagctacaaagcagagaaatgtaagaactcagaaagagatgaaatgtaagctggaagaaaataaaatcagaggaatgaaaacaaaatcaaaaggaatacagggaagaatagacactgcacagaatacttcataaggaatagagtgaaactgagaaactaataattttgcaagtttagaaatagaaggacctcaatatttgagtccttttacagaaaatcttactcaaataataaggaaagttactttctctcataacaagatggaaatagggtggttccaaggttgggttacagggtagctcaacgatgttattctgccctgctaatgtcagcatgtgagcccagttctccacatggtcagagtggcaacagaattcccaggtataatatccacacataacaacaaaggacgtatatccagaatatatgaactcctataaaagttattactaaataaggcagaccaatacaaaatgggcaaatgacttgaacagacacttcacataaggaagacctacaggtagccaatacgtcatgaaaaagtgcttaccatcattagttgtcaaggaaatagaaattaaagctacaatgatataccactacctacccaaaagaatgggtaaaatgatgaagattgacattatgacaaatgttggcaaggatgtacaacaactgaaactctagaactggggttctagagtttacacattgctggggaatgtgtaaagtgggataacaattttggaaaagtttgacagtttcttataaagtatgcacttactgtacagctcagcaatttcactcctgcatatttattcaagagcaatgaaaacatgtccacaaaaatatttgtacatgaatatttattgcagctttatgcaagatagcttcaaactagaaacaggccaacttttcatgaaaaggtgagtggacaaaactgtggtatatttgttcagtgaaagaatactcaaaaaggtatgaatttctcatgtacacatacatgaatatatctcagaaacatgctgattgaaagaaacaggacacaaaagaatatatccttttgatgctatttttatgtaattctagaactggcaaaaaataatctgtagtgacagaaagtaaatcagtggttgcctggggctgggggatgcagatttgaccaaaatggggcctgagatgatggacatttttattgtggtggtggtcacatgggaaaatgtattgtcaaaattcatcaaattgtacacttgaacacattttattgtgtataaactatacctccatgtagttgacttaaaaagtgttttgtaaacttcctaaagatagagagactataaattacagtatctgcagggtaagcaataaactttttgtcaaattgatgaaaagataaatgtctgagttgccagtattagtgactgaaacctttctgaacttccctatttgtacatacactttttttctttctttcttcttcttttttttttaaacagggccttactctgttacccaggccggagtgtagtgtcatgatctcaactcactgcaacctccacctcctgggctcaagcaatcctcccaacatagccttctgagtagctggaactacaggcacgcgccaccatgcccagctaatttttgtataatttgtagagatgggatttcaccgcattgcccaggctggtctttaactcctgggctcaagcgatctgcccatgttggcctcccatgtacatatattttcaaactgaacagaaagtgcaatgaagattatttgtttttttctttgatggaggaatgctgtagacatttactagtgatacgttaagtaataaataagcatactaagttatattgctgagcatcaaactgggataccagttaataagctagacatagtctctgctttcatgaagttttgcaatctaatgggggaagactgttaattccaaaaatagttatttagttatcagcaaaggtaaagacaagtgctgtaagtgttaataacataaggatgtagtttgatctgattagtatggtttctttaataatgttcattaacttgttcttggaattccaagcctatgattatgtttcttttgggattgattaaggataagatgtttgttcctagcacattatttaaatgatctctagtgtcttttggcttttgcaaatgcaccatattttccattttttatttctaggtgacaactgttgatagatttcaaggtcaacagaatgactatattcttctttctctggtacgaaccagggcagtgggccatctgagggatgtccgtcgcttggtagtggccatgtctagagccagacttggactttatatcttcgccagagtatccctcttccaaaactgttttgaactgactccagctttcagtcagctcacagctcgcccccttcatttgcatataattccaacagaacctttcccaactactagaaagaatggagagagaccatctcatgaagtacaaataataaaaaatatgccccagatggcaaactttgtatacaacatgtacatgcatttgatacagactacacatcattatcatcagactttattacaactaccacctgctatggtagaagagggtgaggaagttcaaaatcaagaaacagaattggaaacagaagaagaggccatgactgttcaagctgacatcatacccagtccaacagacaccagctgccgtcaagaaactccagcctttcaaactgacaccacccccagtgagacaggagccacttccactccagaagccatccctgctttatctgagaccacccctactgtggtaggagctgtatctgcaccggcagaagctaacacacctcaggatgccacatctgccccggaagagaccaagtagccaaactgtagtccttctaaaggaggacatggcagtcaaaaagtctgagtaaagctgttttttgtattttatatttgcttctgccattttactgtcactaattaatgtttagttcttatatttgttaactgatttcggtgtcttgaatatatttttttaaattatgtgtatgaacaattctagtttcatttgttcaatcagaagagcaaataaccattcctttcatgttttgatcactgagtgtgtctgtaatcatacctacattaaaatcattttctatgaatatataat

SEQ ID NO: 10006 - protein, 192 aa, Homo sapiens; identical to SEQ ID NO: 9996

SEQ ID NO: 10007 - DNA, 960 bp, Homo sapiens
ttaaggataagatgtttgttcctagcacattatttaaatgatctctagtgtcttttggcttttgcaaatgcaccatattttccattttttatttctaggtgacaactgttgatagatttcaaggtcaacagaatgactatattcttctttctctggtacgaaccagggcagtgggccatctgagggatgtccgtcgcttggtagtggccatgtctagagccagacttggactttatatcttcgccagagtatccctcttccaaaactgttttgaactgactccagctttcagtcagctcacagctcgcccccttcatttgcatataattccaacagaacctttcccaactactagaaagaatggagagagaccatctcatgaagtacaaataataaaaaatatgccccagatggcaaactttgtatacaacatgtacatgcatttgatacagactacacatcattatcatcagactttattacaactaccacctgctatggtagaagagggtgaggaagttcaaaatcaagaaacagaattggaaacagaagaagaggccatgactgttcaagctgacatcatacccagtccaacagacaccagctgccgtcaagaaactccagcctttcaaactgacaccacccccagtgagacaggagccacttccactccagaagccatccctgctttatctgagaccacccctactgtggtaggagctgtatctgcaccggcagaagctaacacacctcaggatgccacatctgccccggaagagaccaagtagccaaactgtagtccttctaaaggaggacatggcagtcaaaaagtctgagtaaagctgttttttgtattttatatttgcttctgccattttactgtcactaattaatgtttagttcttatatttgttaactgatttcggtgtcttgaatatatttttttaaattatgtgtatg

SEQ ID NO: 10008 - protein, 192 aa, Homo sapiens; identical to SEQ ID NO: 9996

SEQ ID NO: 10009 - DNA, 858 bp, Homo sapiens
ttaaggataagatgtttgttcctagcacattatttaaatgatctctagtgtcttttggcttttgcaaatgcaccatattttccattttttatttctaggtgacaactgttgatagatttcaaggtcaacagaatgactatattcttctttctctggtacgaaccagggcagtgggccatctgagggatgtccgtcgcttggtagtggccatgtctagagccagacttggactttatatcttcgccagagtatccctcttccaaaactgttttgaactgactccagctttcagtcagctcacagctcgcccccttcatttgcatataattccaacagaacctttcccaactactagaaagaatggagagagaccatctcatgaagtacaaataataaaaaatatgccccagatggcaaactttgtatacaacatgtacatgcatttgatacagactacacatcattatcatcagactttattacaactaccacctgctatggtagaagagggtgaggaagttcaaaatcaagaaacagaattggaaacagaagaagaggccatgactgttcaagctgacatcatacccagtccaacagacaccagctgccgtcaagaaactccagcctttcaaactgacaccacccccagtgagacaggagccacttccactccagaagccatccctgctttatctgagaccacccctactgtggtaggagctgtatctgcaccggcagaagctaacacacctcaggatgccacatctgccccggaagagaccaagtagccaaactgtagtccttctaaaggaggacatggcagtcaaaaagtctgagtaaagctgttttttgtatttt

SEQ ID NO: 10010 - protein, 192 aa, Homo sapiens; identical to SEQ ID NO: 9996

SEQ ID NO: 10011 - DNA, 497 bp, Homo sapiens
cccagtgccgagtagggccttgttaagaaaccgcttatcactaaatgatctgtcttccagctctacaatggcaagaatctgggacttactgtttatactgtttactttgcagttagcatgtaaatactgggctccccacatcaagaagaaatcaccttttgatataaaggttattgaagatatatatgaaaaagagattgtcaaatcaaggtttgctattagaaagataatgctcttggaatttagccagtatcttgaaaattatctctggatgaattattctcctgaggtatctagcaaggcctatttaatgtcaatctgctgtatggtgaatgagaagtttagagaaaacgtgcctgcatgggaggtaactgatttaaagtacttcatagctttcatactgacccacataagccattacaaagtggcagaacttttactgatagtggtgcttttagagcagaactttacccagtaataaagcaaatattgagaaa

SEQ ID NO: 10012 - protein, 136 aa, Homo sapiens
MARIWDLLFILFTLQLACKYWAPHIKKKSPFDIKVIEDIYEKEIVKSRFAIRKIMLLEFSQYLENYLWMNYSPEVSSKAYLMSICCMVNEKFRENVPAWEVTDLKYFIAFILTHISHYKVAELLLIVVLLEQNFTQ

SEQ ID NO: 10013 - DNA, 5422 bp, Homo sapiens
gcggacgtgcgcgcgctgccttcgcggcacctgggcctgaggtgcgtgcctcccgggccctcgccagctccagatgcgtgaggaggacttcagaaacccgactgagaagtggagcgacccccagggagggtcggacctgcctcaataccgccaaggtctttcatttcttgttcgcttactttcgtgaaatcctcacatcgttttaatggtactagtcaagacaagaaaatcaacaggctttcagccttgaggcaacattggatattattgagacatctgtggaatttaagaacagtatggagctcatcagagtatatcattgaagaatatgatggctgaaaacaatttaaaaatgctaaagattcaacagtgtgtggtagccaacaaactacctagaaacaggccatatgtttgcaatatttgttttaagcactttgaaacaccatcaaaattagctaggcactatctcattcatactggtcaaaagccatttgaatgtgatgtgtgtcataaaacctttagacaactagttcatctggagaggcatcaactaactcatagtctgccttttaaatgtagtatttgtcagcgtcactttaaaaatctgaagacatttgtgaagcaccaacaacttcacaatgaaacctatcagaataatgttaaacaggtcagaagattgctggaggccaagcaagaaaagtcaatgtatggagtgtataatacttttaccacagaggaaagatgggcattacacccgtgctctaagtctgatcccatgtatagcatgaaaagaagaaagaatattcatgcatgtacaatctgtggcaagatgtttccatcacagtcaaaacttgataggcatgtacttattcatactggtcagaggccttttaaatgtgtcttgtgtactaaatcttttcgacagtcaactcacttaaaaatccaccaacttacacattcagaagaaagaccttttcaatgttgtttttgtcaaaaaggatttaagattcaaagcaaacttctgaagcataaacaaatccatactaggaataaggcttttcgggctcttttattaaagaagaggcgtacagaatctcgccccctgcctaataagttaaatgcaaatcagggtggttttgaaaatggtgagattggtgaatctgaggagaataatccacttgatgtccactcaatttatattgtcccttttcaatgtccaaagtgtgaaaagtgttttgaatcagagcagattctcaatgaacacagctgttttgctgctagaagtggcaaaattccaagcaggttcaaaagaagctacaactataaaaccattgttaaaaaaatcttggccaagcttaagcgtgctaggagtaaaaaattagataactttcaatctgagaaaaaagtatttaaaaagagtttcttgagaaattgtgatcttatttctggtgagcagagctctgaacaaacccagagaacatttgtgggttctcttggcaaacatggaacatataaaacaattggcaatagaaagaagaaaacattgactttgccattttcttggcaaaatatgggaaaaaatttgaaaggcatccttacgacagaaaacatattaagcattgataattcagtgaataagaaagacttgtcaatctgtggttcatcaggtgaggaattctttaataactgtgaggtacttcagtgtggtttttcagttccaagggaaaacatacgtactagacataagatatgtccttgtgacaaatgtgagaaggtatttccttctatatccaaactaaaaagacactatttaattcatactggacagaggccctttggctgtaatatttgtgggaaatcttttagacagtcagctcacttaaaaagacatgaacagactcataatgaaaagagtccttatgcatctctttgccaagtagaatttggaaacttcaacaatctttctaatcattcaggtaataatgttaactataatgcttcccaacaatgtcaggctcctggtgttcaaaaatacgaggtctcagagtcagatcaaatgtcaggagttaaggcagagtcacaggattttattcctggtagcaccgggcaaccctgtcttcctaatgtacttttggaatcagagcaaagcaatcctttttgcagttattcagagcatcaggagaaaaatgatgtcttcctgtaccgatgcagtgtttgtgctaaaagtttccgatctccatctaaactggaaagacactacctaattcatgcagggcagaaaccatttgaatgctcagtttgtggcaaaacattcagacaggctcctcactggaagagacatcagcttactcactttaaagaacgaccacaagggaaagtggttgccttagattcggttatgtaaattgtcgcaaccactaacaattgtggtctctggtgatcttatttttaaagcctgtattatttaaaatgcatttttattgaaaggcctgcattaaactgaatggtttcacaggcatttgcttgtcctgcatagtaaggaggtagaatacatagaaaattaatacaatgttttagaaacagccaagttaattttagaggcaagaacatgatttgatgctataaagtaggcattttaatattgtaaacatatactttggctgtattgaaaaatataaatccatgatggctgtacaaataatttagcctcattcattttttaaaggaattattccttaagacatgccatctctttttagatatactcaaaagactgagaggcaaaacttggcttttagctgcagcacatagccctgttatatttgatttattttacatttcatatgaaagcataattttgtccacatgtgactcaaattgcattggtaattttttttttttttttgtaagttaaaaaaactacagagacactaaaggtgaaaatggatgagacaattatagtattattttcattggtctttttttttgagatggagtctcactctttcgccaggctagagtgcagtggcgccatctaggctcactgcaacctccgcatcccagattccagcgattctcctgcctcagcctcctgagtagctgggattacaggtgcctgccatcacgcctggctaatttttgtatttttagtagagacgggggttcaccaagttggccaggatggtctcgatctcttgaccttgtgactcacccgcatcggcctcccaaagtgctgggattacaggcatgagccaccgcacccgacggtcttttcaaagctatttatttttaggactatgtggtaatttcaccttcaggtgataaggattttttttttctcccagctagtgctatctttctcaaaataatttaaaagtaggcgagaggctaggatgtacctatatttaccatgtttacttaccaggaatattttctaagtgccatagtctttttcataatacgtatgagttttaccttttcagaggaataatttcaagtcatttatttgctcattaatgatagcagtagtcatagacttaagactattctagagatcttcatctccataagacttttacatttattttagtaaacttttctttctatgcctctttaatggagtggttctgttatttaagcctgttctaagtttgatcaaatggcaatgactaggtctagttttagtttttatttttgcaggagtctattgctaaagaattttattttgatgcttgttaaatttttattttaattaataaggtagtcattcctgtagagggataagatgcttgtagagttgtgggtatcattccaaatagaactgttatgatttgggaaatattctttactacaaaggacttatttcataattacaaattttccttcatatttgcctttgtttataaaatcttcaggaatgacattctctagcaataaaaggaatgaaccgttatgtttctaagctgaaaagaggaacaggtgggtaattatcctgccatacttaaatatagtggaaaatcctctattgagaatgtggataaatgaacaattgtaagttttgcatcataaactgagaactttcttttgacaggggggaggcgggagggatagtaggtgggggtgatctgcttgcttcttttaccacaggtgatttttaagtaacttgggtttaatttacagagatgaaacatgacagtctgagtaaaatacccagtgatgtagaagtgtgcctgtttattatgtagatacagacatccagcaaaaacaggagaatcacatgctttaaagaacactttctcttaggtttccttgagatatgttcctccagtgcaagcaagataatggtttacagaatttgctttacacaaaacttgtcaagaactcatctgttaaaagcaaggaataactagtttatattttccaataatgttcaaggttttctccttaatatgtttgaaattattgattttggcatttttctaagcaatttatgtaattttatttgaagaaaatgttttgtataatgtttttcccagcctaaacagggagagtcctaacagtgttgtgcttgtatgattctgagactttatttgcgtaagtgatactactatactttatttttgacccatgcctttttaagctgtttcatattgaaaggtggaatattgtaaaaattttgtcaaagatgtactgtagtgctatttgaagtacctgtaacaaaacagttggccctctgtatccatgtactctgcatctgtggattaaaccaattgcagatcaaaaatattagaaaaaataaaaataatacaaataaaaatacagtataacagttatttaaatagcatttacattgcattaggtattagtctagggataaagtatacaggcggatgtgcgttggttatatacaaatatgtcattttatgtaagggacttgagtatacttggatttttggtatctgtgggttggggggacggtccaggaaccaataccccatggataccaagggacaactgtacttatttacctttattgtcattgcaagcttcttatggaaactttataggaatgaaaatatacatgttaagaagattaaacattagatagtagatggtttgttgcatgctagaactgttagtattgttgaatcaattactttggtttcatgaaaaaataaacgataaatatctttaaagagaactagaagaattttttgtttgagtgattccaggctgtagtatgatcatttactgaagtagtttgattggctggctaacttagaattattgtttcttgttttgtactgcaataggggttataattgtaagataaaaatgtgtgtgtgtttaagggaagtaggtggtggttaaaattcttggaaaattttcagaatactttaaaaataaagttccaagttacaca

SEQ ID NO: 10014 - protein, 37 aa, Homo sapiens
MREEDFRNPTEKWSDPQGGSDLPQYRQGLSFLVRLLS

SEQ ID NO: 10015 - DNA, 5198 bp, Homo sapiens
gcggacgtgcgcgcgctgccttcgcggcacctgggcctgaggtgcgtgcctcccgggccctcgccagctccagatgcgtgaggaggacttcagaaacccgactgagaagtggagcgacccccagggagggtcggacctgcctcaataccgccaaggtctttcatttcttgttcgcttactttcgtgaaatcctcacatcgttttaatggtactagtcaagacaagaaaatcaacaggctttcagccttgaggcaacattggatattattgagacatctgtggaatttaagaacagtatggagctcatcagagtatatcattgaagaatatgatggctgaaaacaatttaaaaatgctaaagattcaacagtgtgtggtagccaacaaactacctagaaacaggccatatgtttgcaatatttgttttaagcactttgaaacaccatcaaaattagctaggcactatctcattcatactggtcaaaagccatttgaatgtgatgtgtgtcataaaacctttagacaactagttcatctggagaggcatcaactaactcatagtctgccttttaaatgtagtatttgtcagcgtcactttaaaaatctgaagacatttgtgaagcaccaacaacttcacaatgaaacctatcagaataatgttaaacaggtcagaagattgctggaggccaagcaagaaaagtcaatgtatggagtgtataatacttttaccacagaggaaagatgggcattacacccgtgctctaagtctgatcccatgtatagcatgaaaagaagaaagaatattcatgcatgtacaatctgtggcaagatgtttccatcacagtcaaaacttgataggcatgtacttattcatactggtcagaggccttttaaatgtgtcttgtgtactaaatcttttcgacagtcaactcacttaaaaatccaccaacttacacattcagaagaaagaccttttcaatgttgtttttgtcaaaaaggatttaagattcaaagcaaacttctgaagcataaacaaatccatactaggaataaggcttttcgggctcttttattaaagaagaggcgtacagaatctcgccccctgcctaataagttaaatgcaaatcagggtggttttgaaaatggtgagattggtgaatctgaggagaataatccacttgatgtccactcaatttatattgtcccttttcaatgtccaaagtgtgaaaagtgttttgaatcagagcagattctcaatgaacacagctgttttgctgctagaagtggcaaaattccaagcaggttcaaaagaagctacaactataaaaccattgttaaaaaaatcttggccaagcttaagcgtgctaggagtaaaaaattagataactttcaatctgagaaaaaagtatttaaaaagagtttcttgagaaattgtgatcttatttctggtgagcagagctctgaacaaacccagagaacatttgtgggttctcttggcaaacatggaacatataaaacaattggcaatagaaagaagaaaacattgactttgccattttcttggcaaaatatgggaaaaaatttgaaaggcatccttacgacagaaaacatattaagcattgataattcagtgaataagaaagacttgtcaatctgtggttcatcaggtgaggaattctttaataactgtgaggtacttcagtgtggtttttcagttccaagggaaaacatacgtactagacataagatatgtccttgtgacaaatgtgagaaggtatttccttctatatccaaactaaaaagacactatttaattcatactggacagaggccctttggctgtaatatttgtgggaaatcttttagacagtcagctcacttaaaaagacatgaacagactcataatgaaaagagtccttatgcatctctttgccaagtagaatttggaaacttcaacaatctttctaatcattcaggtaataatgttaactataatgcttcccaacaatgtcaggctcctggtgttcaaaaatacgaggtctcagagtcagatcaaatgtcaggagttaaggcagagtcacaggattttattcctggtagcaccgggcaaccctgtcttcctaatgtacttttggaatcagagcaaagcaatcctttttgcagttattcagagcatcaggagaaaaatgatgtcttcctgtaccgatgcagtgtttgtgctaaaagtttccgatctccatctaaactggaaagacactacctaattcatgcagggcagaaaccatttgaatgctcagtttgtggcaaaacattcagacaggctcctcactggaagagacatcagcttactcactttaaagaacgaccacaagggaaagtggttgccttagattcggttatgtaaattgtcgcaaccactaacaattgtggtctctggtgatcttatttttaaagcctgtattatttaaaatgcatttttattgaaaggcctgcattaaactgaatggtttcacaggcatttgcttgtcctgcatagtaaggaggtagaatacatagaaaattaatacaatgttttagaaacagccaagttaattttagaggcaagaacatgatttgatgctataaagtaggcattttaatattgtaaacatatactttggctgtattgaaaaatataaatccatgatggctgtacaaataatttagcctcattcattttttaaaggaattattccttaagacatgccatctctttttagatatactcaaaagactgagaggcaaaacttggcttttagctgcagcacatagccctgttatatttgatttattttacatttcatatgaaagcataattttgtccacatgtgactcaaattgcattggtaattttttttttttttttgtaagttaaaaaaactacagagacactaaaggtgaaaatggatgagacaattatagtattattttcattggtctttttttttgagatggagtctcactctttcgccaggctagagtgcagtggcgccatctaggctcactgcaacctccgcatcccagattccagcgattctcctgcctcagcctcctgagtagctgggattacaggtgcctgccatcacgcctggctaatttttgtatttttagtagagacgggggttcaccaagttggccaggatggtctcgatctcttgaccttgtgactcacccgcatcggcctcccaaagtgctgggattacaggcatgagccaccgcacccgacggtcttttcaaagctatttatttttaggactatgtggtaatttcaccttcaggtgataaggattttttttttctcccagctagtgctatctttctcaaaataatttaaaagtaggcgagaggctaggatgtacctatatttaccatgtttacttaccaggaatattttctaagtgccatagtctttttcataatacgtatgagttttaccttttcagaggaataatttcaagtcatttatttgctcattaatgatagcagtagtcatagacttaagactattctagagatcttcatctccataagacttttacatttattttagtaaacttttctttctatgcctctttaatggagtggttctgttatttaagcctgttctaagtttgatcaaatggcaatgactaggtctagttttagtttttatttttgcaggagtctattgctaaagaattttattttgatgcttgttaaatttttattttaattaataaggtagtcattcctgtagagggataagatgcttgtagagttgtgggtatcattccaaatagaactgttatgatttgggaaatattctttactacaaaggacttatttcataattacaaattttccttcatatttgcctttgtttataaaatcttcaggaatgacattctctagcaataaaaggaatgaaccgttatgtttctaagctgaaaagaggaacaggtgggtaattatcctgccatacttaaatatagtggaaaatcctctattgagaatgtggataaatgaacaattgtaagttttgcatcataaactgagaactttcttttgacaggggggaggcgggagggatagtaggtgggggtgatctgcttgcttcttttaccacaggtgatttttaagtaacttgggtttaatttacagagatgaaacatgacagtctgagtaaaatacccagtgatgtagaagtgtgcctgtttattatgtagatacagacatccagcaaaaacaggagaatcacatgctttaaagaacactttctcttaggtttccttgagatatgttcctccagtgcaagcaagataatggtttacagaatttgctttacacaaaacttgtcaagaactcatctgttaaaagcaaggaataactagtttatattttccaataatgttcaaggttttctccttaatatgtttgaaattattgattttggcatttttctaagcaatttatgtaattttatttgaagaaaatgttttgtataatgtttttcccagcctaaacagggagagtcctaacagtgttgtgcttgtatgattctgagactttatttgcgtaagtgatactactatactttatttttgacccatgcctttttaagctgtttcatattgaaaggtggaatattgtaaaaattttgtcaaagatgtactgtagtgctatttgaagtacctgtaacaaaacagttggccctctgtatccatgtactctgcatctgtggattaaaccaattgcagatcaaaaatattagaaaaaataaaaataatacaaataaaaatacagtataacagttatttaaatagcatttacattgcattaggtattagtctagggataaagtatacaggcggatgtgcgttggttatatacaaatatgtcattttatgtaagggacttgagtatacttggatttttggtatctgtgggttggggggacggtccaggaaccaataccccatggataccaagggacaactgtacttatttacctttattgtcattgcaagcttcttatggaaactttataggaatgaaaatatacatgttaagaagattaaacattagatagtagatggtttgttgcatgctagaactgttagtattgttgaatcaattactttggtttcatgaaaaaataaacgataaatatctttaaagag

SEQ ID NO: 10016 - protein, 37 aa, Homo sapiens; identical to SEQ ID NO: 10014

SEQ ID NO: 10017 - DNA, 5835 bp, Homo sapiens
accaggactaggaggcagcggggagcgtgcctgcgtcgctcggagcggtgacagcaaggagcgcagcgcggaggccgggcggcaaggggagtttccagtcctcgataagtggagtccctgctctgcgctgcgccagcgccttccgcctgggcccgcggtgctagacacctgccgagtccgaagcgggagtcaggctgagccttcggcccccaagatctccaacctgagcatatgccagttgacatgggaacactgaggccagcaatttaaggatttcacatttgcttgcagtgaggtagctcagtggcatttctgagcaggggccaccctgacttcaccttggcccaccatgagggtcttcctgctttgtgcctacatactgctgctgatggtttcccagttgagggcagtcagctttcctgaagatgatgaaccccttaatactgtcgactatcactattcaaggcaatatccggtttttagaggacgcccttcaggcaatgaatcgcagcacaggctggactttcagctgatgttgaaaattcgagacacactttatattgctggcagggatcaagtttatacagtaaacttaaatgaaatgcccaaaacagaagtaatacccaacaagaaactgacatggcgatcaagacaacaggatcgagaaaactgtgctatgaaaggcaagcataaagatgaatgccacaactttatcaaagtatttgttccaagaaacgatgagatggtttttgtttgtggtaccaatgcattcaatcccatgtgtagatactacaggttgagtaccttagaatatgatggggaagaaattagtggcctggcaagatgcccatttgatgccagacaaaccaatgttgccctctttgctgatgggaagctgtattctgccacagtggctgacttcttggccagcgatgccgttatttatcgaagcatgggtgatggatctgcccttcgcacaataaaatatgattccaaatggataaaagagccacactttcttcatgccatagaatatggaaactatgtctatttcttctttcgagaaatcgctgtcgaacataataatttaggcaaggctgtgtattcccgcgtggcccgcatatgtaaaaacgacatgggtggttcccagcgggtcctggagaaacactggacttcatttctaaaggctcggctgaactgttctgtccctggagattcgtttttctactttgatgttctgcagtctattacagacataatacaaatcaatggcatccccactgtggtcggggtgtttaccacgcagctcaatagcatccctggttctgctgtctgtgcatttagcatggatgacattgaaaaagtattcaaaggacggtttaaggaacagaaaactccagattctgtttggacagcagttcccgaagacaaagtgccaaagccaaggcctggctgttgtgcaaaacacggccttgccgaagcttataaaacctccatcgatttcccggatgaaactctgtcattcatcaaatctcatcccctgatggactctgccgttccacccattgccgatgagccctggttcacaaagactcgggtcaggtacagactgacggccatctcagtggaccattcagccggaccctaccagaactacacagtcatctttgttggctctgaagctggcatggtacttaaagttctggcaaagaccagtcctttctctttgaacgacagcgtattactggaagagattgaagcctacaaccatgcaaagtgcagtgctgagaatgaggaagacaaaaaggtcatctcattacagttggataaagatcaccacgctttatatgtggcgttctctagctgcattatccgcatccccctcagtcgctgtgagcgttatggatcatgtaaaaagtcttgtattgcatctcgtgacccgtattgtggctggttaagccagggatcctgtggtagagtgaccccagggatgctgctgttaaccgaagacttctttgctttccataaccacagtgctgaaggatatgaacaagacacagaattcggcaacacagctcatctaggggactgccatggtgtacgatgggaagtccagtctggagagtccaaccagatggtccacatgaatgtcctcatcacctgtgtctttgctgcttttgttttgggggcattcattgcaggtgtggcagtatactgctatcgagacatgtttgttcggaaaaacagaaagatccataaagatgcagagtccgcccagtcatgcacagactccagtggaagttttgccaaactgaatggtctctttgacagccctgtcaaggaataccaacagaatattgattctcctaaactgtatagtaacctgctaaccagtcggaaagagctaccacccaatggagatactaaatccatggtaatggaccatcgagggcaacctccagagttggctgctcttcctactcctgagtctacacccgtgcttcaccagaagaccctgcaggccatgaagagccactcagaaaaggcccatggccatggagcttcaaggaaagaaacccctcagttttttccgtctagtccgccacctcattccccattaagtcatgggcatatccccagtgccattgttcttccaaatgctacccatgactacaacacgtctttctcaaactccaatgctcacaaagctgaaaagaagcttcaaaacattgatcaccctctcacaaagtcatccagtaagagagatcaccggcgttctgttgattccagaaataccctcaatgatctcctgaagcatctgaatgacccaaatagtaaccccaaagccatcatgggagacatccagatggcacaccagaacttaatgctggatcccatgggatcgatgtctgaggtcccacctaaagtccctaaccgggaggcatcgctatactcccctccttcaactctccccagaaatagcccaaccaagcgagtggatgtccccaccactcctggagtcccaatgacttctctggaaagacaaagaggttatcacaaaaattcctcccagaggcactctatatctgctatgcctaaaaacttaaactcaccaaatggtgttttgttatccagacagcctagtatgaaccgtggaggatatatgcccacccccactggggcgaaggtggactatattcagggaacaccagtgagtgttcatctgcagccttccctctccagacagagcagctacaccagtaatggcactcttcctaggacgggactaaagaggacgccgtccttaaaacctgacgtgccaccaaagccttcctttgttcctcaaaccccatctgtcagaccactgaacaaatacacatactaggcctcaagtgtgctattcccatgtggctttatcctgtccgtgttgttgagaggatgatgttgtaagggtaccttaaaacaagagactcgcttgtattttaagagaaccaagtggccaaagaaactctttctaactttggcaacatcagaacttgccacatgtagctactgcagcaaggcttctgtgtacttgcctgaaaacaaaggaaggtgctggtcattccatttcttttgtttgaagctaaagagatgtgtagctcacaggggctaccttaccagtataaagagctgataacagtactcagaagaatctgtgaacaaatacttgaaaatgggttcaatgtagactgccattatgtgtggtcttcccattaaatgtgaacattttaatatgtatgcattcaccttgcctcttgcacaaatgtcaaaaaaaagatggtaatatctcaaagaaatgaacttgtagattaccaagcagtttgctaaaaattcaatctttgacccaagctgtagcatttttttttcatgtgtggcatctttttcatgccaccaacaaacttgttgtgtgtgtgcgtgtgtgtgtgtgtgtgtgtgtgtgtgtgtgtgttctgtacccactaggatttgtttaggtgcccattgcatctttttgtgctatggagttgtttacattaagcatgaccgaacgagagacaatactatttcccacaggagtccattgggttcagctttgaaagaggaatagaatcgaggctcctttgaccatcaaaatgatgaactttacttatgtggtacccaatgccagaatgtaagagttgcaagtgattttgtgctgctattcattaaaacttgtattccagtcttgccagcttaaggagatcaagatattaagaggtatccttgatttattttccagtattcagtagtaaaattttcctgtccactgtgaatcaaagcctgagtcactctatttaaccttggacacactaataaggttttattttgattgtgttcgtttccccccccccaatagtaaaatttctcctcctttaactcctcctaccccccaaggtaagaaacaaaaaacaaacaaacaaacaaaaatagaagacaaaagaaagacatatgaaaggaattgtaattggcttaacagaaacagtctgtaaaaacctaacagtggtgcaatcatgttgtctgtgttgtgttatgtgagaattttctcctaagtcatgcaggtaatgacaatatactgtaaataccacatgtgagtttacctgaatctgtgcattttgtgccttattcatgagaatgatagaagtactaaaatctgtcaagtgttttcagtatagcacattatttactgagtgccagttgtaaatgtttttcaaccagcacctaaaaagactcttttcaaaaaatcacagaaacaacctaggacaattatttgttacataatccgacctcatagcagcattacattctttgccgtgataaacattccactcctgctttcctaaggatgaaacagtgataatgtgaactcaaatgaggtttcctgggtaatgtgacacctgcagaaactatagagcgtcatttatacgtagtttggcagaaaccacttacggctgatgatgcgcaaccctgctgactgtttcagttaatatgctgcacaccacacacttgtttagtgaaccaaatctagaaagtaccaaggcagaggtatgctcctgctgtaatcaggcaaatgagttcaactggatttcttttgacaatactgttggtacctattacttgggggaggacatgttgcagaagaccagatcatttttatacagaatgtgaaatactgatacagttattcttttttttaaagaacattgttttataaagaacgtgatttccagtgatctctggaagcgctaaagctaaaatttctgttcttgaaacacttcagctttgcaactaaaatattacagattaataataaattaaaccaaccaatgataaacactactcagtccaccaacaacaaacgtgtttgaattcaccttaccaatattaatcccagcgtgtgtaaaacagaacagtaactctatgtgaccccagataacattttgtaacattgtgcttccttgtagtttgtaatgtgagttcaatcagtatttatgttgaaatttctaacattaaatctagtctctatcctgttaatttaatttttaaatgctttatccatttgtgcaaaggtaaacgcagattgtatcttttttaatggtacggcataaaaagtaaccctcaagtgaagtgtctctatactgttttatagagtactttaacatgaatagataccttgtaaacttgtattgtggatgtgtaaataatatgtactttgggtttttaacaccgcatgtaaagtcaaaataaaatatacaaatcattatatcctgcctcttg

SEQ ID NO: 10018 - protein, 1011 aa, Homo sapiens
MRVFLLCAYILLLMVSQLRAVSFPEDDEPLNTVDYHYSRQYPVFRGRPSGNESQHRLDFQLMLKIRDTLYIAGRDQVYTVNLNEMPKTEVIPNKKLTWRSRQQDRENCAMKGKHKDECHNFIKVFVPRNDEMVFVCGTNAFNPMCRYYRLSTLEYDGEEISGLARCPFDARQTNVALFADGKLYSATVADFLASDAVIYRSMGDGSALRTIKYDSKWIKEPHFLHAIEYGNYVYFFFREIAVEHNNLGKAVYSRVARICKNDMGGSQRVLEKHWTSFLKARLNCSVPGDSFFYFDVLQSITDIIQINGIPTVVGVFTTQLNSIPGSAVCAFSMDDIEKVFKGRFKEQKTPDSVWTAVPEDKVPKPRPGCCAKHGLAEAYKTSIDFPDETLSFIKSHPLMDSAVPPIADEPWFTKTRVRYRLTAISVDHSAGPYQNYTVIFVGSEAGMVLKVLAKTSPFSLNDSVLLEEIEAYNHAKCSAENEEDKKVISLQLDKDHHALYVAFSSCIIRIPLSRCERYGSCKKSCIASRDPYCGWLSQGSCGRVTPGMLLLTEDFFAFHNHSAEGYEQDTEFGNTAHLGDCHGVRWEVQSGESNQMVHMNVLITCVFAAFVLGAFIAGVAVYCYRDMFVRKNRKIHKDAESAQSCTDSSGSFAKLNGLFDSPVKEYQQNIDSPKLYSNLLTSRKELPPNGDTKSMVMDHRGQPPELAALPTPESTPVLHQKTLQAMKSHSEKAHGHGASRKETPQFFPSSPPPHSPLSHGHIPSAIVLPNATHDYNTSFSNSNAHKAEKKLQNIDHPLTKSSSKRDHRRSVDSRNTLNDLLKHLNDPNSNPKAIMGDIQMAHQNLMLDPMGSMSEVPPKVPNREASLYSPPSTLPRNSPTKRVDVPTTPGVPMTSLERQRGYHKNSSQRHSISAMPKNLNSPNGVLLSRQPSMNRGGYMPTPTGAKVDYIQGTPVSVHLQPSLSRQSSYTSNGTLPRTGLKRTPSLKPDVPPKPSFVPQTPSVRPLNKYTY

SEQ ID NO: 10019 - DNA, 2681 bp, Homo sapiens
cctcacatgatccagtttaatcctcctcttctcccttcctgaagctgcacgctgcagtaagagcacagcagaaatgcagacaaaagggggccaaacatgggcgagaagggctctgttgctcggcatcctgtgggccactgcacatctgcctctctcagggacctccctgccccaacgtctcccaagggccacaggaaatagcacccaatgtgttatttctccatcatcggagtttcccgaagggtttttcacgagacaggagcgcagagatggaggcatcataatctatttcctaattatcgtttacatgttcatggccatatctattgtctgtgatgaatacttcctaccctccctggaaatcatcagtgaatcccttggattgtctcaggatgttgcaggcacaactttcatggcagcgggcagttcagctcctgaattagttactgctttcctaggtgtatttatcacaaagggagatattggcattagcaccatccttggatctgcaatttataatctccttggcatctgtgctgcctgtggtttgctatctaatacggtctcaacactatcatgttggcccctattcagagactgtgcagcgtacacaattagtgcagcagcagttcttggtataatatatgacaaccaagtttactggtatgaaggggctttactgcttttgatatatggattgtatgttttggtgctgtgttttgacattaaaattaaccaatatattataaagaaatgcagtccttgctgcgcctgtcttgccaaagctatggagagaagtgaacaacagccactgatgggctgggaagatgaaggtcaaccattcattcgtcggcaatcaagaactgatagtggaatattttatgaagattctggctactctcagctctctataagtttacatggccttagtcaggtttctgaagatccaccaagtgttttcaacatgcctgaagcagacttaaaaagaattttttgggtattatcccttcctattattacattactttttctaaccacaccagattgtagaaaaaagttttggaaaaactactttgtgataacctttttcatgtctgcaatatggatatccgcatttacatatatcctggtttggatggtcacaataactggggaaacactagaaattcccgatacagtaatgggccttactttattagcagcaggaacaagcataccagacacaattgcaagtgtgttggttgcaagaaaagggaaaggagatatggctatgtctaacatcgtgggatccaatgtgtttgatatgttgtgccttggtattccatggtttattaaaactgcatttataaatggatcagctcctgcagaagtaaacagcagaggactaacttacataaccatctctctcaacatttcaattatttttctttttttagcagttcacttcaatggctggaaactagacagaaagttgggaatagtctgcctattatcatacttggggcttgctacattatcagttctatatgaacttggaattattggaaataataaaataaggggctgtggaggttgatattattaatagtgttatgcagaaaatatgaatggcagggaggggcagagagaaaaatccatttcttcatttaaatcaaattttaaaaatcttgaaccttagaatctaaaacttacagtaatttaaaaccaaccaaaatcacatcctaatttttctgagccctttcttttcatgaaaaattacatattataaaacagaagtttggggggaaaaaatctatgttttaccatacaataagttgacaaaaactggagaaactagaacaaacaaatccaactatgtagtactgaaaacaacaagaaaatggcttatttcattaaaaacagtataaccattcatttaaactgaatgaccagacttgctgtctttaaaaacccaaacttgagattaacaaaaattacagtatatttttaacattatactgttaaaagctggtgggagttttaaaagttcatttttacagcttttgtaagcatacaatattactttaaaaaaatgacttttactaggagattcagcaaaacagatgtaggaatgttccaaccatggcttgaaattatgcattacgatccaagcgaacatcaatttctctgccactgatttttatgccattcattattctgcaggctttttcagctgattctggggagtcaaatctgactgttccacagccttttgactttccattctccatttttatttctgcaaacattacatgacctgtaaaataaaagttacagaattactagtcagtttaaataagttctatttcactttataggtttgaaattcctcatagccaattgtgataattaatttgattaaaaacattaattatttaaaataaataatataagcattatatttggactaaaatacaattcatacaaagtaataaatatatacatattagaatatacaaaattggaatcaggaaagattttcttaggatttaatgtattttatttatgttaaatccctaattcctgaggttaattttataagcaataagtcaagctagcacaaaatgccgccaactcaccatgccctataacaaacttacatatttaaacaaaattatttttagaataaacggttgcttact

SEQ ID NO: 10020 - protein, 500 aa, Homo sapiens; identical to SEQ ID NO: 1601

SEQ ID NO: 10021 - DNA, 870 bp, Homo sapiens
atggccatatctattgtctgtgatgaatacttcctaccctccctggaaatcatcagtgaatcccttggattgtctcaggatgttgcaggcacaactttcatggcagcgggcagttcagctcctgaattagttactgctttcctaggtgtatttatcacaaagggagatattggcattagcaccatccttggatctgcaatttataatctccttggcatctgtgctgcctgtggtttgctatctaatacggtctcaacactatcatgttggcccctattcagagactgtgcagcgtacacaattagtgcagcagcagttcttggtataatatatgacaaccaagtttactggtatgaaggggctttactgcttttgatatatggattgtatgttttggtgctgtgttttgacattaaaattaaccaatatattataaagaaatgcagtccttgctgcgcctgtcttgccaaagctatggagagaagtgaacaacagccactgatgggctgggaagatgaaggtcaaccattcattcgtcggcaatcaagaactgatagtggaatattttatgaagattctggctactctcagctctctataagtttacatggccttagtcaggtttctgaaggtaatcactaaatcttgcccattattaagtctattcgcaaaggaaaaactttaaaatttcatttcaattcagcaagtattgtgtgctttttatgtaaaaaagactgtgaagactcagaaatgataaagaccaagtccctacctttaaggaacttccaatatcacaggaaatacaaaatagctaaagtatgaacgttaagtaccataaaaagagaaaaataaagtgtgactgtggttcac

SEQ ID NO: 10022 - protein, 213 aa, Homo sapiens
MAISIVCDEYFLPSLEIISESLGLSQDVAGTTFMAAGSSAPELVTAFLGVFITKGDIGISTILGSAIYNLLGICAACGLLSNTVSTLSCWPLFRDCAAYTISAAAVLGIIYDNQVYWYEGALLLLIYGLYVLVLCFDIKINQYIIKKCSPCCACLAKAMERSEQQPLMGWEDEGQPFIRRQSRTDSGIFYEDSGYSQLSISLHGLSQVSEGNH

SEQ ID NO: 10023 - DNA, 4521 bp, Homo sapiens
aagttccgtgtaatattgagattaaaagttatgttttgctatgagtattgaattaccatgagaataaaaactgggaaacagaggtgaagatgctgaggtgaaagataagctaggaaaggagtatttacttgtaggagagtatgatgagagcggcttgagtgctagagttgtaataatttgcatttatctctgtgtatctttattttagcaattattatgcttgatattattggaaaataaaaataaggatcagaacaactgtcctgttattggaagcagtgattggtagaggatttatatatttatatgatatatttagtgatcagaatacaattttatacagttatatatgcataatgtatttatacagtggctagaatttctcagctaactaaatgtatatgtaagcaaattctgttctttggaaagttgttatctgtatgaaaataattttatgtttttatattatttaattatataaacaaattaatttcccccttctttctcaaaaatgtttatctccttttcctcctttctcctcttctccttttccttatgtttttgaaacaaaaacacaaaattcccaaatccccccgtcctttcttgaaaatccaggtggtggaatgggtagcatgaacagtgtgactggaggaatggggatgggactggaccggatgagttccagctttgatagaatgggaccaggtataggagctatactggaaaggagcatcgatatggatcgaggatttttatcgggtccaatgggaagcggaatgagagagagaataggctccaaaggcaaccagatatttgtcagaaatctaccttttgacttgacttggcagaaactaaaagagaaattcagtcagtgtggtcatgtaatgtttgcagaaataaaaatggagaatggaaagtcaaaaggctgtggaacagtcagatttgactccccagaatcagctgaaaaagcctgcagaataatgaatggcataaaaatcagtggcagagaaattgatgttcgcttggatcgtaatgcataatttcaagccatggttggaacattcctacatctgttttgctgaatctcctagtaaaagtcatttttttaaagtaatattgtatgcttacaaaagctgtaaaaatgaacttttaaaactcccaccagcttttaacagtataatgttaaaaatatactgtaatttttgttaatctcaagtttgggtttttaaagacagcaagtctggtcattcagtttaaatgaatggttatactgtttttaatgaaataagccattttcttgttgttttcagtactacatagttggatttgtttgttctagtttctccagtttttgtcaacttattgtatggtaaaacatagattttttccccccaaacttctgttttataatatgtaatttttcatgaaaagaaagggctcagaaaaattaggatgtgattttggttggttttaaattactgtaagttttagattctaaggttcaagatttttaaaatttgatttaaatgaagaaatggatttttctctctgcccctccctgccattcatattttctgcataacactattaataatatcaacctccacagccccttattttattatttccaataattccaagttcatatagaactgataatgtagcaagccccaagtatgataataggcagactattcccaactttctgtctagtttccagccattgaagtgaactgctaaaaaaagaaaaataattgaaatgttgagagagatggttatgtaagttagtcctctgctgtttacttctgcaggagctgatccatttataaatgcagttttaataaaccatggaataccaaggcacaacatatcaaacacattggatcccacgatgttagacatagccatatctcctttccctacaaaagaaaagcatactgttaaaatgtgcttaccaatactgtgttttattaataatcttcataagaaaagaaacactggatacttttttgttgttgattcgttttgaaaaattgttgttagagcaaaagtcttactgaatttgtatttttaaatttttcttgggttagtatttaaagtcttaacatttatttaataattatatttattaaaccatttttcaataaggtatatagcttatttgttgcttttcattgtaatttaacatggttaatggttaattactatttaacacacatttcaaatgaatattatttgggggattagattgagtgaaattaacctgctattaaatagtaaacttttcctctggagtcacttttttcccccttcaaagtatgttactgaggaagtaaacttttttttttttttttggtttttgttttttgagacacagtctcgctctgttgcccaggctgctggagtgccgtggcgcaatctcggctcactgcaacctccgcctcctggattcaaacaattctcctgcctcagcctcctgagtagctgggattacaggcacatgccaccacgcccggctaatttttgtatttttagtagagactgggtttcaccatgttggtcaggctggtctcaaactcctgacctcgtgatccacccgcctcggcctcccaaaatcctgggattacaggcgcgagccaccacacccggctggaagtaaacatttttaaagctacttttactcattctagccttgtagaatgaccattgcagcttgagggacctagttcttaccttttcttgcaaccaacacacttgcaattgtgtctggtatgcttgttcctgctgctaataaagtaaggcccattactgtatcgggaatttctagtgtttcccctgtaataaacagatatttcaagttacaaatcttaaagattcactaaccatcctttgcagttattttggatatttccttcgtgaacaaaaataaaataggcacatttagaattcagagccaatatgtgcttgcttattagttttttagctagcaacatatttgaatcaggctggtaattcgggtaacccaggtagcacagatttttaatgacatatctaaagatacgtaacagctaaaattctgccagtgagaaattttcctgtttgatattcttacaaaagatgtttatgtccaccattatctcatcagggctgtgctgaatatttgataatgagactgatcattccgctttttctttcttaaaaatattagtcagagttaagcaaattaattatagctatctttaagctataaatgtgttaacatgtatatataccatttattatgttctactttagtgatataccttaatttagtgggctttggcagggcgggggagggggaacgttcattaatctctgaggaaaacaaaacctgttttctacttgagtctaacatatggtcccaatttattaatacttctgttaaatttgatgtcaggtcaacatttttcagaaatgtatttattctcagaaacagaaccagagagaagttaaacaaaaggttatgtaactgttcctttaatgttgtaattgaaaacttggtttagcgtcttttttttctttctctttttttttcttaaaatgccaactaaaataattagaaagtagcttatttattgcatgcttatacattgatattggaattggaattggttgttaatttctgttactggctttgctagaattcatatgtgcataaataacactaatatttatcatcttgggggctgttctgtgatctattacatgatttttgctctctttttatttttctagtatcaaatgtgttctggctgagtgaatttggatagatataatatgcaagctaattggactttttcatttttctcattaaaaaaaggaagaagtagtccactttttgctagcatactattctgagacttacattaatttgggaaaagtcaagggtcaacaaatttttgtgtctgtgaggggccagatagtaattatttaggctttgcaggctgtgtgatttctgttgcagttattcagctttgccaatgtagtgtgaaaacaatcatagataatatgtaaaaccttactaataaaaacaagctgggttatgttggcacacaggcagtagtttgttcacctctgctgtaagttaatttgggttaacctttgtaggagaaattacagattatttttgtctttgttcatagtttttttgtttagggactgtagtggattatggccaagcagcagtagctagttaagtcttaatcatgaaggtagtagaaacctagaataaaattattatgcccttttcactcatttcataatatgtttgtattgccgtgttgaaaagccaaataaaatacaatccagttaagcagtgagcacccattgttttcccaaaaatagagctccttgctttgtttttgtttttttgttcttttttttttttattatggaatggaattcaatataaagagtttattgtggaccccatggaatgtgattaaattattagcataataaaaagacatcctatgaatttga

SEQ ID NO: 10024 - protein, 138 aa, Homo sapiens
MGSMNSVTGGMGMGLDRMSSSFDRMGPGIGAILERSIDMDRGFLSGPMGSGMRERIGSKGNQIFVRNLPFDLTWQKLKEKFSQCGHVMFAEIKMENGKSKGCGTVRFDSPESAEKACRIMNGIKISGREIDVRLDRNA

SEQ ID NO: 10025 - DNA, 4874 bp, Homo sapiens
aatacatactatttatattttgaaaatttttactgctcttttaactgcgatgtttagagagtccttacattctggcctgatctctaaatctgctgtaatgctatttctgtgtctatgctggaaaaaaaaaatcattgatagtagtatttctgtgtttattgtggaaaaaaaagtgaatgattacctagttcaagatattctctaactgaatgttgtgggtgttactagtgaattttgctttcttgtctgataaatgttcaaagaaacccttttgaagattcatgattagacagctgctatggcatagcactttaaaccatgcctcctgtaccctaccgcttctctagtgtttcattgtggttataccagtggtatctattttgctataatgcattatatcatcttttagtcataaaaataaaatatacttaaagtacatactgtgtattttatttgaggtatgggaatggatggtccaggttttggaggaatgaatagaattggaggaggtatgtataaagatttgtttttttgtatgtacccatcaccatttttaataaactagaaactgtgttgagaattccatgaaaaaaaagtcatggtttattgttggctcatgttctaaaggctgctagcagaaattgagcctggtacatacttaaaggaaggtgatgtgttaagaagtagctgcacaaggtagggtggatgaagagcttactggtgagatttaacatttacaaaacgtacctttcagctacatgactgacagttggatctcaaaattaatctttattccataggaatagggtttggtggtctggaagcaatgaatagcatgggaggatttggaggagttggccgaatgggagagctgtaccgtggtgcgatgactagtagcatggagcgagattttggacgtggtgatattggaataaatcaaggctttggagattcctttggtagacttggtggtggaatgggtagcatgaacagtgtgactggaggaatggggatgggactggaccggatgagttccagctttgatagaatgggaccaggtataggagctatactggaaaggagcatcgatatggatcgaggatttttatcgggtccaatgggaagcggaatgagagagagaataggctccaaaggcaaccagatatttgtcagaaatctaccttttgacttgacttggcagaaactaaaagagaaattcagtcagtgtggtcatgtaatgtttgcagaaataaaaatggagaatggaaagtcaaaaggctgtggaacagtcagatttgactccccagaatcagctgaaaaagcctgcagaataatgaatggcataaaaatcagtggcagagaaattgatgttcgcttggatcgtaatgcataatttcaagccatggttggaacattcctacatctgttttgctgaatctcctagtaaaagtcatttttttaaagtaatattgtatgcttacaaaagctgtaaaaatgaacttttaaaactcccaccagcttttaacagtataatgttaaaaatatactgtaatttttgttaatctcaagtttgggtttttaaagacagcaagtctggtcattcagtttaaatgaatggttatactgtttttaatgaaataagccattttcttgttgttttcagtactacatagttggatttgtttgttctagtttctccagtttttgtcaacttattgtatggtaaaacatagattttttccccccaaacttctgttttataatatgtaatttttcatgaaaagaaagggctcagaaaaattaggatgtgattttggttggttttaaattactgtaagttttagattctaaggttcaagatttttaaaatttgatttaaatgaagaaatggatttttctctctgcccctccctgccattcatattttctgcataacactattaataatatcaacctccacagccccttattttattatttccaataattccaagttcatatagaactgataatgtagcaagccccaagtatgataataggcagactattcccaactttctgtctagtttccagccattgaagtgaactgctaaaaaaagaaaaataattgaaatgttgagagagatggttatgtaagttagtcctctgctgtttacttctgcaggagctgatccatttataaatgcagttttaataaaccatggaataccaaggcacaacatatcaaacacattggatcccacgatgttagacatagccatatctcctttccctacaaaagaaaagcatactgttaaaatgtgcttaccaatactgtgttttattaataatcttcataagaaaagaaacactggatacttttttgttgttgattcgttttgaaaaattgttgttagagcaaaagtcttactgaatttgtatttttaaatttttcttgggttagtatttaaagtcttaacatttatttaataattatatttattaaaccatttttcaataaggtatatagcttatttgttgcttttcattgtaatttaacatggttaatggttaattactatttaacacacatttcaaatgaatattatttgggggattagattgagtgaaattaacctgctattaaatagtaaacttttcctctggagtcacttttttcccccttcaaagtatgttactgaggaagtaaacttttttttttttttttggtttttgttttttgagacacagtctcgctctgttgcccaggctgctggagtgccgtggcgcaatctcggctcactgcaacctccgcctcctggattcaaacaattctcctgcctcagcctcctgagtagctgggattacaggcacatgccaccacgcccggctaatttttgtatttttagtagagactgggtttcaccatgttggtcaggctggtctcaaactcctgacctcgtgatccacccgcctcggcctcccaaaatcctgggattacaggcgcgagccaccacacccggctggaagtaaacatttttaaagctacttttactcattctagccttgtagaatgaccattgcagcttgagggacctagttcttaccttttcttgcaaccaacacacttgcaattgtgtctggtatgcttgttcctgctgctaataaagtaaggcccattactgtatcgggaatttctagtgtttcccctgtaataaacagatatttcaagttacaaatcttaaagattcactaaccatcctttgcagttattttggatatttccttcgtgaacaaaaataaaataggcacatttagaattcagagccaatatgtgcttgcttattagttttttagctagcaacatatttgaatcaggctggtaattcgggtaacccaggtagcacagatttttaatgacatatctaaagatacgtaacagctaaaattctgccagtgagaaattttcctgtttgatattcttacaaaagatgtttatgtccaccattatctcatcagggctgtgctgaatatttgataatgagactgatcattccgctttttctttcttaaaaatattagtcagagttaagcaaattaattatagctatctttaagctataaatgtgttaacatgtatatataccatttattatgttctactttagtgatataccttaatttagtgggctttggcagggcgggggagggggaacgttcattaatctctgaggaaaacaaaacctgttttctacttgagtctaacatatggtcccaatttattaatacttctgttaaatttgatgtcaggtcaacatttttcagaaatgtatttattctcagaaacagaaccagagagaagttaaacaaaaggttatgtaactgttcctttaatgttgtaattgaaaacttggtttagcgtcttttttttctttctctttttttttcttaaaatgccaactaaaataattagaaagtagcttatttattgcatgcttatacattgatattggaattggaattggttgttaatttctgttactggctttgctagaattcatatgtgcataaataacactaatatttatcatcttgggggctgttctgtgatctattacatgatttttgctctctttttatttttctagtatcaaatgtgttctggctgagtgaatttggatagatataatatgcaagctaattggactttttcatttttctcattaaaaaaaggaagaagtagtccactttttgctagcatactattctgagacttacattaatttgggaaaagtcaagggtcaacaaatttttgtgtctgtgaggggccagatagtaattatttaggctttgcaggctgtgtgatttctgttgcagttattcagctttgccaatgtagtgtgaaaacaatcatagataatatgtaaaaccttactaataaaaacaagctgggttatgttggcacacaggcagtagtttgttcacctctgctgtaagttaatttgggttaacctttgtaggagaaattacagattatttttgtctttgttcatagtttttttgtttagggactgtagtggattatggccaagcagcagtagctagttaagtcttaatcatgaaggtagtagaaacctagaataaaattattatgcccttttcactcatttcataatatgtttgtattgccgtgttgaaaagccaaataaaatacaatccagttaagcagtgagcacccattgttttcccaaaaatagagctccttgctttgtttttgtttttttgttcttttttttttttattatggaatggaattcaatataaagagtttattgtggaccccatggaatgtgattaaattattagcataataaaaagacatcctatgaatttga

SEQ ID NO: 10026 - protein, 188 aa, Homo sapiens
MNSMGGFGGVGRMGELYRGAMTSSMERDFGRGDIGINQGFGDSFGRLGGGMGSMNSVTGGMGMGLDRMSSSFDRMGPGIGAILERSIDMDRGFLSGPMGSGMRERIGSKGNQIFVRNLPFDLTWQKLKEKFSQCGHVMFAEIKMENGKSKGCGTVRFDSPESAEKACRIMNGIKISGREIDVRLDRNA

SEQ ID NO: 10027 - DNA, 5332 bp, Homo sapiens
ggttactgagcgctcggggccttttcaaatcgggatccgttaccgcttccccggcagccgccattgtcgcgctcggagcccctcagctcaggcggccgaggcggaggcagcggcggcgggatggcggacgccaacaaggccgaggtgcccggggccactggtggcgacagcccgcacctgcagcccgcagagccgccgggcgagccgcggcgagagccgcaccccgcggaggcggagaagcagcagccgcagcacagcagcagctccaatggcgttaaaatggagaatgatgaatcagcaaaagaagagaaatctgacttaaaggaaaaatctacaggaagtaagaaggccaatagatttcatccttattcaaaagacaagaattcgggcgctggagaaaagaagggtccaaatcgtaacagagttttcattagcaacatcccatatgacatgaaatggcaagctattaaagatctaatgagagagaaagttggtgaggttacatacgtggagctctttaaggatgcggaaggaaaatcaaggggttgtggtgtggttgaattcaaagatgaagaatttgtaaagaaagccctagaaactatgaacaaatatgatcttagtggaagaccccttaatattaaagaggatcctgatggagaaaatgctcgtagggcattgcagcgaacaggaggatcatttccaggaggacacgtccctgatatgggatcagggttgatgaatttaccaccttccatactcaataatccaaacattcctcctgaagtcatcagtaatttgcaggccggtagacttggttccacaatttttgttgccaatcttgacttcaaagttggttggaagaagctaaaggaagtgttcagcatagctggaactgtgaagcgggcagatattaaagaagacaaagatggcaagagcagaggaatgggcactgtcacttttgagcaagcaattgaagcagttcaagcaatttctatgttcaatgggcagtttttatttgatagacctatgcatgtgaaaatggatgacaagtctgttcctcatgaagagtaccgttcacatgatggtaaaacaccacaattaccacgtggtcttggaggcattgggatgggacttggtccgggtggacagcctattagtgccagccagttgaacataggtggagtaatgggaaatttaggtccaggtggtatgggaatggatggtccaggttttggaggaatgaatagaattggaggaggaatagggtttggtggtctggaagcaatgaatagcatgggaggatttggaggagttggccgaatgggagagctgtaccgtggtgcgatgactagtagcatggagcgagattttggacgtggtgatattggaataaatcaaggctttggagattcctttggtagacttggtggtggaatgggtagcatgaacagtgtgactggaggaatggggatgggactggaccggatgagttccagctttgatagaatgggaccaggtataggagctatactggaaaggagcatcgatatggatcgaggatttttatcgggtccaatgggaagcggaatgagagagagaataggctccaaaggcaaccagatatttgtcagaaatctaccttttgacttgacttggcagaaactaaaagagaaattcagtcagtgtggtcatgtaatgtttgcagaaataaaaatggagaatggaaagtcaaaaggctgtggaacagtcagatttgactccccagaatcagctgaaaaagcctgcagaataatgaatggcataaaaatcagtggcagagaaattgatgttcgcttggatcgtaatgcataatttcaagccatggttggaacattcctacatctgttttgctgaatctcctagtaaaagtcatttttttaaagtaatattgtatgcttacaaaagctgtaaaaatgaacttttaaaactcccaccagcttttaacagtataatgttaaaaatatactgtaatttttgttaatctcaagtttgggtttttaaagacagcaagtctggtcattcagtttaaatgaatggttatactgtttttaatgaaataagccattttcttgttgttttcagtactacatagttggatttgtttgttctagtttctccagtttttgtcaacttattgtatggtaaaacatagattttttccccccaaacttctgttttataatatgtaatttttcatgaaaagaaagggctcagaaaaattaggatgtgattttggttggttttaaattactgtaagttttagattctaaggttcaagatttttaaaatttgatttaaatgaagaaatggatttttctctctgcccctccctgccattcatattttctgcataacactattaataatatcaacctccacagccccttattttattatttccaataattccaagttcatatagaactgataatgtagcaagccccaagtatgataataggcagactattcccaactttctgtctagtttccagccattgaagtgaactgctaaaaaaagaaaaataattgaaatgttgagagagatggttatgtaagttagtcctctgctgtttacttctgcaggagctgatccatttataaatgcagttttaataaaccatggaataccaaggcacaacatatcaaacacattggatcccacgatgttagacatagccatatctcctttccctacaaaagaaaagcatactgttaaaatgtgcttaccaatactgtgttttattaataatcttcataagaaaagaaacactggatacttttttgttgttgattcgttttgaaaaattgttgttagagcaaaagtcttactgaatttgtatttttaaatttttcttgggttagtatttaaagtcttaacatttatttaataattatatttattaaaccatttttcaataaggtatatagcttatttgttgcttttcattgtaatttaacatggttaatggttaattactatttaacacacatttcaaatgaatattatttgggggattagattgagtgaaattaacctgctattaaatagtaaacttttcctctggagtcacttttttcccccttcaaagtatgttactgaggaagtaaacttttttttttttttttggtttttgttttttgagacacagtctcgctctgttgcccaggctgctggagtgccgtggcgcaatctcggctcactgcaacctccgcctcctggattcaaacaattctcctgcctcagcctcctgagtagctgggattacaggcacatgccaccacgcccggctaatttttgtatttttagtagagactgggtttcaccatgttggtcaggctggtctcaaactcctgacctcgtgatccacccgcctcggcctcccaaaatcctgggattacaggcgcgagccaccacacccggctggaagtaaacatttttaaagctacttttactcattctagccttgtagaatgaccattgcagcttgagggacctagttcttaccttttcttgcaaccaacacacttgcaattgtgtctggtatgcttgttcctgctgctaataaagtaaggcccattactgtatcgggaatttctagtgtttcccctgtaataaacagatatttcaagttacaaatcttaaagattcactaaccatcctttgcagttattttggatatttccttcgtgaacaaaaataaaataggcacatttagaattcagagccaatatgtgcttgcttattagttttttagctagcaacatatttgaatcaggctggtaattcgggtaacccaggtagcacagatttttaatgacatatctaaagatacgtaacagctaaaattctgccagtgagaaattttcctgtttgatattcttacaaaagatgtttatgtccaccattatctcatcagggctgtgctgaatatttgataatgagactgatcattccgctttttctttcttaaaaatattagtcagagttaagcaaattaattatagctatctttaagctataaatgtgttaacatgtatatataccatttattatgttctactttagtgatataccttaatttagtgggctttggcagggcgggggagggggaacgttcattaatctctgaggaaaacaaaacctgttttctacttgagtctaacatatggtcccaatttattaatacttctgttaaatttgatgtcaggtcaacatttttcagaaatgtatttattctcagaaacagaaccagagagaagttaaacaaaaggttatgtaactgttcctttaatgttgtaattgaaaacttggtttagcgtcttttttttctttctctttttttttcttaaaatgccaactaaaataattagaaagtagcttatttattgcatgcttatacattgatattggaattggaattggttgttaatttctgttactggctttgctagaattcatatgtgcataaataacactaatatttatcatcttgggggctgttctgtgatctattacatgatttttgctctctttttatttttctagtatcaaatgtgttctggctgagtgaatttggatagatataatatgcaagctaattggactttttcatttttctcattaaaaaaaggaagaagtagtccactttttgctagcatactattctgagacttacattaatttgggaaaagtcaagggtcaacaaatttttgtgtctgtgaggggccagatagtaattatttaggctttgcaggctgtgtgatttctgttgcagttattcagctttgccaatgtagtgtgaaaacaatcatagataatatgtaaaaccttactaataaaaacaagctgggttatgttggcacacaggcagtagtttgttcacctctgctgtaagttaatttgggttaacctttgtaggagaaattacagattatttttgtctttgttcatagtttttttgtttagggactgtagtggattatggccaagcagcagtagctagttaagtcttaatcatgaaggtagtagaaacctagaataaaattattatgcccttttcactcatttcataatatgtttgtattgccgtgttgaaaagccaaataaaatacaatccagttaagcagtgagcacccattgttttcccaaaaatagagctccttgctttgtttttgtttttttgttcttttttttttttattatggaatggaattcaatataaagagtttattgtggaccccatggaatgtgattaaattattagcataataaaaagacatcctatgaatttga

SEQ ID NO: 10028 - protein, 576 aa, Homo sapiens
MADANKAEVPGATGGDSPHLQPAEPPGEPRREPHPAEAEKQQPQHSSSSNGVKMENDESAKEEKSDLKEKSTGSKKANRFHPYSKDKNSGAGEKKGPNRNRVFISNIPYDMKWQAIKDLMREKVGEVTYVELFKDAEGKSRGCGVVEFKDEEFVKKALETMNKYDLSGRPLNIKEDPDGENARRALQRTGGSFPGGHVPDMGSGLMNLPPSILNNPNIPPEVISNLQAGRLGSTIFVANLDFKVGWKKLKEVFSIAGTVKRADIKEDKDGKSRGMGTVTFEQAIEAVQAISMFNGQFLFDRPMHVKMDDKSVPHEEYRSHDGKTPQLPRGLGGIGMGLGPGGQPISASQLNIGGVMGNLGPGGMGMDGPGFGGMNRIGGGIGFGGLEAMNSMGGFGGVGRMGELYRGAMTSSMERDFGRGDIGINQGFGDSFGRLGGGMGSMNSVTGGMGMGLDRMSSSFDRMGPGIGAILERSIDMDRGFLSGPMGSGMRERIGSKGNQIFVRNLPFDLTWQKLKEKFSQCGHVMFAEIKMENGKSKGCGTVRFDSPESAEKACRIMNGIKISGREIDVRLDRNA

SEQ ID NO: 10029 - DNA, 5404 bp, Homo sapiens
ggttactgagcgctcggggccttttcaaatcgggatccgttaccgcttccccggcagccgccattgtcgcgctcggagcccctcagctcaggcggccgaggcggaggcagcggcggcgggatggcggacgccaacaaggccgaggtgcccggggccactggtggcgacagcccgcacctgcagcccgcagagccgccgggcgagccgcggcgagagccgcaccccgcggaggcggagaagcagcagccgcagcacagcagcagctccaatggcgttaaaatggagaatgatgaatcagcaaaagaagagaaatctgacttaaaggaaaaatctacaggaagtaagaaggccaatagatttcatccttattcaaaagacaagaattcgggcgctggagaaaagaagggtccaaatcgtaacagagttttcattagcaacatcccatatgacatgaaatggcaagctattaaagatctaatgagagagaaagttggtgaggttacatacgtggagctctttaaggatgcggaaggaaaatcaaggggttgtggtgtggttgaattcaaagatgaagaatttgtaaagaaagccctagaaactatgaacaaatatgatcttagtggaagaccccttaatattaaagaggatcctgatggagaaaatgctcgtagggcattgcagcgaacaggaggatcatttccaggaggacacgtccctgatatgggatcagggttgatgaatttaccaccttccatactcaataatccaaacattcctcctgaagtcatcagtaatttgcaggccggtagacttggttccacaatttttgttgccaatcttgacttcaaagttggttggaagaagctaaaggaagtgttcagcatagctggaactgtgaagcgggcagatattaaagaagacaaagatggcaagagcagaggaatgggcactgtcacttttgagcaagcaattgaagcagttcaagcaatttctatgttcaatgggcagtttttatttgatagacctatgcatgtgaaaatggatgacaagtctgttcctcatgaagagtaccgttcacatgatggtaaaacaccacaattaccacgtggtcttggaggcattgggatgggacttggtccgggtggacagcctattagtgccagccagttgaacataggtggagtaatgggaaatttaggtccaggtggtatgggaatggatggtccaggttttggaggaatgaatagaattggaggaggaatagggtttggtggtctggaagcaatgaatagcatgggaggatttggaggagttggccgaatgggagagctgtaccgtggtgcgatgactagtagcatggagcgagattttggacgtggtgatattggaataaatcaaggctttggagattcctttggtagacttggcagtgcaatgattggagggtttgcaggaagaataggatcttctaacatgggtccagtaggatctggaataagtggtggaatgggtagcatgaacagtgtgactggaggaatggggatgggactggaccggatgagttccagctttgatagaatgggaccaggtataggagctatactggaaaggagcatcgatatggatcgaggatttttatcgggtccaatgggaagcggaatgagagagagaataggctccaaaggcaaccagatatttgtcagaaatctaccttttgacttgacttggcagaaactaaaagagaaattcagtcagtgtggtcatgtaatgtttgcagaaataaaaatggagaatggaaagtcaaaaggctgtggaacagtcagatttgactccccagaatcagctgaaaaagcctgcagaataatgaatggcataaaaatcagtggcagagaaattgatgttcgcttggatcgtaatgcataatttcaagccatggttggaacattcctacatctgttttgctgaatctcctagtaaaagtcatttttttaaagtaatattgtatgcttacaaaagctgtaaaaatgaacttttaaaactcccaccagcttttaacagtataatgttaaaaatatactgtaatttttgttaatctcaagtttgggtttttaaagacagcaagtctggtcattcagtttaaatgaatggttatactgtttttaatgaaataagccattttcttgttgttttcagtactacatagttggatttgtttgttctagtttctccagtttttgtcaacttattgtatggtaaaacatagattttttccccccaaacttctgttttataatatgtaatttttcatgaaaagaaagggctcagaaaaattaggatgtgattttggttggttttaaattactgtaagttttagattctaaggttcaagatttttaaaatttgatttaaatgaagaaatggatttttctctctgcccctccctgccattcatattttctgcataacactattaataatatcaacctccacagccccttattttattatttccaataattccaagttcatatagaactgataatgtagcaagccccaagtatgataataggcagactattcccaactttctgtctagtttccagccattgaagtgaactgctaaaaaaagaaaaataattgaaatgttgagagagatggttatgtaagttagtcctctgctgtttacttctgcaggagctgatccatttataaatgcagttttaataaaccatggaataccaaggcacaacatatcaaacacattggatcccacgatgttagacatagccatatctcctttccctacaaaagaaaagcatactgttaaaatgtgcttaccaatactgtgttttattaataatcttcataagaaaagaaacactggatacttttttgttgttgattcgttttgaaaaattgttgttagagcaaaagtcttactgaatttgtatttttaaatttttcttgggttagtatttaaagtcttaacatttatttaataattatatttattaaaccatttttcaataaggtatatagcttatttgttgcttttcattgtaatttaacatggttaatggttaattactatttaacacacatttcaaatgaatattatttgggggattagattgagtgaaattaacctgctattaaatagtaaacttttcctctggagtcacttttttcccccttcaaagtatgttactgaggaagtaaacttttttttttttttttggtttttgttttttgagacacagtctcgctctgttgcccaggctgctggagtgccgtggcgcaatctcggctcactgcaacctccgcctcctggattcaaacaattctcctgcctcagcctcctgagtagctgggattacaggcacatgccaccacgcccggctaatttttgtatttttagtagagactgggtttcaccatgttggtcaggctggtctcaaactcctgacctcgtgatccacccgcctcggcctcccaaaatcctgggattacaggcgcgagccaccacacccggctggaagtaaacatttttaaagctacttttactcattctagccttgtagaatgaccattgcagcttgagggacctagttcttaccttttcttgcaaccaacacacttgcaattgtgtctggtatgcttgttcctgctgctaataaagtaaggcccattactgtatcgggaatttctagtgtttcccctgtaataaacagatatttcaagttacaaatcttaaagattcactaaccatcctttgcagttattttggatatttccttcgtgaacaaaaataaaataggcacatttagaattcagagccaatatgtgcttgcttattagttttttagctagcaacatatttgaatcaggctggtaattcgggtaacccaggtagcacagatttttaatgacatatctaaagatacgtaacagctaaaattctgccagtgagaaattttcctgtttgatattcttacaaaagatgtttatgtccaccattatctcatcagggctgtgctgaatatttgataatgagactgatcattccgctttttctttcttaaaaatattagtcagagttaagcaaattaattatagctatctttaagctataaatgtgttaacatgtatatataccatttattatgttctactttagtgatataccttaatttagtgggctttggcagggcgggggagggggaacgttcattaatctctgaggaaaacaaaacctgttttctacttgagtctaacatatggtcccaatttattaatacttctgttaaatttgatgtcaggtcaacatttttcagaaatgtatttattctcagaaacagaaccagagagaagttaaacaaaaggttatgtaactgttcctttaatgttgtaattgaaaacttggtttagcgtcttttttttctttctctttttttttcttaaaatgccaactaaaataattagaaagtagcttatttattgcatgcttatacattgatattggaattggaattggttgttaatttctgttactggctttgctagaattcatatgtgcataaataacactaatatttatcatcttgggggctgttctgtgatctattacatgatttttgctctctttttatttttctagtatcaaatgtgttctggctgagtgaatttggatagatataatatgcaagctaattggactttttcatttttctcattaaaaaaaggaagaagtagtccactttttgctagcatactattctgagacttacattaatttgggaaaagtcaagggtcaacaaatttttgtgtctgtgaggggccagatagtaattatttaggctttgcaggctgtgtgatttctgttgcagttattcagctttgccaatgtagtgtgaaaacaatcatagataatatgtaaaaccttactaataaaaacaagctgggttatgttggcacacaggcagtagtttgttcacctctgctgtaagttaatttgggttaacctttgtaggagaaattacagattatttttgtctttgttcatagtttttttgtttagggactgtagtggattatggccaagcagcagtagctagttaagtcttaatcatgaaggtagtagaaacctagaataaaattattatgcccttttcactcatttcataatatgtttgtattgccgtgttgaaaagccaaataaaatacaatccagttaagcagtgagcacccattgttttcccaaaaatagagctccttgctttgtttttgtttttttgttcttttttttttttattatggaatggaattcaatataaagagtttattgtggaccccatggaatgtgattaaattattagcataataaaaagacatcctatgaatttga

SEQ ID NO: 10030 - protein, 600 aa, Homo sapiens
MADANKAEVPGATGGDSPHLQPAEPPGEPRREPHPAEAEKQQPQHSSSSNGVKMENDESAKEEKSDLKEKSTGSKKANRFHPYSKDKNSGAGEKKGPNRNRVFISNIPYDMKWQAIKDLMREKVGEVTYVELFKDAEGKSRGCGVVEFKDEEFVKKALETMNKYDLSGRPLNIKEDPDGENARRALQRTGGSFPGGHVPDMGSGLMNLPPSILNNPNIPPEVISNLQAGRLGSTIFVANLDFKVGWKKLKEVFSIAGTVKRADIKEDKDGKSRGMGTVTFEQAIEAVQAISMFNGQFLFDRPMHVKMDDKSVPHEEYRSHDGKTPQLPRGLGGIGMGLGPGGQPISASQLNIGGVMGNLGPGGMGMDGPGFGGMNRIGGGIGFGGLEAMNSMGGFGGVGRMGELYRGAMTSSMERDFGRGDIGINQGFGDSFGRLGSAMIGGFAGRIGSSNMGPVGSGISGGMGSMNSVTGGMGMGLDRMSSSFDRMGPGIGAILERSIDMDRGFLSGPMGSGMRERIGSKGNQIFVRNLPFDLTWQKLKEKFSQCGHVMFAEIKMENGKSKGCGTVRFDSPESAEKACRIMNGIKISGREIDVRLDRNA

SEQ ID NO: 10031 - DNA, 2961 bp, Homo sapiens
ggttactgagcgctcggggccttttcaaatcgggatccgttaccgcttccccggcagccgccattgtcgcgctcggagcccctcagctcaggcggccgaggcggaggcagcggcggcgggatggcggacgccaacaaggccgaggtgcccggggccactggtggcgacagcccgcacctgcagcccgcagagccgccgggcgagccgcggcgagagccgcaccccgcggaggcggagaagcagcagccgcagcacagcagcagctccaatggcgttaaaatggagaatgatgaatcagcaaaagaagagaaatctgacttaaaggaaaaatctacaggaagtaagaaggccaatagatttcatccttattcaaaagacaagaattcgggcgctggagaaaagaagggtccaaatcgtaacagagttttcattagcaacatcccatatgacatgaaatggcaagctattaaagatctaatgagagagaaagttggtgaggttacatacgtggagctctttaaggatgcggaaggaaaatcaaggggttgtggtgtggttgaattcaaagatgaagaatttgtaaagaaagccctagaaactatgaacaaatatgatcttagtggaagaccccttaatattaaagaggatcctgatggagaaaatgctcgtagggcattgcagcgaacaggaggatcatttccaggaggacacgtccctgatatgggatcagggttgatgaatttaccaccttccatactcaataatccaaacattcctcctgaagtcatcagtaatttgcaggccggtagacttggttccacaatttttgttgccaatcttgacttcaaagttggttggaagaagctaaaggaagtgttcagcatagctggaactgtgaagcgggcagatattaaagaagacaaagatggcaagagcagaggaatgggcactgtcacttttgagcaagcaattgaagcagttcaagcaatttctatgttcaatgggcagtttttatttgatagacctatgcatgtgaaaatggatgacaagtctgttcctcatgaagagtaccgttcacatgatggtaaaacaccacaattaccacgtggtcttggaggcattgggatgggacttggtccgggtggacagcctattagtgccagccagttgaacataggtggagtaatgggaaatttaggtccaggtggtatgggaatggatggtccaggttttggaggaatgaatagaattggaggaggaatagggtttggtggtctggaagcaatgaatagcatgggaggatttggaggagttggccgaatgggagagctgtaccgtggtgcgatgactagtagcatggagcgagattttggacgtggtgatattggaataaatcaaggctttggagattcctttggtagacttggtggtggaatgggtagcatgaacagtgtgactggaggaatggggatgggactggaccggatgagttccagctttgatagaatgggaccaggtataggagctatactggaaaggagcatcgatatggatcgaggatttttatcgggtccaatgggaagcggaatgagagagagaataggctccaaaggcaaccagatatttgtcagaaatctaccttttgacttgacttggcagaaactaaaagagaaattcagtcagtgtggtcatgtaatgtttgcagaaataaaaatggagaatggaaagtcaaaaggctgtggaacagtcagatttgactccccagaatcagctgaaaaagcctgcagaataatgaatggcataaaaatcagtggcagagaaattgatgttcgcttggatcgtaatgcataatttcaagccatggttggaacattcctacatctgttttgctgaatctcctagtaaaagtcatttttttaaagtaatattgtatgcttacaaaagctgtaaaaatgaacttttaaaactcccaccagcttttaacagtataatgttaaaaatatactgtaatttttgttaatctcaagtttgggtttttaaagacagcaagtctggtcattcagtttaaatgaatggttatactgtttttaatgaaataagccattttcttgttgttttcagtactacatagttggatttgtttgttctagtttctccagtttttgtcaacttattgtatggtaaaacatagattttttccccccaaacttctgttttataatatgtaatttttcatgaaaagaaagggctcagaaaaattaggatgtgattttggttggttttaaattactgtaagttttagattctaaggttcaagatttttaaaatttgatttaaatgaagaaatggatttttctctctgcccctccctgccattcatattttctgcataacactattaataatatcaacctccacagccccttattttattatttccaataattccaagttcatatagaactgataatgtagcaagccccaagtatgataataggcagactattcccaactttctgtctagtttccagccattgaagtgaactgctaaaaaaagaaaaataattgaaatgttgagagagatggttatgtaagttagtcctctgctgtttacttctgcaggagctgatccatttataaatgcagttttaataaaccatggaataccaaggcacaacatatcaaacacattggatcccacgatgttagacatagccatatctcctttccctacaaaagaaaagcatactgttaaaatgtgcttaccaatactgtgttttattaataatcttcataagaaaagaaacactggatacttttttgttgttgattcgttttgaaaaattgttgttagagcaaaagtcttactgaatttgtatttttaaatttttcttgggttagtatttaaagtcttaacatttatttaataattatatttattaaaccatttttcaataaggt

SEQ ID NO: 10032 - protein, 576 aa, Homo sapiens; identical to SEQ ID NO: 10028

SEQ ID NO: 10033 - DNA, 1426 bp, Homo sapiens
agctgaaatgctaccatatcataggcagctaaaatctgtttatccatttgggaaggtggcttttcaggtagttatttggctgctcacctggaagaactcacagttcatttttagagattggtttttaaactttggtgttaggacccttttatattttaaaatttgttgagaacccgaaaatgctttgtttatgtagttataattaccagtatttactgtattataaatgaaaaattagaaattaaaaaaattacatattaaaaaatgataaactcattacatgttaacatacataaaagttttaagaaaataaactatttttcaatgcaaaaaagaaattggtgaggagagtggcattgttttacctttccacacatctttttaattttggaaaattacaccttaaactcaagagaatgagggtaaaacatcaaataatgtcttagtagtatttggtgacttaaatagttttgacctattgaaccctcaagagtccctggaccatactttgtgaattactgttttaattgatggactaataaatgctatcagattcctattttgtcaagatgctgtagtcacactttaaattatgaggctcattatcataatcattctgatccaaacaagttttctcccttacccttagactctcacacctacctaccctctcctaaatacatactatttatattttgaaaatttttactgctcttttaactgcgatgtttagagagtccttacattctggcctgatctctaaatctgctgtaatgctatttctgtgtctatgctggaaaaaaaaaatcattgatagtagtatttctgtgtttattgtggaaaaaaaagtgaatgattacctagttcaagatattctctaactgaatgttgtgggtgttactagtgaattttgctttcttgtctgataaatgttcaaagaaacccttttgaagattcatgattagacagctgctatggcatagcactttaaaccatgcctcctgtaccctaccgcttctctagtgtttcattgtggttataccagtggtatctattttgctataatgcattatatcatcttttagtcataaaaataaaatatacttaaagtacatactgtgtattttatttgaggtatgggaatggatggtccaggttttggaggaatgaatagaattggaggaggtatgtataaagatttgtttttttgtatgtacccatcaccatttttaataaactagaaactgtgttgagaattccatgaaaaaaaagtcatggtttattgttggctcatgttctaaaggctgctagcagaaattgagcctggtacatacttaaaggaaggtgatgtgttaagaagtagctgcacaaggtagggtggatgaagagcttactggtgagatttaacatttacaaaacgtacctt

SEQ ID NO: 10034 - protein, 53 aa, Homo sapiens
MLPYHRQLKSVYPFGKVAFQVVIWLLTWKNSQFIFRDWFLNFGVRTLLYFKIC

SEQ ID NO: 10035 - DNA, 2597 bp, Homo sapiens
accgcttccccggcagccgccattgtcgcgctcggagcccctcagctcaggcggccgaggcggaggcagcggcggcgggatggcggacgccaacaaggccgaggtgcccggggccactggtggcgacagcccgcacctgcagcccgcagagccgccgggcgagccgcggcgagagccgcaccccgcggaggcggagaagcagcagccgcagcacagcagcagctccaatggcgttaaaatggagaatgatgaatcagcaaaagaagagaaatctgacttaaaggaaaaatctacaggaagtaagaaggccaatagatttcatccttattcaaaagacaagaattcgggcgctggagaaaagaagggtccaaatcgtaacagagttttcattagcaacatcccatatgacatgaaatggcaagctattaaagatctaatgagagagaaagggttgtggtgtggttgaattcaaagatgaagaatttgtaaagaaagccctagaaactatgaacaaatatgatcttagtggaagaccccttaatattaaagaggatcctgatggagaaaatgctcgtagggcattgcagcgaacaggaggatcatttccaggaggacacgtccctgatatgggatcagggttgatgaatttaccaccttccatactcaataatccaaacattcctcctgaagtcatcagtaatttgcaggccggtagacttggttccacaatttttgttgccaatcttgacttcaaagttggttggaagaagctaaaggaagtgttcagcatagctggaactgtgaagcgggcagatattaaagaagacaaagatggcaagagcagaggaatgggcactgtcacttttgagcaagcaattgaagcagttcaagcaatttctatgttcaatgggcagtttttatttgatagacctatgcatgtgaaaatggatgacaagtctgttcctcatgaagagtaccgttcacatgatggtaaaacaccacaattaccacgtggtcttggaggcattgggatgggacttggtccgggtggacagcctattagtgccagccagttgaacataggtggagtaatgggaaatttaggtccaggtggtgagtattctaacttcctcttttctttttaaatgatacatatgctagctaataaagcctccattgatgtggtctgtaataatgtttaaaggactctaattaatagttagatatttacggtgtcacttcattctgaaaaaggaatgaaaccttgagcacagctaacatgaaagagataggcagaagtcaggagggtttctttggggccagctatgttgtagctagccttttagcattttggattttgaaatgtcttgaaggcagaaggagaatatatcatctatgaacagtatttatggagtagctgaaatgctaccatatcataggcagctaaaatctgtttatccatttgggaaggtggcttttcaggtagttatttggctgctcacctggaagaactcacagttcatttttagagattggtttttaaactttggtgttaggacccttttatattttaaaatttgttgagaacccgaaaatgctttgtttatgtagttataattaccagtatttactgtattataaatgaaaaattagaaattaaaaaaattacatattaaaaaatgataaactcattacatgttaacatacataaaagttttaagaaaataaactatttttcaatgcaaaaaagaaattggtgaggagagtggcattgttttacctttccacacatctttttaatgtttggcttaatattgctgttatatctgtttctgcactttagttttttgtgatattgtacatcatatagtgtttggaaaattacaccttaaactcaagagaatgagggtaaaacatcaaataatgtcttagtagtatttggtgacttaaatagttttgacctattgaaccctcaagagtccctggaccatactttgtgaattactgttttaattgatggactaataaatgctatcagattcctattttgtcaagatgctgtagtcacactttaaattatgaggctcattatcataatcattctgatccaaacaagttttctcccttacccttagactctcacacctacctaccctctcctaaatacatactatttatattttgaaaatttttactgctcttttaactgcgatgtttagagagtccttacattctggcctgatctctaaatctgctgtaatgctatttctgtgtctatgctggaaaaaaaaaatcattgatagtagtatttctgtgtttattgtggaaaaaaaagtgaatgattacctagttcaagatattctctaactgaatgttgtgggtgttactagtgaattttgctttcttgtctgataaatgttcaaagaaacccttttgaagattcatgattagacagctgctatggcatagcactttaaaccatgcctcctgtaccctaccgcttctctagtgtttcattgtggttataccagtggtatctattttgctataatgcattatatcatcttttagtcataaaaataaaatatacttaaagt

SEQ ID NO: 10036 - protein, 212 aa, Homo sapiens
MNKYDLSGRPLNIKEDPDGENARRALQRTGGSFPGGHVPDMGSGLMNLPPSILNNPNIPPEVISNLQAGRLGSTIFVANLDFKVGWKKLKEVFSIAGTVKRADIKEDKDGKSRGMGTVTFEQAIEAVQAISMFNGQFLFDRPMHVKMDDKSVPHEEYRSHDGKTPQLPRGLGGIGMGLGPGGQPISASQLNIGGVMGNLGPGGEYSNFLFSF

SEQ ID NO: 10037 - DNA, 2864 bp, Homo sapiens
atgcctgaacttctaaataagataaatctcacatacacacacagatgctgccacagacacacgcgagcgcaaatatttacacactgccacaccgaagaaatccatgcacgttttcctgcaaacgcgcgcgcgcacacgtacttcggcgggcgcccacgtcctctgtctcaccaacagacacagacatttacacttctaggccaggaaagcgctaaccagggccctgtgactctacgcaggttccagaacacgccttctacatttgttactgaaccgatcagcgaacacagacaaacgtgccaacacttaagtctactggctggacttcatctccatggcaacaagcatggaaggcaaagagttgattccagaaggaactgtgaagagccacaacaatgtgccagtgaataatgagtagtacctactgtggcaactcttcagctaagatgagtgtcaacgaagtatcagctttctcattgactctggagcaaaaaactggctttgcttttgttgggattttgtgtatcttcttgggacttcttattatccgatgcttcaaaatcctgctagacccatatagtagcatgccttcctctacatgggaagatgaagttgaagagtttgataaagggacatttgaatatgcactcgcgtgagagttccagctatatggtttttatggttgtgccatcgggacacattctggatacaattgtaactaccttgagggtgtgggagagaggctcattttgttcagtgaattcaataaacatctgtgactaatttcttcaccatgctgtgtaaatgataaactattgttgggattcctcactttcctctgttcccacttagaggtttccaatgaatagagcataaggatggctgccgccatgtttaccatctttattcttatcttgaacaactgccttgaatttctgcttcctttcttgtgctaataaactgtgccaaaggcatcttgctctctcccctctgaaaagcccaggcatcccctccacattcctgactcagacccctttagctttagtgagtcaggtcttaaacagagaatttagtccaaagaataatcaaaatattatttgtctaataataaccataggcccaaaaggttcacaggtgaaaaaatatctcaaaaatctaacacccaaagcctacaagtagtcacaggccctaaagctccccaaatttcacagagccctgaccctcctatctcttctgtttgtcgaatctcttgcagtaaaatcccatagcttggaatccaaaccagatctgcctcatactgatgctccctcccctaccccttgcataaatagaatttaaaagggagtttccagcatgacctagtggaaagagtactctaagcagaaacaaagacagtctcagctgtgccaccagtagagctatgctctaatgggtaagtcatctaatctctgtgagcttcagtgaagagtagtgttaacatccttttcaattctagtgccctatgaatgctacaaatgtatctgaaaacccagagatctgaaatgaatgaggatttaagatatcatgaaaagtttttcagattaggagcctaaactcagagatttgaattctaatgttagcttagccaagaactagctttatgacctagaaagttacctaaagggaacctatattgcacaacaagaattaagaaacccatcctgcatgtcttcagcaatattgagagggccaattagatataatgaatgtgaaagcattttgtaaaccataaaacagtatctaaacataccttgctatcaatatttattgtcctcatcagtagcagtaatagagattctcaaaccctaagaagcaatggcttagtgtaaattattcaatctctctagtatttcattctcttcaattgagaaataaaaagataaaattatatagttctaaattctttccaactacaaacttctgactctctatgagtcagaatggaggaacatagcaggagataaatacaaaaatatttatgtcctttgaaaacacagaactgcaaaacataccatgaaggaacaagactaatattaccaagaggtagcactaagttagttactttcaatttatttgatactcttataaattctttgagttggagactactatttccattttatttttaatcttaattttgcagaagagaaactgaagctaagagaaattaactagcttcccaaggtcaccatagctagggaatggttatgttagggattgaacttgggcagtttgatttctgctgtatccctagacactgtcctcaacacttctacatagcttataggcatggttactgctcaggtctatggaattccaaaaccagctgtctctgtgagattccttgatgctttccatctcataatagatttagaacatatctgttattagctatggatcttctggaccaaatcctcacctcaaggaggctctctgtaccccagttggttcaagagtgtaggcctggtacacctcatagccagttagtaacttggcccaagaacaggccactgggccaagttcaactgaacatactgaaaattgtgtgtgccaggaaactaggtctctttgttgaccaaggcttttaaagtaccagatgtttcatttgtctcccagagaagacacccaccaagaccctccattttgatgactagaacaaaccaaggccagatctttatttcaaaggaagaaagacctctacaaccaagaaaactttatgaaatatgagcattgtttctggaagttcaactcccataagcttttcaagtatattaactctaccataatattatttccaaatccactaaagaaaaattctattaacc

SEQ ID NO: 10038 - protein, 136 aa, Homo sapiens
MPELLNKINLTYTHRCCHRHTRAQIFTHCHTEEIHARFPANARAHTYFGGRPRPLSHQQTQTFTLLGQESANQGPVTLRRFQNTPSTFVTEPISEHRQTCQHLSLLAGLHLHGNKHGRQRVDSRRNCEEPQQCASE

SEQ ID NO: 10039 - DNA, 840 bp, Homo sapiens
ctctgataaagctctagatagctgccaggtgatgccagagattactagttttgggaccaattaaagtagcaagatgcagccaggagtggtggcttatgcctgtaatcccagcactttgggaggccgaggccgagctcaagggagcagaactaagttacatgattctgctgcggatgtataagcaccactccaataatttattatcacggttggagactttgacttgtcactttatgacttgaaatatggctccatggtaaatgcccataaagctgatttttaaaatctggatattacagttctaattctcacttagtttaaaaggtagaataggcttcttgtttcatagatcatttgtgtgaatgttgatttgttatgtcattgacatcatacacacatgcttacattttgaaggttgctagcgtttcccattaatgcttctgaattgatgccaaaggaaagcattgattataaattaggttccttggtattagttggtgcatgaccctgacccttttcaagctatatgaaaggtaatgatgctctcaaaagcctgcaaaatggcttattcaggaaagcataatggattaaaaatccattaggttccactttctttgctagatgctgagatacaaagataaatgagatttggtctctgccctcgaggagatacgtggcaaaataatatggtaagttctacaaagttctatacaaacacagattaatatgctattcatgttttattagccattgccaaagaagggatgaagaactgcaaaaagataaaacacagaatacttgtacttcaggtccttgccaatatctactgcccaactttta

SEQ ID NO: 10040 - protein, 48 aa, Homo sapiens
MPVIPALWEAEAELKGAELSYMILLRMYKHHSNNLLSRLETLTCHFMT

SEQ ID NO: 10041 - DNA, 811 bp, Homo sapiens
tgaaatggtgcgtggtgagacctgtctccccaacacaagctagaagacaacaaaatagcagccaggaaacgctctgataaagctctagatagctgccaggccgagctcaagggagcagaactaagttacatgattctgctgcggatgtataagcaccactccaataatttattatcacggttggagactttgacttgtcactttatgacttgaaatatggctccatggtaaatgcccataaagctgatttttaaaatctggatattacagttctaattctcacttagtttaaaaggtagaataggcttcttgtttcatagatcatttgtgtgaatgttgatttgttatgtcattgacatcatacacacatgcttacattttgaaggttgctagcgtttcccattaatgcttctgaattgatgccaaaggaaagcattgattataaattaggttccttggtattagttggtgcatgaccctgacccttttcaagctatatgaaaggtaatgatgctctcaaaagcctgcaaaatggcttattcaggaaagcataatggattaaaaatccattaggttccactttctttgctagatgctgagatacaaagataaatgagatttggtctctgccctcgaggagatacgtggcaaaataatatggtaagttctacaaagttctatacaaacacagattaatatgctattcatgttttattagccattgccaaagaagggatgaagaactgcaaaaagataaaacacagaatacttgtacttcaggtccttgccaatatctactgcccaactttta

SEQ ID NO: 10042 - protein, 50 aa, Homo sapiens
YGKFYKVLYKHRLICYSCFISHCQRRDEELQKDKTQNTCTSGPCQYLLPN

SEQ ID NO: 10043 - DNA, 693 bp, Homo sapiens
acaaacaacgcagaatgatgatgatggtctaggtttctttaatgagatatctggagaattttcagaccaggtttcccagtgcgttggaaggattgagtgtcagagtccttgagccatccaaagattctcttaagagagaaattctcttaaggttgaaatctgagggtttaggggtggattctggcagatcctaaggtctgggatctctggaaagccctgaaatttatgcatttcaccatgatgaagacatctaggcaaagagttgattccagaaggaactgtgaagagccacaacaatgtgccagtgaataatgagtagtacctactgtggcaactcttcagctaagatgagtgtcaacgaagtatcagctttctcattgactctggagcaaaaaactggctttgcttttgttgggattttgtgtatcttcttgggacttcttattatccgatgcttcaaaatcctgctagacccatatagtagcatgccttcctctacatgggaagatgaagttgaagagtttgataaagggacatttgaatatgcactcgcgtgagagttccagctatatggtttttatggttgtgccatcgggacacattctggatacaattgtaactaccttgagggtgtgggagagaggctcattttgttcagtgaattcaataaacatctgtgactaatttcttcac

SEQ ID NO: 10044 - protein, 81 aa, Homo sapiens
MSSTYCGNSSAKMSVNEVSAFSLTLEQKTGFAFVGILCIFLGLLIIRCFKILLDPYSSMPSSTWEDEVEEFDKGTFEYALA

SEQ ID NO: 10045 - DNA, 924 bp, Homo sapiens
gctttgaagaacatcctgaagattatatcggagacaatatatcaagaatctatttattgaatcatctagaacaaaagccaggagctccctaatggaagcacattagtgtttattttgatgaagaaatatatagattttttaaaacaaccacaaagtagatagctcagtaaaaaatcaattttggaagatgtcactgaacaactcttccaatgtatttctggattcagtgcccagtaataccaatcgctttcaagttagtgtcataaatgagaaccatgagagcagtgcagctgcagatgacaatactgacccaccacattatgaagaaacctcttttggggatgaagctcagaaaagactcagaatcagctttaggcctgggaatcaggagtgctatgacaatttcctccaaagtggagaaactgctaaaacagatgccagttttcacgcttatgattctcacacaaacacatactatctacaaacttttggccacaacaccatggatgccgttcccaagatagagtactatcgtaacaccggcagcatcagtgggcccaaggtcaaccgacccagcctgcttgagattcacgagcaactcgcaaagaatgtggcagtcaccccaagttcagctgacagagttgctaacggtgatgggatacctggagatgaacaagctgaaaataaggaagatgatcaagctggtgttgtgaagtttggatgggtgaaaggtgtgctggtaagatgcatgctgaacatctggggagtcatgctcttcattcgcctctcctggattgttggagaagctggaattgagtatccttcttggcatgattggtaaaacttcactgaacaaaaataacttgtgagaaaactggtgaaaatgtgacctgactaataaaaatgctgaattgttgaactttt

SEQ ID NO: 10046 - protein, 217 aa, Homo sapiens
MSLNNSSNVFLDSVPSNTNRFQVSVINENHESSAAADDNTDPPHYEETSFGDEAQKRLRISFRPGNQECYDNFLQSGETAKTDASFHAYDSHTNTYYLQTFGHNTMDAVPKIEYYRNTGSISGPKVNRPSLLEIHEQLAKNVAVTPSSADRVANGDGIPGDEQAENKEDDQAGVVKFGWVKGVLVRCMLNIWGVMLFIRLSWIVGEAGIEYPSWHDW

SEQ ID NO: 10047 - DNA, 1763 bp, Homo sapiens
gctttgaagaacatcctgaagattatatcggagacaatatatcaagaatctatttattgaatcatctagaacaaaagccaggagctccctaatggaagcacattagtgtttattttgatgaagaaatatatagattttttaaaacaaccacaaagtagatagctcagtaaaaaatcaattttggaagatgtcactgaacaactcttccaatgtatttctggattcagtgcccagtaataccaatcgctttcaagttagtgtcataaatgagaaccatgagagcagtgcagctgcagatgacaatactgacccaccacattatgaagaaacctcttttggggatgaagctcagaaaagactcagaatcagctttaggcctgggaatcaggagtgctatgacaatttcctccaaagtggagaaactgctaaaacagatgccagttttcacgcttatgattctcacacaaacacatactatctacaaacttttggccacaacaccatggatgccgttcccaagatagagtactatcgtaacaccggcagcatcagtgggcccaaggtcaaccgacccagcctgcttgagattcacgagcaactcgcaaagaatgtggcagtcaccccaagttcagctgacagagttgctaacggtgatgggatacctggagatgaacaagctgaaaataaggaagatgatcaagctggtgttgtgaagtttggatgggtgaaaggtgtgctggtaagatgcatgctgaacatctggggagtcatgctcttcattcgcctctcctggattgttggagaagctggaattggtcttggagttctcataattcttctttccaccatggtaacttctattactgggttgtcaacttctgcgatagcaactaacgggtttgttcgtggaggtggggcctactatcttatttccagaagtttagggcccgagttcggtgggtcaataggcctgatctttgcttttgctaatgcagtggctgttgctatgtatgtggtgggatttgctgagactgtagtagatcttcttaaggagagtgattcgatgatggtggatccaaccaatgacatccggattataggctccatcacagtggtgattcttctaggaatttcagtagctggaatggaatgggaggcaaaggcccaagtcattcttctggtcattcttctaattgctattgcaaacttcttcattggaactgtcattccatccaacaatgagaaaaagtccagaggtttctttaattaccaagcatcaatatttgcagaaaactttgggccacgcttcacaaagggtgaaggcttcttctctgtctttgccatttttttcccagcagctactgggattcttgctggtgccaatatctcaggagatttggaggcactgaggaaacaaggagcttcacctctccctcaaggagctcagagtcgaaggaggagacagacttcccttatatgaattagaacaagcaagagtagaatcaagtgcaaaggaaagaggaagcagaaattgcctgtcccctcaaaaagtaaaggaagactttcagaagaggggacactcaatccaggttttgagggatgaacaggagtttgccgacaggacaaagaagagacggacatttgaaacagaaggaatgggatgtaagaaggcaccaagaaagatgctgctaatgagaattattttaagtgcagagtagtgtatgtaatccttcattaatatattaataaacatatttataaat

SEQ ID NO: 10048 - protein, 430 aa, Homo sapiens
MSLNNSSNVFLDSVPSNTNRFQVSVINENHESSAAADDNTDPPHYEETSFGDEAQKRLRISFRPGNQECYDNFLQSGETAKTDASFHAYDSHTNTYYLQTFGHNTMDAVPKIEYYRNTGSISGPKVNRPSLLEIHEQLAKNVAVTPSSADRVANGDGIPGDEQAENKEDDQAGVVKFGWVKGVLVRCMLNIWGVMLFIRLSWIVGEAGIGLGVLIILLSTMVTSITGLSTSAIATNGFVRGGGAYYLISRSLGPEFGGSIGLIFAFANAVAVAMYVVGFAETVVDLLKESDSMMVDPTNDIRIIGSITVVILLGISVAGMEWEAKAQVILLVILLIAIANFFIGTVIPSNNEKKSRGFFNYQASIFAENFGPRFTKGEGFFSVFAIFFPAATGILAGANISGDLEALRKQGASPLPQGAQSRRRRQTSLI

SEQ ID NO: 10049 - DNA, 4680 bp, Homo sapiens
gctttgaagaacatcctgaagattatatcggagacaatatatcaagaatctatttattgaatcatctagaacaaaagccaggagctccctaatggaagcacattagtgtttattttgatgaagaaatatatagattttttaaaacaaccacaaagtagatagctcagtaaaaaatcaattttggaagatgtcactgaacaactcttccaatgtatttctggattcagtgcccagtaataccaatcgctttcaagttagtgtcataaatgagaaccatgagagcagtgcagctgcagatgacaatactgacccaccacattatgaagaaacctcttttggggatgaagctcagaaaagactcagaatcagctttaggcctgggaatcaggagtgctatgacaatttcctccaaagtggagaaactgctaaaacagatgccagttttcacgcttatgattctcacacaaacacatactatctacaaacttttggccacaacaccatggatgccgttcccaagatagagtactatcgtaacaccggcagcatcagtgggcccaaggtcaaccgacccagcctgcttgagattcacgagcaactcgcaaagaatgtggcagtcaccccaagttcagctgacagagttgctaacggtgatgggatacctggagatgaacaagctgaaaataaggaagatgatcaagctggtgttgtgaagtttggatgggtgaaaggtgtgctggtaagatgcatgctgaacatctggggagtcatgctcttcattcgcctctcctggattgttggagaagctggaattggtcttggagtcatcatcattggcctaagtgtggtagtaacgacactcacaggtatttctatgtctgctatttgcacgaatggagtagtaagaggaggtggggcctactatcttatttccagaagtttagggcccgagttcggtgggtcaataggcctgatctttgcttttgctaatgcagtggctgttgctatgtatgtggtgggatttgctgagactgtagtagatcttcttaaggagagtgattcgatgatggtggatccaaccaatgacatccggattataggctccatcacagtggtgattcttctaggaatttcagtagctggaatggaatgggaggcaaaggcccaagtcattcttctggtcattcttctaattgctattgcaaacttcttcattggaactgtcattccatccaacaatgagaaaaagtccagaggtttctttaattaccaagcatcaatatttgcagaaaactttgggccacgcttcacaaagggtgaaggcttcttctctgtctttgccatttttttcccagcagctactgggattcttgctggtgccaatatctcaggagatttggaggatccccaagatgccatccccagaggaaccatgctggccattttcatcaccactgttgcctacttaggggttgcaatttgtgtaggggcctgtgtggtccgagatgccaccgggaacatgaatgacaccatcatttctgggatgaactgcaatggttcagcagcatgtgggttgggctatgacttctcaagatgtcgacatgaaccatgtcagtacgggctgatgaacaatttccaggtcatgagcatggtatcagggttcggccccctcatcactgcgggaatcttttctgcaacactctcctccgccctggcctcccttgtcagcgcacccaaagtgttccaggctctgtgcaaggacaacatctacaaagccctgcagttttttgcaaagggatatgggaaaaacaatgaacccctgagaggatatattctcacttttcttatagccatggcatttattcttattgcggaactgaacaccattgctcccatcatctccaactttttcctggcctcatatgcacttattaatttctcctgcttccatgcctcttatgccaaatctccaggatggagacctgcgtatggaatttacaacatgtgggtatctctttttggagctgttttgtgctgtgcagtcatgtttgtcatcaactggtgggcagctgtcatcacctatgtcattgaattcttcctttacgtctatgtgacttgtaagaagccagatgtgaactggggctcctccacacaggctctttcctacgtgagtgctttagacaatgctctggaattaaccacagtggaagaccacgtaaaaaacttcaggccccagtgcattgtcttaacagggggacccatgacaagacctgctctcctggacataactcacgcctttaccaagaacagtggcctttgcatctgctgtgaagtctttgtgggaccgcgcaaactgtgtgttaaggagatgaacagtggcatggcgaaaaaacaggcctggcttataaagaacaaaatcaaggctttttatgctgcagtggcggcagactgtttcagggatggtgtccgaagtcttcttcaggcctcaggcttaggaagaatgaaaccaaacactctggtgattggatataagaaaaactggaggaaagctcccttgacagagattgagaactacgtgggaatcatacatgatgcatttgattttgagattggcgtggttatagtcagaatcagccaaggatttgacatctctcaggttcttcaggtgcaagaggaattagagagattagaacaggagagactagcattggaagcgactatcaaagataatgagtgtgaagaggaaagtggaggcatccgaggcttgtttaaaaaagctggcaagttgaacattactaagacaacgcctaaaaaagatggcagcattaacacaagccagtcgatgcatgtgggagagttcaaccagaaactggtggaagccagcactcaatttaaaaagaaacaagaaaaaggcacaattgatgtttggtggttgtttgatgatggagggttaacacttcttatcccctatatcttaactctcagaaaaaaatggaaagactgtaaattaagaatctatgtgggagggaagatcaaccgcattgaagaagaaaaaattgtaatggcttcccttctgagcaaatttaggataaaatttgcagacatccatatcatcggtgacatcaacattaggccaaacaaagagagctggaaagtctttgaagagatgattgaaccatatcgtctccatgaaagctgcaaagatttaacaactgctgagaaattaaaaagagaaactccgtggaaaattacagatgcagaactggaagcagtcaaggaaaagagttaccgccaagttcgactgaatgaactcttacaggagcactccagagctgctaatctcattgtcctgagccttcccgtggcaagaaagggatccatatcggatttgttgtatatggcttggttggaaatcctcacaaagaacctcccacctgtcttactagttagaggaaatcacaaaaatgtcttgacattttactcttaaaacatgaaagattggaatacattttaacttaatgtaatgcataattaagaaacatgttccagtactttatgttgtaaatctgatctatggatatgcaaacctctggagaggatcctaccagattctacatacattgcataatttttatcagttaatgcgagcttttttttctcttctcagcttaaggggttgtcaaagccaatgttatccctagaaaaacatttttgtcactgctgttgataaacaagaaaatcaaggaaactcatgttggcttatgctcatgaaaaccaccaatgtgattgtaaacttctccagacaaacttaaccttttgtttcttaattttttgttttgagtgtttgcttctcagccctggtataggtctcagccccacagcaggatctcaataaatgcttattgacaggctggcatagtaaccacaggtggttatcaaaggaaaagaccaataggctggggaacataattatgcttggccccctcagaggcttatacctccaaagcagatttaaaaatcagtaactcaaaactttaagaagtagttgagtctacaaaatattcaaagcagttacctaaataaggttatttaatgtaacagattatatacttaaagtgatctgagcaatcattgataacatatggcttaaatttgctgctgcctgaaaagtatattaactagattagaagacaccatatactccaataaaatgaaatatattctattctcaatatataaactttaattgtactccctatcaaatattttgaaatttccatcacggcattactttgcatatttttttctaattaaatggttagtacagatgaaatctttatagatgactacttgaaaactaagtgctacaaattttcaaaccattattaagaaatatatcctgaatcatatatttagttactttctatagtgattgtatggatttaaaagaataattaaaatgtgaagttgaaaaacttgtaaaatttggaatatacagatactgatttttttcatttttgttagtatacctataatacataatcacattgacaaaccaatgaaaatattgattttctgatgaatggcttgatttttctccttgacatgttttgactgttcattctaactgaaaacatatatgggaaaatatgaacctgaaataaaagcactcaaattcaa

SEQ ID NO: 10050 - protein, 1099 aa, Homo sapiens
MSLNNSSNVFLDSVPSNTNRFQVSVINENHESSAAADDNTDPPHYEETSFGDEAQKRLRISFRPGNQECYDNFLQSGETAKTDASFHAYDSHTNTYYLQTFGHNTMDAVPKIEYYRNTGSISGPKVNRPSLLEIHEQLAKNVAVTPSSADRVANGDGIPGDEQAENKEDDQAGVVKFGWVKGVLVRCMLNIWGVMLFIRLSWIVGEAGIGLGVIIIGLSVVVTTLTGISMSAICTNGVVRGGGAYYLISRSLGPEFGGSIGLIFAFANAVAVAMYVVGFAETVVDLLKESDSMMVDPTNDIRIIGSITVVILLGISVAGMEWEAKAQVILLVILLIAIANFFIGTVIPSNNEKKSRGFFNYQASIFAENFGPRFTKGEGFFSVFAIFFPAATGILAGANISGDLEDPQDAIPRGTMLAIFITTVAYLGVAICVGACVVRDATGNMNDTIISGMNCNGSAACGLGYDFSRCRHEPCQYGLMNNFQVMSMVSGFGPLITAGIFSATLSSALASLVSAPKVFQALCKDNIYKALQFFAKGYGKNNEPLRGYILTFLIAMAFILIAELNTIAPIISNFFLASYALINFSCFHASYAKSPGWRPAYGIYNMWVSLFGAVLCCAVMFVINWWAAVITYVIEFFLYVYVTCKKPDVNWGSSTQALSYVSALDNALELTTVEDHVKNFRPQCIVLTGGPMTRPALLDITHAFTKNSGLCICCEVFVGPRKLCVKEMNSGMAKKQAWLIKNKIKAFYAAVAADCFRDGVRSLLQASGLGRMKPNTLVIGYKKNWRKAPLTEIENYVGIIHDAFDFEIGVVIVRISQGFDISQVLQVQEELERLEQERLALEATIKDNECEEESGGIRGLFKKAGKLNITKTTPKKDGSINTSQSMHVGEFNQKLVEASTQFKKKQEKGTIDVWWLFDDGGLTLLIPYILTLRKKWKDCKLRIYVGGKINRIEEEKIVMASLLSKFRIKFADIHIIGDINIRPNKESWKVFEEMIEPYRLHESCKDLTTAEKLKRETPWKITDAELEAVKEKSYRQVRLNELLQEHSRAANLIVLSLPVARKGSISDLLYMAWLEILTKNLPPVLLVRGNHKNVLTFYS

SEQ ID NO: 10051 - DNA, 8835 bp, Homo sapiens
gcagggtccaaaataagtatatgccgttccatggaaaatctgcatcttaatattgccaaggttttgctccagggtttcatgcaaaattaggtttttaagggtagttttagtaacttattgagatcatcaagaaacattactttgtttggaggtgtgagagtagccaagggcaagagtaattctttttaacgcaacttatttaacatccatacgtttgggcaataatctgaactttaatcagatcttacattactcttcacagtcaacccagtattgagtttcttgcaaaactgtagagaatgaagaatcctatcttctgctaaacagtttattatgctatcatattaaaatattaaaataaaattaatattattttaataaagatctttatattgaagtagttaaattatatattagaagagagtaaaattctacctagtaagtgttcaatggattttcctttgaatggaggtttgtgtttttcttttcgtttcttttctttttttaattctcggaagacagactttagtgagtactagaaacttattgtcaaccttactcagttttactggcctttgctatgaacctaaaacttaatgagttaagtcaccatctgggtcccatttgggttttccttattggggaagaaaagaaacaaacacatctatttgttcttgctttgggggtagattgaggaagaaatctgaatacattttcaagcccagaccctgggaatagagccagaaggaatctggagccaggagtaacagtagctacagcccttgggtaaccattctgggctacgagttttggctgtcttgttcccaaaagcaaagggctgaatgagctgctaatgctgtctagttgttcttctctatcttggagaccttgctggggcaagatggtttccaataaatttaaccatcaagcaaggaagttaggtgtgaaagccggtatgacctgaagcaagtcacttacattcggtgtttccctttcttttctaaatattaaggagcaggttaattcctacccaatgaattctttgaagataaagctaaagtacctttctgaacaggcagacacaagttgaaataggctgagggtagcttagttgtcttactgagggatgcataagaattatctgggaagttaggttaggaaactgcagaatcctgggatttacttttaaagatccaaattcagtaggtctgagcatttttaataagcaccccaggcatttcctgaagcaggtggttcaagaaccacaatttcagaaaacaatgaactgaatgttctccaagctgccttctaccctgggattttatgtttgattatgagagagaagcaaatcccttgctgttcaaaagtataaaactttgttccaagatttcaaatggtttggagaaatatatacaatgcaaaaggatgaattaagaattgttgaaaaaactagagtcaaaaggaaaataacagtgaggaaataataaggttggagtaggtttagtgttatgaaatgcaaattatatggtcctgtagagtttctggggtatgctaaacattttctatcaagcttcttcaaaacaaagtcaggagcaaaacaagtgcagaataaatcacctttagtggcacaaggacctgaagccacatagtgatacagaggcactgctcaccacagtatccctgcaatagatatgaagaatttggtccaactattttttacaaccccaagcttttaagagtctacagggtctaaagcaatatggtccaagtttgcagcctgtgcttagttagcttcttcccactccaccttaacctgcaaaaaagcctagaggctgctgttagagacagggtatggccaagagcttcaaaagaaccagcctttaataccttgactcattcccactgctgcccttaacctccttccactttcccttctccttgagcatggccagagagatcacagcctctcgtggctgactacccttctaaccatacttggaacgagagagcctgccaacaactatggagcattcactttacataggggagcttaccaaacagcccagaccagagcattctggatggagccagggtgagttcagtggctgtgactccacagccctctccctgaattctgggtcggcctccattagagagggtattgtaggagaggaaaaacagttatcttctacccatcttaggttcattggctgggggcctataaattagattgacaaaagtcagatcaataagagaaaaacagaatttattaacatgtacatggtacatacacatgggaccactcagtgatgagtgacttaaagggttgcttagaacatgggcttatatatcatcttaacaacagaacaattaaatcgtagagaggtgataagacaaaggaaaaggacttttcattcatagggtggcaaatgctgccaaggtaaatatataaggaaaggaatggaagataagagcttgtcagcaaagcttgttgtgtagatgcctgtggtgcctttgtcaggctgataagcatccaaaattgtctctggtaatcagagacatcactttctggtagagaggggagggaggacaaatttatgtcccgtttttaggtaaataggaagggatcgagagcttttcttgtatctactttttttcggttgtctcagctccaaataatccttatgccagagtgatatattctgatacccttttgtagactcctggctatgtgtttcttgaagctgaaagcagtcacggcttcgttgaattctggcctctaccactttctccctctctttataatcatcaaccttctgaaccataaaatccttggggcagctttttaaatttcattttatttgtgtcttgtgtttcttacattacctgccacatagctggatatatagtaggtttttaaaaagcagtaagtattataactactgtgaatatgatcaaaaagcaatatcattgagtgtgtactgtgttccatgtgctatgctagccattttacacatgcattctttctaatttcattgctatttttggctcagttatttatttatttgaggtgacttatcataataagcaactttccagaattcacacggtcaacaagttaatgtaatttaatttcattctttccactttacccatctgccagatgaataatttgctatactgtatgtagttctccacctctatgtgaccaaatgtacataaaaagatagtaacctggaaggatgaacatttaatctctagttatcttgacagcttggaattgtaggccaattatcatgtttataggtgtctataacttctccaaagatggaattctgtcaggtgcaatagtgcaagcctgtagtcccagctacttgggaggctgaggtaggaggatgacttgaggccaggagtttgagaccagcctggaaaaaatagcaagactgtctctaaaaataataataataataagatggggtgcacattaaattttgaccagccctagtggctttgttttgtacaacttagttctgcacattttagctcttaagtttcttggaaccagagctactacaagcagaaaacttcaaagctaagcatttactccatggtgatttcctagccaacttgttaaactcaaatgtggtcctttgatgtttaccctagacttgctggtttttatgtaaatgatccaatgaattcttccaccatttaatacctttatttttcctctttcaactgaggtcttggtgtgattatcatcggcttagccgtgacagtgactggtatcactggtttatccacctctgctattgccacaaatggatgtgtcagaggaggtaattaaacttgtgacccgcaccatcatttgtaaggtaaaggcaacacaggctctaacagttcaccactgacctttctggagtgttttcaaaggtaatgcaagttggtttcttttcccccatcaggcaaagagatgcaagaaaaatggggaaggatttaacctttgtcaaacccccaactttctcattccagttccttcaagcaagaaagaaggtcaaatgtcatgttttctcttttcacagccaggatagtttctctcccaggacaccagcataagtcaacttttcctttccaagtctgcactttcgattgtgtttacttttggaaaccatccttcatcataatgagcagttctctgacttggtctttatgccaggcaaaccagtttctccttagcacaaagaaaccccgttggagcccgaggcatggacctgaaaacttaagttaaaggcagtgtagtttgcagcaatagggaatccaaggaagaaaagtaaaatgcaatatcttctatctttcattgctaacaggtcttggagttctcataattcttctttccaccatggtaacttctattactgggttgtcaacttctgcgatagcaactaacgggtttgttcgtggaggtaaaatctctaagatatctaatgccctcatcacttgctacgggtaggcgaacaattttttatacttctttttgatgggaacaaggaagtagcccgatgttcttgaagcctggctatttggaggagctggatgccaaagaaaacctaaggtacgatgagaatagtccaggtctactctggtctcttttctaatggatctctctggcacattgtaggttatgccttacagatgtgcaccttccttaggtaaactttttctttttcaggctagtctgcacacctctagctgatgttccttggaaactgattccagatttggcttctgttttaacgtttagtacatttcaggtgcttcctagaccttcatgaaatgggatcttttagaacatttcaggttttcacagggaggtggatctttctgtgacaagattcagactgctgcctcctgaagtactggtgacttctctcagtactggaaccaaacacctttcttgggggattttgcaggtcttggagtcatcatcattggcctaagtgtggtagtaacgacactcacaggtatttctatgtctgctatttgcacgaatggagtagtaagaggaggtggggcctactatcttatttccagaagtttagggcccgagttcggtgggtcaataggcctgatctttgcttttgctaatgcagtggctgttgctatgtatgtggtgggatttgctgagactgtagtagatcttcttaaggagagtgattcgatgatggtggatccaaccaatgacatccggattataggctccatcacagtggtgattcttctaggaatttcagtagctggaatggaatgggaggcaaaggcccaagtcattcttctggtcattcttctaattgctattgcaaacttcttcattggaactgtcattccatccaacaatgagaaaaagtccagaggtttctttaattaccaagcatcaatatttgcagaaaactttgggccacgcttcacaaagggtgaaggcttcttctctgtctttgccatttttttcccagcagctactgggattcttgctggtgccaatatctcaggagatttggaggatccccaagatgccatccccagaggaaccatgctggccattttcatcaccactgttgcctacttaggggttgcaatttgtgtaggggcctgtgtggtccgagatgccaccgggaacatgaatgacaccatcatttctgggatgaactgcaatggttcagcagcatgtgggttgggctatgacttctcaagatgtcgacatgaaccatgtcagtacgggctgatgaacaatttccaggtcatgagcatggtatcagggttcggccccctcatcactgcgggaatcttttctgcaacactctcctccgccctggcctcccttgtcagcgcacccaaagtgttccaggctctgtgcaaggacaacatctacaaagccctgcagttttttgcaaagggatatgggaaaaacaatgaacccctgagaggatatattctcacttttcttatagccatggcatttattcttattgcggaactgaacaccattgctcccatcatctccaactttttcctggcctcatatgcacttattaatttctcctgcttccatgcctcttatgccaaatctccaggatggagacctgcgtatggaatttacaacatgtgggtatctctttttggagctgttttgtgctgtgcagtcatgtttgtcatcaactggtgggcagctgtcatcacctatgtcattgaattcttcctttacgtctatgtgacttgtaagaagccagatgtgaactggggctcctccacacaggctctttcctacgtgagtgctttagacaatgctctggaattaaccacagtggaagaccacgtaaaaaacttcaggccccagtgcattgtcttaacagggggacccatgacaagacctgctctcctggacataactcacgcctttaccaagaacagtggcctttgcatctgctgtgaagtctttgtgggaccgcgcaaactgtgtgttaaggagatgaacagtggcatggcgaaaaaacaggcctggcttataaagaacaaaatcaaggctttttatgctgcagtggcggcagactgtttcagggatggtgtccgaagtcttcttcaggcctcaggcttaggaagaatgaaaccaaacactctggtgattggatataagaaaaactggaggaaagctcccttgacagagattgagaactacgtgggaatcatacatgatgcatttgattttgagattggcgtggttatagtcagaatcagccaaggatttgacatctctcaggttcttcaggtgcaagaggaattagagagattagaacaggagagactagcattggaagcgactatcaaagataatgagtgtgaagaggaaagtggaggcatccgaggcttgtttaaaaaagctggcaagttgaacattactaagacaacgcctaaaaaagatggcagcattaacacaagccagtcgatgcatgtgggagagttcaaccagaaactggtggaagccagcactcaatttaaaaagaaacaagaaaaaggcacaattgatgtttggtggttgtttgatgatggagggttaacacttcttatcccctatatcttaactctcagaaaaaaatggaaagactgtaaattaagaatctatgtgggagggaagatcaaccgcattgaagaagaaaaaattgtaatggcttcccttctgagcaaatttaggataaaatttgcagacatccatatcatcggtgacatcaacattaggccaaacaaagagagctggaaagtctttgaagagatgattgaaccatatcgtctccatgaaagctgcaaagatttaacaactgctgagaaattaaaaagagaaactccgtggaaaattacagatgcagaactggaagcagtcaaggaaaagagttaccgccaagttcgactgaatgaactcttacaggagcactccagagctgctaatctcattgtcctgagccttcccgtggcaagaaagggatccatatcggatttgttgtatatggcttggttggaaatcctcacaaagaacctcccacctgtcttactagttagaggaaatcacaaaaatgtcttgacattttactcttaaaacatgaaagattggaatacattttaacttaatgtaatgcataattaagaaacatgttccagtactttatgttgtaaatctgatctatggatatgcaaacctctggagaggatcctaccagattctacatacattgcataatttttatcagttaatgcgagcttttttttctcttctcagcttaaggggttgtcaaagccaatgttatccctagaaaaacatttttgtcactgctgttgataaacaagaaaatcaaggaaactcatgttggcttatgctcatgaaaaccaccaatgtgattgtaaacttctccagacaaacttaaccttttgtttcttaattttttgttttgagtgtttgcttctcagccctggtataggtctcagccccacagcaggatctcaataaatgcttattgacaggctggcatagtaaccacaggtggttatcaaaggaaaagaccaataggctggggaacataattatgcttggccccctcagaggcttatacctccaaagcagatttaaaaatcagtaactcaaaactttaagaagtagttgagtctacaaaatattcaaagcagttacctaaataaggttatttaatgtaacagattatatacttaaagtgatctgagcaatcattgataacatatggcttaaatttgctgctgcctgaaaagtatattaactagattagaagacaccatatactccaataaaatgaaatatattctattctcaatatataaactttaattgtactccctatcaaatattttgaaatttccatcacggcattactttgcatatttttttctaattaaatggttagtacagatgaaatctttatagatgactacttgaaaactaagtgctacaaattttcaaaccattattaagaaatatatcctgaatcatatatttagttactttctatagtgattgtatggatttaaaagaataattaaaatgtgaagttgaaaaacttgtaaaatttggaatatacagatactgatttttttcatttttgttagtatacctataatacataatcacattgacaaaccaatgaaaatattgattttctgatgaatggcttgatttttctccttgacatgttttgactgttcattctaactgaaaacatatatgggaaaatatgaacctgaaataaaagcactcaaattcaa

SEQ ID NO: 10052 - protein, 870 aa, Homo sapiens
MSAICTNGVVRGGGAYYLISRSLGPEFGGSIGLIFAFANAVAVAMYVVGFAETVVDLLKESDSMMVDPTNDIRIIGSITVVILLGISVAGMEWEAKAQVILLVILLIAIANFFIGTVIPSNNEKKSRGFFNYQASIFAENFGPRFTKGEGFFSVFAIFFPAATGILAGANISGDLEDPQDAIPRGTMLAIFITTVAYLGVAICVGACVVRDATGNMNDTIISGMNCNGSAACGLGYDFSRCRHEPCQYGLMNNFQVMSMVSGFGPLITAGIFSATLSSALASLVSAPKVFQALCKDNIYKALQFFAKGYGKNNEPLRGYILTFLIAMAFILIAELNTIAPIISNFFLASYALINFSCFHASYAKSPGWRPAYGIYNMWVSLFGAVLCCAVMFVINWWAAVITYVIEFFLYVYVTCKKPDVNWGSSTQALSYVSALDNALELTTVEDHVKNFRPQCIVLTGGPMTRPALLDITHAFTKNSGLCICCEVFVGPRKLCVKEMNSGMAKKQAWLIKNKIKAFYAAVAADCFRDGVRSLLQASGLGRMKPNTLVIGYKKNWRKAPLTEIENYVGIIHDAFDFEIGVVIVRISQGFDISQVLQVQEELERLEQERLALEATIKDNECEEESGGIRGLFKKAGKLNITKTTPKKDGSINTSQSMHVGEFNQKLVEASTQFKKKQEKGTIDVWWLFDDGGLTLLIPYILTLRKKWKDCKLRIYVGGKINRIEEEKIVMASLLSKFRIKFADIHIIGDINIRPNKESWKVFEEMIEPYRLHESCKDLTTAEKLKRETPWKITDAELEAVKEKSYRQVRLNELLQEHSRAANLIVLSLPVARKGSISDLLYMAWLEILTKNLPPVLLVRGNHKNVLTFYS

SEQ ID NO: 10053 - DNA, 8632 bp, Homo sapiens
cctataaattagattgacaaaagtcagatcaataagagaaaaacagaatttattaacatgtacatggtacatacacatgggaccactcagtgatgagtgacttaaagggttgcttagaacatgggcttatatatcatcttaacaacagaacaattaaatcgtagagaggtgataagacaaaggaaaaggacttttcattcatagggtggcaaatgctgccaaggtaaatatataaggaaaggaatggaagataagagcttgtcagcaaagcttgttgtgtagatgcctgtggtgcctttgtcaggctgataagcatccaaaattgtctctggtaatcagagacatcactttctggtagagaggggagggaggacaaatttatgtcccgtttttaggtaaataggaagggatcgagagcttttcttgtatctactttttttcggttgtctcagctccaaataatccttatgccagagtgatatattctgatacccttttgtagactcctggctatgtgtttcttgaagctgaaagcagtcacggcttcgttgaattctggcctctaccactttctccctctctttataatcatcaaccttctgaaccataaaatccttggggcagctttttaaatttcattttatttgtgtcttgtgtttcttacattacctgccacatagctggatatatagtaggtttttaaaaagcagtaagtattataactactgtgaatatgatcaaaaagcaatatcattgagtgtgtactgtgttccatgtgctatgctagccattttacacatgcattctttctaatttcattgctatttttggctcagttatttatttatttgaggtgacttatcataataagcaactttccagaattcacacggtcaacaagttaatgtaatttaatttcattctttccactttacccatctgccagatgaataatttgctatactgtatgtagttctccacctctatgtgaccaaatgtacataaaaagatagtaacctggaaggatgaacatttaatctctagttatcttgacagcttggaattgtaggccaattatcatgtttataggtgtctataacttctccaaagatggaattctgtcaggtgcaatagtgcaagcctgtagtcccagctacttgggaggctgaggtaggaggatgacttgaggccaggagtttgagaccagcctggaaaaaatagcaagactgtctctaaaaataataataataataagatggggtgcacattaaattttgaccagccctagtggctttgttttgtacaacttagttctgcacattttagctcttaagtttcttggaaccagagctactacaagcagaaaacttcaaagctaagcatttactccatggtgatttcctagccaacttgttaaactcaaatgtggtcctttgatgtttaccctagacttgctggtttttatgtaaatgatccaatgaattcttccaccatttaatacctttatttttcctctttcaactgaggtcttggtgtgattatcatcggcttagccgtgacagtgactggtatcactggtttatccacctctgctattgccacaaatggatgtgtcagaggaggtaattaaacttgtgacccgcaccatcatttgtaaggtaaaggcaacacaggctctaacagttcaccactgacctttctggagtgttttcaaaggtaatgcaagttggtttcttttcccccatcaggcaaagagatgcaagaaaaatggggaaggatttaacctttgtcaaacccccaactttctcattccagttccttcaagcaagaaagaaggtcaaatgtcatgttttctcttttcacagccaggatagtttctctcccaggacaccagcataagtcaacttttcctttccaagtctgcactttcgattgtgtttacttttggaaaccatccttcatcataatgagcagttctctgacttggtctttatgccaggcaaaccagtttctccttagcacaaagaaaccccgttggagcccgaggcatggacctgaaaacttaagttaaaggcagtgtagtttgcagcaatagggaatccaaggaagaaaagtaaaatgcaatatcttctatctttcattgctaacaggtcttggagttctcataattcttctttccaccatggtaacttctattactgggttgtcaacttctgcgatagcaactaacgggtttgttcgtggaggtaaaatctctaagatatctaatgccctcatcacttgctacgggtaggcgaacaattttttatacttctttttgatgggaacaaggaagtagcccgatgttcttgaagcctggctatttggaggagctggatgccaaagaaaacctaaggtacgatgagaatagtccaggtctactctggtctcttttctaatggatctctctggcacattgtaggttatgccttacagatgtgcaccttccttaggtaaactttttctttttcaggctagtctgcacacctctagctgatgttccttggaaactgattccagatttggcttctgttttaacgtttagtacatttcaggtgcttcctagaccttcatgaaatgggatcttttagaacatttcaggttttcacagggaggtggatctttctgtgacaagattcagactgctgcctcctgaagtactggtgacttctctcagtactggaaccaaacacctttcttgggggattttgcaggtcttggagtcatcatcattggcctaagtgtggtagtaacgacactcacaggtatttctatgtctgctatttgcacgaatggagtagtaagaggaggtaagccaattaatttacttatgactagaggcttggttactagtaatgtctggagttaatttactattggaagtgaaagtaacatattgctaattagtccccagtgtcctaaacaaaataacccaaaatttaaacagcaaagcaaaatttttctcaactaaaattggaatatcttcattgacatgacccatttcttgtaacaaaacatgtttataaagtggagagtgactatgtgtctagtaagaaggtatggaatattatagcaaaatatatggtttctttgtaccttggatgagacccactggctctctcgcaggtcctctcagcatgggtcttctccaatgccccagatggcattgctgatgattgccactcagtaaaccactcctgcacccaggcctcggggctcaccccaaacgctgtgctcccaatgaccaacaggcaagggaagatcattagaagggaataaacaaataaataagcaaagagttactttcaaataatctaggagtaggcaggcctaggcagaaagtgaaatggatgaaatgtattgttgttctgtcttcctttgttccccctccccttcccctttggtttctctggttctctacttcggcaccttatccaggtcttcctactcagggccttctaaaacatcctgcccacaacacacttccactctcaacttctgcctgtctctcatgttgatccagcccacctaggtaactgactagctcatttgtttaaggtgatctgtataaaggaaataatggggatttgctccacccagacaatatgctacatttttagacaggactttgacccctgagcccaaaagagttactatagtgaaagaaatttctctcagcaaaaagtaattttgttttgtctttaggtatgttggtttgtcattgctgtgccaactctgcctacctccaaagccagctctgtataggaagtcataatcttactatggtctgtgataatcagacctcctaacatctagtgcttttcaccttcaataagctgccctaggtacccttttggcatttgaccaatctagttcaatccttcatatgcacagaagtatgcaactatatataattaatagaactattttttcaatgtccaagggagaagtaattgttccagaccctccccacttttcttcccacttgcaactcccaaacactgtgctctcagtggccaacaggcaagggacctacttgtcacacccatacatatatgggtatttaggaataatcgtgccttcttgagctaaaaacatagaaaaccaagtttgatttatcgaatgaataatacatcatactctatagatatcttgttttatgcagcacatatatatcagaaaattttacgtatgtacctatatatgttttgtatatatatgtttatatatatatatcatgccttctttcactaaaaacatagaaaagcaagtttgatttaaagaatggataatacagatatcttattttatgcagcacatatatattaggaaattgtatatatgtacatatatctatatatgtgtaaatatatattttacatatatacacaacagaaaggaagttagaaaaacaaagataaacttcaactacttcattttctacctagactttcctactcctggaaattttttatataaaattttacttcagttgcattattaatttgaatactccaatgatatttttataaagacaacgcattttttgtaaattttgctgtgttcttttttgtagcttttttacatttatgttttaatagagtgggctttattaagtcaggatacttctattgtagattaagtacagagtaccaagaagggctaagttattcactgggtaacacaggattcctaaaattactgggaagttgtaatactgttattgaaataattcacactgtaaatgttctcagatagtcacaatcgtttggttatataaactagcagttcctcaatgtgaagtatgttcatttcttgtttcaggtggggcctactatcttatttccagaagtttagggcccgagttcggtgggtcaataggcctgatctttgcttttgctaatgcagtggctgttgctatgtatgtggtgggatttgctgagactgtagtagatcttcttaaggagagtgattcgatgatggtggatccaaccaatgacatccggattataggctccatcacagtggtgattcttctaggaatttcagtagctggaatggaatgggaggcaaaggcccaagtcattcttctggtcattcttctaattgctattgcaaacttcttcattggaactgtcattccatccaacaatgagaaaaagtccagaggtttctttaattaccaagcatcaatatttgcagaaaactttgggccacgcttcacaaagggtgaaggcttcttctctgtctttgccatttttttcccagcagctactgggattcttgctggtgccaatatctcaggagatttggaggatccccaagatgccatccccagaggaaccatgctggccattttcatcaccactgttgcctacttaggggttgcaatttgtgtaggggcctgtgtggtccgagatgccaccgggaacatgaatgacaccatcatttctgggatgaactgcaatggttcagcagcatgtgggttgggctatgacttctcaagatgtcgacatgaaccatgtcagtacgggctgatgaacaatttccaggtcatgagcatggtatcagggttcggccccctcatcactgcgggaatcttttctgcaacactctcctccgccctggcctcccttgtcagcgcacccaaagtgttccaggctctgtgcaaggacaacatctacaaagccctgcagttttttgcaaagggatatgggaaaaacaatgaacccctgagaggatatattctcacttttcttatagccatggcatttattcttattgcggaactgaacaccattgctcccatcatctccaactttttcctggcctcatatgcacttattaatttctcctgcttccatgcctcttatgccaaatctccaggatggagacctgcgtatggaatttacaacatgtgggtatctctttttggagctgttttgtgctgtgcagtcatgtttgtcatcaactggtgggcagctgtcatcacctatgtcattgaattcttcctttacgtctatgtgacttgtaagaagccagatgtgaactggggctcctccacacaggctctttcctacgtgagtgctttagacaatgctctggaattaaccacagtggaagaccacgtaaaaaacttcaggccccagtgcattgtcttaacagggggacccatgacaagacctgctctcctggacataactcacgcctttaccaagaacagtggcctttgcatctgctgtgaagtctttgtgggaccgcgcaaactgtgtgttaaggagatgaacagtggcatggcgaaaaaacaggcctggcttataaagaacaaaatcaaggctttttatgctgcagtggcggcagactgtttcagggatggtgtccgaagtcttcttcaggcctcaggcttaggaagaatgaaaccaaacactctggtgattggatataagaaaaactggaggaaagctcccttgacagagattgagaactacgtgggaatcatacatgatgcatttgattttgagattggcgtggttatagtcagaatcagccaaggatttgacatctctcaggttcttcaggtgcaagaggaattagagagattagaacaggagagactagcattggaagcgactatcaaagataatgagtgtgaagaggaaagtggaggcatccgaggcttgtttaaaaaagctggcaagttgaacattactaagacaacgcctaaaaaagatggcagcattaacacaagccagtcgatgcatgtgggagagttcaaccagaaactggtggaagccagcactcaatttaaaaagaaacaagaaaaaggcacaattgatgtttggtggttgtttgatgatggagggttaacacttcttatcccctatatcttaactctcagaaaaaaatggaaagactgtaaattaagaatctatgtgggagggaagatcaaccgcattgaagaagaaaaaattgtaatggcttcccttctgagcaaatttaggataaaatttgcagacatccatatcatcggtgacatcaacattaggccaaacaaagagagctggaaagtctttgaagagatgattgaaccatatcgtctccatgaaagctgcaaagatttaacaactgctgagaaattaaaaagagaaactccgtggaaaattacagatgcagaactggaagcagtcaaggaaaagagttaccgccaagttcgactgaatgaactcttacaggagcactccagagctgctaatctcattgtcctgagccttcccgtggcaagaaagggatccatatcggatttgttgtatatggcttggttggaaatcctcacaaagaacctcccacctgtcttactagttagaggaaatcacaaaaatgtcttgacattttactcttaaaacatgaaagattggaatacattttaacttaatgtaatgcataattaagaaacatgttccagtactttatgttgtaaatctgatctatggatatgcaaacctctggagaggatcctaccagattctacatacattgcataatttttatcagttaatgcgagcttttttttctcttctcagcttaaggggttgtcaaagccaatgttatccctagaaaaacatttttgtcactgctgttgataaacaagaaaatcaaggaaactcatgttggcttatgctcatgaaaaccaccaatgtgattgtaaacttctccagacaaacttaaccttttgtttcttaattttttgttttgagtgtttgcttctcagccctggtataggtctcagccccacagcaggatctcaataaatgcttattgacaggctggcatagtaaccacaggtggttatcaaaggaaaagaccaataggctggggaacataattatgcttggccccctcagaggcttatacctccaaagcagatttaaaaatcagtaactcaaaactttaagaagtagttgagtctacaaaatattcaaagcagttacctaaataaggttatttaatgtaacagattatatacttaaagtgatctgagcaatcattgataacatatggcttaaatttgctgctgcctgaaaagtatattaactagattagaagacaccatatactccaataaaatgaaatatattctattctcaatatataaactttaattgtactccctatcaaatattttgaaatttccatcacggcattactttgcatatttttttctaattaaatggttagtacagatgaaatctttatagatgactacttgaaaactaagtgctacaaattttcaaaccattattaagaaatatatcctgaatcatatatttagttactttctatagtgattgtatggatttaaaagaataattaaaatgtgaagttgaaaaacttgtaaaatttggaatatacagatactgatttttttcatttttgttagtatacctataatacataatcacattgacaaaccaatgaaaatattgattttctgatgaatggcttgatttttctccttgacatgttttgactgttcattctaactgaaaacatatatgggaaaatatgaacctgaaataaaagcactcaaattcaa

SEQ ID NO: 10054 - protein, 826 aa, Homo sapiens
MYVVGFAETVVDLLKESDSMMVDPTNDIRIIGSITVVILLGISVAGMEWEAKAQVILLVILLIAIANFFIGTVIPSNNEKKSRGFFNYQASIFAENFGPRFTKGEGFFSVFAIFFPAATGILAGANISGDLEDPQDAIPRGTMLAIFITTVAYLGVAICVGACVVRDATGNMNDTIISGMNCNGSAACGLGYDFSRCRHEPCQYGLMNNFQVMSMVSGFGPLITAGIFSATLSSALASLVSAPKVFQALCKDNIYKALQFFAKGYGKNNEPLRGYILTFLIAMAFILIAELNTIAPIISNFFLASYALINFSCFHASYAKSPGWRPAYGIYNMWVSLFGAVLCCAVMFVINWWAAVITYVIEFFLYVYVTCKKPDVNWGSSTQALSYVSALDNALELTTVEDHVKNFRPQCIVLTGGPMTRPALLDITHAFTKNSGLCICCEVFVGPRKLCVKEMNSGMAKKQAWLIKNKIKAFYAAVAADCFRDGVRSLLQASGLGRMKPNTLVIGYKKNWRKAPLTEIENYVGIIHDAFDFEIGVVIVRISQGFDISQVLQVQEELERLEQERLALEATIKDNECEEESGGIRGLFKKAGKLNITKTTPKKDGSINTSQSMHVGEFNQKLVEASTQFKKKQEKGTIDVWWLFDDGGLTLLIPYILTLRKKWKDCKLRIYVGGKINRIEEEKIVMASLLSKFRIKFADIHIIGDINIRPNKESWKVFEEMIEPYRLHESCKDLTTAEKLKRETPWKITDAELEAVKEKSYRQVRLNELLQEHSRAANLIVLSLPVARKGSISDLLYMAWLEILTKNLPPVLLVRGNHKNVLTFYS

SEQ ID NO: 10055 - DNA, 536 bp, Homo sapiens
ggtcttggtgtgattatcatcggcttagccgtgacagtgactggtatcactggtttatccacctctgctattgccacaaatggatgtgtcagaggaggtggggcctactatcttatttccagaagtttagggcccgagttcggtgggtcaataggcctgatctttgcttttgctaatgcagtggctgttgctatgtatgtggtgggatttgctgagactgtagtagatcttcttaaggagagtgattcgatgatggtggatccaaccaatgacatccggattataggctccatcacagtggtgattcttctaggaatttcagtagctggaatggaatgggaggcaaaggcccaagtcattcttctggtcattcttctaattgctattgcaaacttcttcattggaactgtcattccatccaacaatgagaaaaagtccagaggtttctttaattaccaagcatcaatatttgcagaaaactttgggccacgcttcacaaagggtgaaggcttcttctctgtctttgccattttttt

SEQ ID NO: 10056 - protein, 113 aa, Homo sapiens
MYVVGFAETVVDLLKESDSMMVDPTNDIRIIGSITVVILLGISVAGMEWEAKAQVILLVILLIAIANFFIGTVIPSNNEKKSRGFFNYQASIFAENFGPRFTKGEGFFSVFAI

SEQ ID NO: 10057 - DNA, 577 bp, Homo sapiens
aggcccaagtcattcttctggtcattcttctaattgctattgcaaacttcttcattggaactgtcattccatccaacaatgagaaaaagtccagaggtttctttaattaccaagcatcaatatttgcagaaaactttgggccacgcttcacaaagggtgaaggcttcttctctgtctttgccatttttttcccagcagctactgggattcttgctggtgccaatatctcaggagatttggaggtacgttgtttgctctgctttgcagtcctgggagtggtggtacacttggtgggtagcacaaggagctagagaggttagatgtgaccatattaccctacagattcaaactgtaggtttctgcaagatttcctgatgatttaaaagttctctcttttaatgccaaatttggatttatattccagataattcttccaaaagtcttattcagtgatatcagaagaacagggtagtgtgatagtgtgtcatatttccccaaaataaatgtagttcagtgaaaaaaataccagaaccaccctttctcttttaaacccaaatgaataggaatattttcctgt

SEQ ID NO: 10058 - protein, 98 aa, Homo sapiens
MRKSPEVSLITKHQYLQKTLGHASQRVKASSLSLPFFSQQLLGFLLVPISQEIWRYVVCSALQSWEWWYTWWVAQGAREVRCDHITLQIQTVGFCKIS

SEQ ID NO: 10059 - DNA, 578 bp, Homo sapiens
gccccggcgccgggcttccccccgccttaggaagctcgcccttccagccagcggccccgactgtactggctccgcggcagccttggctcaggcggccagcgctggacagcggccggggaatcccgtgctgcgcggcgcggccgaggggcgggcctggcccggagagtaccgcggcttcggccctctgccgtgcgcctcgcgcgttttgcatcgctgagcgaagcagagacgcccccccttttcggtctccttaactggttcgtcttcgtagttggaattcctttgcatgaggctatggaatatacactaccttctctggacgttaactattagctacagcttgaggactcccaaatttatgcctttagcaacacgatccgagccctgcaacttttcgacctcattttgagccaacattattttgctcccttattttgttgaagtactttctccagttatttacttaaaatgttcacatgagagacatactatttgattccttgcttgtactaagatgtaatgattgtaacgacttcattttcctagacccagataaaagtctcgcttcattcatgaaa

SEQ ID NO: 10060 - protein, 40 aa, Homo sapiens
MRLWNIHYLLWTLTISYSLRTPKFMPLATRSEPCNFSTSF

SEQ ID NO: 10061 - DNA, 595 bp, Homo sapiens
tgcggttccggcgcttagggcgccgctaaactcagagcccgggagtcatggctgcgggcggtgccgccccagagacacccgccatttcacccagtaagcgggcccggcctgcggaggtgggcggcatgcagctccgctttgcccggctctccgagcacgccacggcccccacccggggctccgcgcgcgccgcgggctacgacctgtacagtgcctatgattacacaataccacctatggagaaagctgttgtgaaaacggacattcagatagcgctcccttctgggtgttatggaagagtggctccacggtcaggcttggctgcaaaacactttattgatgtaggagctggtgtcatagatgaagattatagaggaaatgttggtgttgtactgtttaattttggcaaagaaaagtttgaagtcaaaaaaggtgatcgaattgcacagctcatttgcgaacggattttttatccagaaatagaagaagttcaagccttggatgacaccgaaaggggttcaggaggttttggttccactggaaagaattaaaatttatgccaagaacagaaaacaagaagtcatacctttttctt

SEQ ID NO: 10062 - protein, 167 aa, Homo sapiens
MAAGGAAPETPAISPSKRARPAEVGGMQLRFARLSEHATAPTRGSARAAGYDLYSAYDYTIPPMEKAVVKTDIQIALPSGCYGRVAPRSGLAAKHFIDVGAGVIDEDYRGNVGVVLFNFGKEKFEVKKGDRIAQLICERIFYPEIEEVQALDDTERGSGGFGSTGKN

SEQ ID NO: 10063 - DNA, 894 bp, Homo sapiens
tgcggttccggcgcttagggcgccgctaaactcagagcccgggagtcatggctgcgggcggtgccgccccagagacacccgccatttcacccagtaagcgggcccggcctgcggaggtgggcggcatgcagctccgctttgcccggctctccgagcacgccacggcccccacccggggctccgcgcgcgccgcgggctacgacctgtacagtgcctatgattacacaataccacctatggagaaagctgttgtgaaaacggacattcagatagcgctcccttctgggtgttatggaagagtggctccacggtcaggcttggctgcaaaacactttattgatgtaggagctggtgtcatagatgaagattatagaggaaatgttggtgttgtactgtttaattttggcaaagaaaagtttgaagtcaaaaaaggtgatcgaattgcacagctcatttgcgaacggattttttatccagaaatagaagaagttcaagccttggatgacaccgaaaggggttcaggaggttttggttccactggaaagaattaaaatttatgccaagaacagaaaacaagaagtcatacctttttcttaaaaaaaaaaaaaaagtttttgcttcaagtgttttggtgttttgcacttctgtaaacttactagctttaccttctaaaagtactgcattttttacttttttttatgatcaaggaaaagatcattaaaaaaaaacacaaagaagtttttctttgtgtttggatcaaaaagaaactttgtttttccgcaattgaaggttgtatgtaaatctgctttgtggtgacctgatgtaaacagtgtcttcttaaaatcaaatgtaaatcaattacagattaaaaaaaaaagcctgtatttaactcat

SEQ ID NO: 10064 - protein, 167 aa, Homo sapiens; identical to SEQ ID NO: 10062

SEQ ID NO: 10065 - DNA, 1038 bp, Homo sapiens
tgcggttccggcgcttagggcgccgctaaactcagagcccgggagtcatggctgcgggcggtgccgccccagagacacccgccatttcacccagtaagcgggcccggcctgcggaggtgggcggcatgcagctccgctttgcccggctctccgagcacgccacggcccccacccggggctccgcgcgcgccgcgggctacgacctgtacagtgcctatgattacacaataccacctatggagaaagctgttgtgaaaacggacattcagatagcgctcccttctgggtgttatggaagagtggctccacggtcaggcttggctgcaaaacactttattgatgtaggagctggtgtcatagatgaagattatagaggaaatgttggtgttgtactgtttaattttggcaaagaaaagtttgaagtcaaaaaaggtgatcgaattgcacagctcatttgcgaacggattttttatccagaaatagaagaagttcaagccttggatgacaccgaaaggggttcaggaggttttggttccactggaaagaattaaaatttatgccaagaacagaaaacaagaagtcatacctttttcttaaaaaaaaaaaaaaagtttttgcttcaagtgttttggtgttttgcacttctgtaaacttactagctttaccttctaaaagtactgcattttttacttttttttatgatcaaggaaaagatcattaaaaaaaaacacaaagaagtttttctttgtgtttggatcaaaaagaaactttgtttttccgcaattgaaggttgtatgtaaatctgctttgtggtgacctgatgtaaacagtgtcttcttaaaatcaaatgtaaatcaattacagattaaaaaaaaaagcctgtatttaactcatatgatctcccttcagcaacttattttgctttaattgctttaaatcttaagcaatattttttattcagtaaacaaattctttcacaaggtacaaaatcttgcataagctgaactaaaataaaaatgaaaaggagagattaaaggt

SEQ ID NO: 10066 - protein, 167 aa, Homo sapiens; identical to SEQ ID NO: 10062

SEQ ID NO: 10067 - DNA, 1852 bp, Homo sapiens
tgcggttccggcgcttagggcgccgctaaactcagagcccgggagtcatggctgcgggcggtgccgccccagagacacccgccatttcacccagtaagcgggcccggcctgcggaggtgggcggcatgcagctccgctttgcccggctctccgagcacgccacggcccccacccggggctccgcgcgcgccgcgggctacgacctgtacagtgcctatgattacacaataccacctatggagaaagctgttgtgaaaacggacattcagatagcgctcccttctgggtgttatggaagagtggctccacggtcaggcttggctgcaaaacactttattgatgtaggagctggtgtcatagatgaagattatagaggaaatgttggtgttgtactgtttaattttggcaaagaaaagtttgaagtcaaaaaaggtgatcgaattgcacagctcatttgcgaacggattttttatccagaaatagaagaagttcaagccttggatgacaccgaaaggggttcaggaggttttggttccactggaaagaattaaaatttatgccaagaacagaaaacaagaagtcatacctttttcttaaaaaaaaaaaaaaagtttttgcttcaagtgttttggtgttttgcacttctgtaaacttactagctttaccttctaaaagtactgcattttttacttttttttatgatcaaggaaaagatcattaaaaaaaaacacaaagaagtttttctttgtgtttggatcaaaaagaaactttgtttttccgcaattgaaggttgtatgtaaatctgctttgtggtgacctgatgtaaacagtgtcttcttaaaatcaaatgtaaatcaattacagattaaaaaaaaaagcctgtatttaactcatatgatctcccttcagcaacttattttgctttaattgctttaaatcttaagcaatattttttattcagtaaacaaattctttcacaaggtacaaaatcttgcataagctgaactaaaataaaaatgaaaaggagagattaaaggtattccttgttcttcccttctcttcactagtctaaaaacttctttttaatcttaagattctttgtgatgagggtgagaaaaagaatcctcagtttatttttccactattaatctttcttttgataaatcctctattgactgggtagaggtatgtttgtgaaagacatgtaacttggggatttgttactttaggtttgttcccttgaatttcatctcatcaggcaaattgtactagttgtagttacgagttttccctcagtgaagtagcaataggctgtaatcaagaaaatatgccatttatagagataagataaatgaaataatacttcagccaccaggtttttctgtctcacatacataagcagcatttcattgcagatatgggactgattctgtggcttaccttgattaacatcttttggaagttttgctagtgtgctttcctttctttactatgtttctcagattcctttgtatcagggttttgggtgtcacttaggttttgtccatcagattctgtgagacaccaggcatcgttttgaggatgtgggttatacacatggagtgcttctggaactatcagcccacttgaccacccagtttgtggaagcacaggcaagagtgttcttttctggtgattctccaggccatttaataccctgcaatgtaattgtccctctgtggctcacatttcattagtgagccatgaaatcaactcagtgggacatagccagcatttttgcataccaggttgggctataaaatatttctgttgtcaataaattttaaatgttttcctgctaaactaaccagaa

SEQ ID NO: 10068 - protein, 167 aa, Homo sapiens; identical to SEQ ID NO: 10062

SEQ ID NO: 10069 - DNA, 893 bp, Homo sapiens
gcgactgcttccgaggtcatgttcccaggacgggcgcgtcttcagggtggaagcctggcgcacgtccggagagacacccgccatttcacccagtaagcgggcccggcctgcggaggtgggcggcatgcagctccgctttgcccggctctccgagcacgccacggcccccacccggggctccgcgcgcgccgcgggctacgacctgtacagtgcctatgattacacaataccacctatggagaaagctgttgtgaaaacggacattcagatagcgctcccttctgggtgttatggaagagtggctccacggtcaggcttggctgcaaaacactttattgatgtaggagctggtgtcatagatgaagattatagaggaaatgttggtgttgtactgtttaattttggcaaagaaaagtttgaagtcaaaaaaggtgatcgaattgcacagctcatttgcgaacggattttttatccagaaatagaagaagttcaagccttggatgacaccgaaaggggttcaggaggttttggttccactggaaagaattaaaatttatgccaagaacagaaaacaagaagtcatacctttttcttaaaaaaaaaaaaaaagtttttgcttcaagtgttttggtgttttgcacttctgtaaacttactagctttaccttctaaaagtactgcattttttacttttttttatgatcaaggaaaagatcattaaaaaaaaacacaaagaagtttttctttgtgtttggatcaaaaagaaactttgtttttccgcaattgaaggttgtatgtaaatctgctttgtggtgacctgatgtaaacagtgtcttcttaaaatcaaatgtaaatcaattacagattaaaaaaaaaagcctgtatttaactcat

SEQ ID NO: 10070 - protein, 141 aa, Homo sapiens; identical to SEQ ID NO: 1609

SEQ ID NO: 10071 - DNA, 1037 bp, Homo sapiens
gcgactgcttccgaggtcatgttcccaggacgggcgcgtcttcagggtggaagcctggcgcacgtccggagagacacccgccatttcacccagtaagcgggcccggcctgcggaggtgggcggcatgcagctccgctttgcccggctctccgagcacgccacggcccccacccggggctccgcgcgcgccgcgggctacgacctgtacagtgcctatgattacacaataccacctatggagaaagctgttgtgaaaacggacattcagatagcgctcccttctgggtgttatggaagagtggctccacggtcaggcttggctgcaaaacactttattgatgtaggagctggtgtcatagatgaagattatagaggaaatgttggtgttgtactgtttaattttggcaaagaaaagtttgaagtcaaaaaaggtgatcgaattgcacagctcatttgcgaacggattttttatccagaaatagaagaagttcaagccttggatgacaccgaaaggggttcaggaggttttggttccactggaaagaattaaaatttatgccaagaacagaaaacaagaagtcatacctttttcttaaaaaaaaaaaaaaagtttttgcttcaagtgttttggtgttttgcacttctgtaaacttactagctttaccttctaaaagtactgcattttttacttttttttatgatcaaggaaaagatcattaaaaaaaaacacaaagaagtttttctttgtgtttggatcaaaaagaaactttgtttttccgcaattgaaggttgtatgtaaatctgctttgtggtgacctgatgtaaacagtgtcttcttaaaatcaaatgtaaatcaattacagattaaaaaaaaaagcctgtatttaactcatatgatctcccttcagcaacttattttgctttaattgctttaaatcttaagcaatattttttattcagtaaacaaattctttcacaaggtacaaaatcttgcataagctgaactaaaataaaaatgaaaaggagagattaaaggt

SEQ ID NO: 10072 - protein, 141 aa, Homo sapiens; identical to SEQ ID NO: 1609

SEQ ID NO: 10073 - DNA, 1851 bp, Homo sapiens
gcgactgcttccgaggtcatgttcccaggacgggcgcgtcttcagggtggaagcctggcgcacgtccggagagacacccgccatttcacccagtaagcgggcccggcctgcggaggtgggcggcatgcagctccgctttgcccggctctccgagcacgccacggcccccacccggggctccgcgcgcgccgcgggctacgacctgtacagtgcctatgattacacaataccacctatggagaaagctgttgtgaaaacggacattcagatagcgctcccttctgggtgttatggaagagtggctccacggtcaggcttggctgcaaaacactttattgatgtaggagctggtgtcatagatgaagattatagaggaaatgttggtgttgtactgtttaattttggcaaagaaaagtttgaagtcaaaaaaggtgatcgaattgcacagctcatttgcgaacggattttttatccagaaatagaagaagttcaagccttggatgacaccgaaaggggttcaggaggttttggttccactggaaagaattaaaatttatgccaagaacagaaaacaagaagtcatacctttttcttaaaaaaaaaaaaaaagtttttgcttcaagtgttttggtgttttgcacttctgtaaacttactagctttaccttctaaaagtactgcattttttacttttttttatgatcaaggaaaagatcattaaaaaaaaacacaaagaagtttttctttgtgtttggatcaaaaagaaactttgtttttccgcaattgaaggttgtatgtaaatctgctttgtggtgacctgatgtaaacagtgtcttcttaaaatcaaatgtaaatcaattacagattaaaaaaaaaagcctgtatttaactcatatgatctcccttcagcaacttattttgctttaattgctttaaatcttaagcaatattttttattcagtaaacaaattctttcacaaggtacaaaatcttgcataagctgaactaaaataaaaatgaaaaggagagattaaaggtattccttgttcttcccttctcttcactagtctaaaaacttctttttaatcttaagattctttgtgatgagggtgagaaaaagaatcctcagtttatttttccactattaatctttcttttgataaatcctctattgactgggtagaggtatgtttgtgaaagacatgtaacttggggatttgttactttaggtttgttcccttgaatttcatctcatcaggcaaattgtactagttgtagttacgagttttccctcagtgaagtagcaataggctgtaatcaagaaaatatgccatttatagagataagataaatgaaataatacttcagccaccaggtttttctgtctcacatacataagcagcatttcattgcagatatgggactgattctgtggcttaccttgattaacatcttttggaagttttgctagtgtgctttcctttctttactatgtttctcagattcctttgtatcagggttttgggtgtcacttaggttttgtccatcagattctgtgagacaccaggcatcgttttgaggatgtgggttatacacatggagtgcttctggaactatcagcccacttgaccacccagtttgtggaagcacaggcaagagtgttcttttctggtgattctccaggccatttaataccctgcaatgtaattgtccctctgtggctcacatttcattagtgagccatgaaatcaactcagtgggacatagccagcatttttgcataccaggttgggctataaaatatttctgttgtcaataaattttaaatgttttcctgctaaactaaccagaa

SEQ ID NO: 10074 - protein, 141 aa, Homo sapiens; identical to SEQ ID NO: 1609

SEQ ID NO: 10075 - DNA, 896 bp, Homo sapiens
ggtcatgttcccaggacgggcgcgtcttcagggtggaagcctggcgcacgtccggaggtgccgaggacccaaccagcccaaactctgggggaaatgactcccctctgccctcgccccgcgctctgctaccatttccttacgtctctgcttcgctcagcgatgcaaaacgcgcgaggcgcacggcagagggccgaagccgcggtactctccgggccaggcccgcccctcggccgcgccgcgcagcacgggattccccggccgctgtccagcgctggccgcctgagccaaggctgccgcggagccagtacagtcggggccgctggctggaagggcgagcttcctaaggcggggggaagcccggcgccggggccggagacacccgccatttcacccagtaagcgggcccggcctgcggaggtgggcggcatgcagctccgctttgcccggctctccgagcacgccacggcccccacccggggctccgcgcgcgccgcgggctacgacctgtacagtgcctatgattacacaataccacctatggagaaagctgttgtgaaaacggacattcagatagcgctcccttctgggtgttatggaagagtggctccacggtcaggcttggctgcaaaacactttattgatgtaggagctggtgtcatagatgaagattatagaggaaatgttggtgttgtactgtttaattttggcaaagaaaagtttgaagtcaaaaaaggtgatcgaattgcacagctcatttgcgaacggattttttatccagaaatagaagaagttcaagccttggatgacaccgaaaggggttcaggaggttttggttccactggaaagaattaaaatttatgccaagaacagaaaacaagaagtcatacctttttctt

SEQ ID NO: 10076 - protein, 252 aa, Homo sapiens; identical to SEQ ID NO: 1607

SEQ ID NO: 10077 - DNA, 1195 bp, Homo sapiens
ggtcatgttcccaggacgggcgcgtcttcagggtggaagcctggcgcacgtccggaggtgccgaggacccaaccagcccaaactctgggggaaatgactcccctctgccctcgccccgcgctctgctaccatttccttacgtctctgcttcgctcagcgatgcaaaacgcgcgaggcgcacggcagagggccgaagccgcggtactctccgggccaggcccgcccctcggccgcgccgcgcagcacgggattccccggccgctgtccagcgctggccgcctgagccaaggctgccgcggagccagtacagtcggggccgctggctggaagggcgagcttcctaaggcggggggaagcccggcgccggggccggagacacccgccatttcacccagtaagcgggcccggcctgcggaggtgggcggcatgcagctccgctttgcccggctctccgagcacgccacggcccccacccggggctccgcgcgcgccgcgggctacgacctgtacagtgcctatgattacacaataccacctatggagaaagctgttgtgaaaacggacattcagatagcgctcccttctgggtgttatggaagagtggctccacggtcaggcttggctgcaaaacactttattgatgtaggagctggtgtcatagatgaagattatagaggaaatgttggtgttgtactgtttaattttggcaaagaaaagtttgaagtcaaaaaaggtgatcgaattgcacagctcatttgcgaacggattttttatccagaaatagaagaagttcaagccttggatgacaccgaaaggggttcaggaggttttggttccactggaaagaattaaaatttatgccaagaacagaaaacaagaagtcatacctttttcttaaaaaaaaaaaaaaagtttttgcttcaagtgttttggtgttttgcacttctgtaaacttactagctttaccttctaaaagtactgcattttttacttttttttatgatcaaggaaaagatcattaaaaaaaaacacaaagaagtttttctttgtgtttggatcaaaaagaaactttgtttttccgcaattgaaggttgtatgtaaatctgctttgtggtgacctgatgtaaacagtgtcttcttaaaatcaaatgtaaatcaattacagattaaaaaaaaaagcctgtatttaactcat

SEQ ID NO: 10078 - protein, 252 aa, Homo sapiens; identical to SEQ ID NO: 1607

SEQ ID NO: 10079 - DNA, 1251 bp, Homo sapiens
ggtcatgttcccaggacgggcgcgtcttcagggtggaagcctggcgcacgtccggaggtgccgaggacccaaccagcccaaactctgggggaaatgactcccctctgccctcgccccgcgctctgctaccatttccttacgtctctgcttcgctcagcgatgcaaaacgcgcgaggcgcacggcagagggccgaagccgcggtactctccgggccaggcccgcccctcggccgcgccgcgcagcacgggattccccggccgctgtccagcgctggccgcctgagccaaggctgccgcggagccagtacagtcggggccgctggctggaagggcgagcttcctaaggcggggggaagcccggcgccggggccggagacacccgccatttcacccagtaagcgggcccggcctgcggaggtgggcggcatgcagctccgctttgcccggctctccgagcacgccacggcccccacccggggctccgcgcgcgccgcgggctacgacctgtacagtgcctatgattacacaataccacctatggagaaagctgttgtgaaaacggacattcagatagcgctcccttctgggtgttatggaagagtggctccacggtcaggcttggctgcaaaacactttattgatgtaggagctggtgtcatagatgaagattatagaggaaatgttggtgttgtactgtttaattttggcaaagaaaagtttgaagacaggatatggcgaatgtgtcagtaacgtcagtaataaactattctttctttgaagtcaaaaaaggtgatcgaattgcacagctcatttgcgaacggattttttatccagaaatagaagaagttcaagccttggatgacaccgaaaggggttcaggaggttttggttccactggaaagaattaaaatttatgccaagaacagaaaacaagaagtcatacctttttcttaaaaaaaaaaaaaaagtttttgcttcaagtgttttggtgttttgcacttctgtaaacttactagctttaccttctaaaagtactgcattttttacttttttttatgatcaaggaaaagatcattaaaaaaaaacacaaagaagtttttctttgtgtttggatcaaaaagaaactttgtttttccgcaattgaaggttgtatgtaaatctgctttgtggtgacctgatgtaaacagtgtcttcttaaaatcaaatgtaaatcaattacagattaaaaaaaaaagcctgtatttaactcat

SEQ ID NO: 10080 - protein, 218 aa, Homo sapiens
MTPLCPRPALCYHFLTSLLRSAMQNARGARQRAEAAVLSGPGPPLGRAAQHGIPRPLSSAGRLSQGCRGASTVGAAGWKGELPKAGGSPAPGPETPAISPSKRARPAEVGGMQLRFARLSEHATAPTRGSARAAGYDLYSAYDYTIPPMEKAVVKTDIQIALPSGCYGRVAPRSGLAAKHFIDVGAGVIDEDYRGNVGVVLFNFGKEKFEDRIWRMCQ

SEQ ID NO: 10081 - DNA, 1395 bp, Homo sapiens
ggtcatgttcccaggacgggcgcgtcttcagggtggaagcctggcgcacgtccggaggtgccgaggacccaaccagcccaaactctgggggaaatgactcccctctgccctcgccccgcgctctgctaccatttccttacgtctctgcttcgctcagcgatgcaaaacgcgcgaggcgcacggcagagggccgaagccgcggtactctccgggccaggcccgcccctcggccgcgccgcgcagcacgggattccccggccgctgtccagcgctggccgcctgagccaaggctgccgcggagccagtacagtcggggccgctggctggaagggcgagcttcctaaggcggggggaagcccggcgccggggccggagacacccgccatttcacccagtaagcgggcccggcctgcggaggtgggcggcatgcagctccgctttgcccggctctccgagcacgccacggcccccacccggggctccgcgcgcgccgcgggctacgacctgtacagtgcctatgattacacaataccacctatggagaaagctgttgtgaaaacggacattcagatagcgctcccttctgggtgttatggaagagtggctccacggtcaggcttggctgcaaaacactttattgatgtaggagctggtgtcatagatgaagattatagaggaaatgttggtgttgtactgtttaattttggcaaagaaaagtttgaagacaggatatggcgaatgtgtcagtaacgtcagtaataaactattctttctttgaagtcaaaaaaggtgatcgaattgcacagctcatttgcgaacggattttttatccagaaatagaagaagttcaagccttggatgacaccgaaaggggttcaggaggttttggttccactggaaagaattaaaatttatgccaagaacagaaaacaagaagtcatacctttttcttaaaaaaaaaaaaaaagtttttgcttcaagtgttttggtgttttgcacttctgtaaacttactagctttaccttctaaaagtactgcattttttacttttttttatgatcaaggaaaagatcattaaaaaaaaacacaaagaagtttttctttgtgtttggatcaaaaagaaactttgtttttccgcaattgaaggttgtatgtaaatctgctttgtggtgacctgatgtaaacagtgtcttcttaaaatcaaatgtaaatcaattacagattaaaaaaaaaagcctgtatttaactcatatgatctcccttcagcaacttattttgctttaattgctttaaatcttaagcaatattttttattcagtaaacaaattctttcacaaggtacaaaatcttgcataagctgaactaaaataaaaatgaaaaggagagattaaaggt

SEQ ID NO: 10082 - protein, 218 aa, Homo sapiens; identical to SEQ ID NO: 10080

SEQ ID NO: 10083 - DNA, 1339 bp, Homo sapiens
ggtcatgttcccaggacgggcgcgtcttcagggtggaagcctggcgcacgtccggaggtgccgaggacccaaccagcccaaactctgggggaaatgactcccctctgccctcgccccgcgctctgctaccatttccttacgtctctgcttcgctcagcgatgcaaaacgcgcgaggcgcacggcagagggccgaagccgcggtactctccgggccaggcccgcccctcggccgcgccgcgcagcacgggattccccggccgctgtccagcgctggccgcctgagccaaggctgccgcggagccagtacagtcggggccgctggctggaagggcgagcttcctaaggcggggggaagcccggcgccggggccggagacacccgccatttcacccagtaagcgggcccggcctgcggaggtgggcggcatgcagctccgctttgcccggctctccgagcacgccacggcccccacccggggctccgcgcgcgccgcgggctacgacctgtacagtgcctatgattacacaataccacctatggagaaagctgttgtgaaaacggacattcagatagcgctcccttctgggtgttatggaagagtggctccacggtcaggcttggctgcaaaacactttattgatgtaggagctggtgtcatagatgaagattatagaggaaatgttggtgttgtactgtttaattttggcaaagaaaagtttgaagtcaaaaaaggtgatcgaattgcacagctcatttgcgaacggattttttatccagaaatagaagaagttcaagccttggatgacaccgaaaggggttcaggaggttttggttccactggaaagaattaaaatttatgccaagaacagaaaacaagaagtcatacctttttcttaaaaaaaaaaaaaaagtttttgcttcaagtgttttggtgttttgcacttctgtaaacttactagctttaccttctaaaagtactgcattttttacttttttttatgatcaaggaaaagatcattaaaaaaaaacacaaagaagtttttctttgtgtttggatcaaaaagaaactttgtttttccgcaattgaaggttgtatgtaaatctgctttgtggtgacctgatgtaaacagtgtcttcttaaaatcaaatgtaaatcaattacagattaaaaaaaaaagcctgtatttaactcatatgatctcccttcagcaacttattttgctttaattgctttaaatcttaagcaatattttttattcagtaaacaaattctttcacaaggtacaaaatcttgcataagctgaactaaaataaaaatgaaaaggagagattaaaggt

SEQ ID NO: 10084 - protein, 252 aa, Homo sapiens; identical to SEQ ID NO: 1607

SEQ ID NO: 10085 - DNA, 2153 bp, Homo sapiens
ggtcatgttcccaggacgggcgcgtcttcagggtggaagcctggcgcacgtccggaggtgccgaggacccaaccagcccaaactctgggggaaatgactcccctctgccctcgccccgcgctctgctaccatttccttacgtctctgcttcgctcagcgatgcaaaacgcgcgaggcgcacggcagagggccgaagccgcggtactctccgggccaggcccgcccctcggccgcgccgcgcagcacgggattccccggccgctgtccagcgctggccgcctgagccaaggctgccgcggagccagtacagtcggggccgctggctggaagggcgagcttcctaaggcggggggaagcccggcgccggggccggagacacccgccatttcacccagtaagcgggcccggcctgcggaggtgggcggcatgcagctccgctttgcccggctctccgagcacgccacggcccccacccggggctccgcgcgcgccgcgggctacgacctgtacagtgcctatgattacacaataccacctatggagaaagctgttgtgaaaacggacattcagatagcgctcccttctgggtgttatggaagagtggctccacggtcaggcttggctgcaaaacactttattgatgtaggagctggtgtcatagatgaagattatagaggaaatgttggtgttgtactgtttaattttggcaaagaaaagtttgaagtcaaaaaaggtgatcgaattgcacagctcatttgcgaacggattttttatccagaaatagaagaagttcaagccttggatgacaccgaaaggggttcaggaggttttggttccactggaaagaattaaaatttatgccaagaacagaaaacaagaagtcatacctttttcttaaaaaaaaaaaaaaagtttttgcttcaagtgttttggtgttttgcacttctgtaaacttactagctttaccttctaaaagtactgcattttttacttttttttatgatcaaggaaaagatcattaaaaaaaaacacaaagaagtttttctttgtgtttggatcaaaaagaaactttgtttttccgcaattgaaggttgtatgtaaatctgctttgtggtgacctgatgtaaacagtgtcttcttaaaatcaaatgtaaatcaattacagattaaaaaaaaaagcctgtatttaactcatatgatctcccttcagcaacttattttgctttaattgctttaaatcttaagcaatattttttattcagtaaacaaattctttcacaaggtacaaaatcttgcataagctgaactaaaataaaaatgaaaaggagagattaaaggtattccttgttcttcccttctcttcactagtctaaaaacttctttttaatcttaagattctttgtgatgagggtgagaaaaagaatcctcagtttatttttccactattaatctttcttttgataaatcctctattgactgggtagaggtatgtttgtgaaagacatgtaacttggggatttgttactttaggtttgttcccttgaatttcatctcatcaggcaaattgtactagttgtagttacgagttttccctcagtgaagtagcaataggctgtaatcaagaaaatatgccatttatagagataagataaatgaaataatacttcagccaccaggtttttctgtctcacatacataagcagcatttcattgcagatatgggactgattctgtggcttaccttgattaacatcttttggaagttttgctagtgtgctttcctttctttactatgtttctcagattcctttgtatcagggttttgggtgtcacttaggttttgtccatcagattctgtgagacaccaggcatcgttttgaggatgtgggttatacacatggagtgcttctggaactatcagcccacttgaccacccagtttgtggaagcacaggcaagagtgttcttttctggtgattctccaggccatttaataccctgcaatgtaattgtccctctgtggctcacatttcattagtgagccatgaaatcaactcagtgggacatagccagcatttttgcataccaggttgggctataaaatatttctgttgtcaataaattttaaatgttttcctgctaaactaaccagaa

SEQ ID NO: 10086 - protein, 252 aa, Homo sapiens; identical to SEQ ID NO: 1607

SEQ ID NO: 10087 - DNA, 2209 bp, Homo sapiens
ggtcatgttcccaggacgggcgcgtcttcagggtggaagcctggcgcacgtccggaggtgccgaggacccaaccagcccaaactctgggggaaatgactcccctctgccctcgccccgcgctctgctaccatttccttacgtctctgcttcgctcagcgatgcaaaacgcgcgaggcgcacggcagagggccgaagccgcggtactctccgggccaggcccgcccctcggccgcgccgcgcagcacgggattccccggccgctgtccagcgctggccgcctgagccaaggctgccgcggagccagtacagtcggggccgctggctggaagggcgagcttcctaaggcggggggaagcccggcgccggggccggagacacccgccatttcacccagtaagcgggcccggcctgcggaggtgggcggcatgcagctccgctttgcccggctctccgagcacgccacggcccccacccggggctccgcgcgcgccgcgggctacgacctgtacagtgcctatgattacacaataccacctatggagaaagctgttgtgaaaacggacattcagatagcgctcccttctgggtgttatggaagagtggctccacggtcaggcttggctgcaaaacactttattgatgtaggagctggtgtcatagatgaagattatagaggaaatgttggtgttgtactgtttaattttggcaaagaaaagtttgaagacaggatatggcgaatgtgtcagtaacgtcagtaataaactattctttctttgaagtcaaaaaaggtgatcgaattgcacagctcatttgcgaacggattttttatccagaaatagaagaagttcaagccttggatgacaccgaaaggggttcaggaggttttggttccactggaaagaattaaaatttatgccaagaacagaaaacaagaagtcatacctttttcttaaaaaaaaaaaaaaagtttttgcttcaagtgttttggtgttttgcacttctgtaaacttactagctttaccttctaaaagtactgcattttttacttttttttatgatcaaggaaaagatcattaaaaaaaaacacaaagaagtttttctttgtgtttggatcaaaaagaaactttgtttttccgcaattgaaggttgtatgtaaatctgctttgtggtgacctgatgtaaacagtgtcttcttaaaatcaaatgtaaatcaattacagattaaaaaaaaaagcctgtatttaactcatatgatctcccttcagcaacttattttgctttaattgctttaaatcttaagcaatattttttattcagtaaacaaattctttcacaaggtacaaaatcttgcataagctgaactaaaataaaaatgaaaaggagagattaaaggtattccttgttcttcccttctcttcactagtctaaaaacttctttttaatcttaagattctttgtgatgagggtgagaaaaagaatcctcagtttatttttccactattaatctttcttttgataaatcctctattgactgggtagaggtatgtttgtgaaagacatgtaacttggggatttgttactttaggtttgttcccttgaatttcatctcatcaggcaaattgtactagttgtagttacgagttttccctcagtgaagtagcaataggctgtaatcaagaaaatatgccatttatagagataagataaatgaaataatacttcagccaccaggtttttctgtctcacatacataagcagcatttcattgcagatatgggactgattctgtggcttaccttgattaacatcttttggaagttttgctagtgtgctttcctttctttactatgtttctcagattcctttgtatcagggttttgggtgtcacttaggttttgtccatcagattctgtgagacaccaggcatcgttttgaggatgtgggttatacacatggagtgcttctggaactatcagcccacttgaccacccagtttgtggaagcacaggcaagagtgttcttttctggtgattctccaggccatttaataccctgcaatgtaattgtccctctgtggctcacatttcattagtgagccatgaaatcaactcagtgggacatagccagcatttttgcataccaggttgggctataaaatatttctgttgtcaataaattttaaatgttttcctgctaaactaaccagaa

SEQ ID NO: 10088 - protein, 218 aa, Homo sapiens; identical to SEQ ID NO: 10080

SEQ ID NO: 10089 - DNA, 574 bp, Homo sapiens
gttcccaggacgggcgcgtcttcagggtggaagcctggcgcacgtccggagagacacccgccatttcacccagtaagcgggcccggcctgcggaggtgggcggcatgcagctccgctttgcccggctctccgagcacgccacggcccccacccggggctccgcgcgcgccgcgggctacgacctgtacagtgcctatgattacacaataccacctatggagaaagctgttgtgaaaacggacattcagatagcgctcccttctgggtgttatggaagagtggctccacggtcaggcttggctgcaaaacactttattgatgtaggagctggtgtcatagatgaagattatagaggaaatgttggtgttgtactgtttaattttggcaaagaaaagtttgaagtcaaaaaaggtgatcgaattgcacagctcatttgcgaacggattttttatccagaaatagaagaagttcaagccttggatgacaccgaaaggggttcaggaggttttggttccactggaaagaattaaaatttatgccaagaacagaaaacaagaagtcatacctttttctt

SEQ ID NO: 10090 - protein, 141 aa, Homo sapiens; identical to SEQ ID NO: 1609

SEQ ID NO: 10091 - DNA, 1655 bp, Homo sapiens
aggacgggcgcgtcttcagggtggaagcctggcgcacgtccggaggtgccgaggacccaaccagcccaaactctgggggaaatgactcccctctgccctcgccccgcgctctgctaccatttccttacgtctctgcttcgctcagcgatgcaaaacgcgcgaggcgcacggcagagggccgaagccgcggtactctccgggccaggcccgcccctcggccgcgccgcgcagcacgggattccccggccgctgtccagcgctggccgcctgagccaaggctgccgcggagccagtacagtcggggccgctggctggaagggcgagcttcctaaggcggggggaagcccggcgccggggccgggtaggaaaggcgggggaggggctccggccgtctggaaggaatccacgcggcttgaggctgtgggggaagtagggtggcgagcggtccttctgcgcgcggggggcggggggggtggggtggtccattagggtcccctggcgagggggcggctttctagtgtgtgagggcgacgccctagaagctccccttcaaagttggccccacgcgctgaatgtggaaagttgactgggacccagtagtttcccatcccaaacctgctttccgagaagggcttcaaacccaaaatgtgaatcccgcctcccctctcagccagaactgtggactcgtcccggggaggggcggtgggtggggcggggctggcgggaaatttcggttttggcgcgctccctgcggcgacgctcatcgtgcgctctcctcttcccccggtggtctcctcgctcgccttctggctctgccatgccctgctctgaagagacacccgccatttcacccagtaagcgggcccggcctgcggaggtgggcggcatgcagctccgctttgcccggctctccgagcacgccacggcccccacccggggctccgcgcgcgccgcgggctacgacctgtacagtgcctatgattacacaataccacctatggagaaagctgttgtgaaaacggacattcagatagcgctcccttctgggtgttatggaagagtggctccacggtcaggcttggctgcaaaacactttattgatgtaggagctggtgtcatagatgaagattatagaggaaatgttggtgttgtactgtttaattttggcaaagaaaagtttgaagtcaaaaaaggtgatcgaattgcacagctcatttgcgaacggattttttatccagaaatagaagaagttcaagccttggatgacaccgaaaggggttcaggaggttttggttccactggaaagaattaaaatttatgccaagaacagaaaacaagaagtcatacctttttcttaaaaaaaaaaaaaaagtttttgcttcaagtgttttggtgttttgcacttctgtaaacttactagctttaccttctaaaagtactgcattttttacttttttttatgatcaaggaaaagatcattaaaaaaaaacacaaagaagtttttctttgtgtttggatcaaaaagaaactttgtttttccgcaattgaaggttgtatgtaaatctgctttgtggtgacctgatgtaaacagtgtcttcttaaaatcaaatgtaaatcaattacagattaaaaaaaaaagcctgtatttaactcat

SEQ ID NO: 10092 - protein, 164 aa, Homo sapiens; identical to SEQ ID NO: 1611

SEQ ID NO: 10093 - DNA, 2242 bp, Homo sapiens
aggacgggcgcgtcttcagggtggaagcctggcgcacgtccggaggtgccgaggacccaaccagcccaaactctgggggaaatgactcccctctgccctcgccccgcgctctgctaccatttccttacgtctctgcttcgctcagcgatgcaaaacgcgcgaggcgcacggcagagggccgaagccgcggtactctccgggccaggcccgcccctcggccgcgccgcgcagcacgggattccccggccgctgtccagcgctggccgcctgagccaaggctgccgcggagccagtacagtcggggccgctggctggaagggcgagcttcctaaggcggggggaagcccggcgccggggccgggtaggaaaggcgggggaggggctccggccgtctggaaggaatccacgcggcttgaggctgtgggggaagtagggtggcgagcggtccttctgcgcgcggggggcggggggggtggggtggtccattagggtcccctggcgagggggcggctttctagtgtgtgagggcgacgccctagaagctccccttcaaagttggccccacgcgctgaatgtggaaagttgactgggacccagtagtttcccatcccaaacctgctttccgagaagggcttcaaacccaaaatgtgaatcccgcctcccctctcagccagaactgtggactcgtcccggggaggggcggtgggtggggcggggctggcgggaaatttcggttttggcgcgctccctgcggcgacgctcatcgtgcgctctcctcttcccccggtggtctcctcgctcgccttctggctctgccatgccctgctctgaagagacacccgccatttcacccagtaagcgggcccggcctgcggaggtgggcggcatgcagctccgctttgcccggctctccgagcacgccacggcccccacccggggctccgcgcgcgccgcgggctacgacctgtacagtgcctatgattacacaataccacctatggagaaagctgttgtgaaaacggacattcagatagcgctcccttctgggtgttatggaagagtggctccacggtcaggcttggctgcaaaacactttattgatgtaggagctggtgtcatagatgaagattatagaggaaatgttggtgttgtactgtttaattttggcaaagaaaagtttgaaggtatgttaaatatatacattcacataattttagtgaattttcagagtcatgtatgtgtaaattaatattgactcctttaattctcattgaataagacaggatatggcgaatgtgtcagtaacgtcagtaataaactattctttctttgaagtcaaaaaaggtgatcgaattgcacagctcatttgcgaacggattttttatccagaaatagaagaagttcaagtaagtattacaaaggaagatacagaataagtaatataacatcttaagtgaagaaatatatataatcttgagaatttaatatgctgtttgtaactaaatagtatatatgactaaacttattttaagcaaatttaaaatactagttttagaatttctttaaatgtttttcatgtagctattatgtagtattactttggataataagttatttaaacatactgtgaacttctaatattttattagaattttttaaagttatccagtattctaatttatggagctttttagaatttaattttctttctgtaatctcccttttgaaaagatgatatagcaagagtagaattctggctgtatttttcttaggagctggagaggaaaactgaaagaggctcttaaaaaaaactgtgaagcttactacctttctatctttcaggccttggatgacaccgaaaggggttcaggaggttttggttccactggaaagaattaaaatttatgccaagaacagaaaacaagaagtcatacctttttcttaaaaaaaaaaaaaaagtttttgcttcaagtgttttggtgttttgcacttctgtaaacttactagctttaccttctaaaagtactgcattttttacttttttttatgatcaaggaaaagatcattaaaaaaaaacacaaagaagtttttctttgtgtttggatcaaaaagaaactttgtttttccgcaattgaaggttgtatgtaaatctgctttgtggtgacctgatgtaaacagtgtcttcttaaaatcaaatgtaaatcaattacagattaaaaaaaaaagcctgtatttaactcat

SEQ ID NO: 10094 - protein, 147 aa, Homo sapiens [sequence omitted]

SEQ ID NO: 10095 - DNA, 2386 bp, Homo sapiens
aggacgggcgcgtcttcagggtggaagcctggcgcacgtccggaggtgccgaggacccaaccagcccaaactctgggggaaatgactcccctctgccctcgccccgcgctctgctaccatttccttacgtctctgcttcgctcagcgatgcaaaacgcgcgaggcgcacggcagagggccgaagccgcggtactctccgggccaggcccgcccctcggccgcgccgcgcagcacgggattccccggccgctgtccagcgctggccgcctgagccaaggctgccgcggagccagtacagtcggggccgctggctggaagggcgagcttcctaaggcggggggaagcccggcgccggggccgggtaggaaaggcgggggaggggctccggccgtctggaaggaatccacgcggcttgaggctgtgggggaagtagggtggcgagcggtccttctgcgcgcggggggcggggggggtggggtggtccattagggtcccctggcgagggggcggctttctagtgtgtgagggcgacgccctagaagctccccttcaaagttggccccacgcgctgaatgtggaaagttgactgggacccagtagtttcccatcccaaacctgctttccgagaagggcttcaaacccaaaatgtgaatcccgcctcccctctcagccagaactgtggactcgtcccggggaggggcggtgggtggggcggggctggcgggaaatttcggttttggcgcgctccctgcggcgacgctcatcgtgcgctctcctcttcccccggtggtctcctcgctcgccttctggctctgccatgccctgctctgaagagacacccgccatttcacccagtaagcgggcccggcctgcggaggtgggcggcatgcagctccgctttgcccggctctccgagcacgccacggcccccacccggggctccgcgcgcgccgcgggctacgacctgtacagtgcctatgattacacaataccacctatggagaaagctgttgtgaaaacggacattcagatagcgctcccttctgggtgttatggaagagtggctccacggtcaggcttggctgcaaaacactttattgatgtaggagctggtgtcatagatgaagattatagaggaaatgttggtgttgtactgtttaattttggcaaagaaaagtttgaaggtatgttaaatatatacattcacataattttagtgaattttcagagtcatgtatgtgtaaattaatattgactcctttaattctcattgaataagacaggatatggcgaatgtgtcagtaacgtcagtaataaactattctttctttgaagtcaaaaaaggtgatcgaattgcacagctcatttgcgaacggattttttatccagaaatagaagaagttcaagtaagtattacaaaggaagatacagaataagtaatataacatcttaagtgaagaaatatatataatcttgagaatttaatatgctgtttgtaactaaatagtatatatgactaaacttattttaagcaaatttaaaatactagttttagaatttctttaaatgtttttcatgtagctattatgtagtattactttggataataagttatttaaacatactgtgaacttctaatattttattagaattttttaaagttatccagtattctaatttatggagctttttagaatttaattttctttctgtaatctcccttttgaaaagatgatatagcaagagtagaattctggctgtatttttcttaggagctggagaggaaaactgaaagaggctcttaaaaaaaactgtgaagcttactacctttctatctttcaggccttggatgacaccgaaaggggttcaggaggttttggttccactggaaagaattaaaatttatgccaagaacagaaaacaagaagtcatacctttttcttaaaaaaaaaaaaaaagtttttgcttcaagtgttttggtgttttgcacttctgtaaacttactagctttaccttctaaaagtactgcattttttacttttttttatgatcaaggaaaagatcattaaaaaaaaacacaaagaagtttttctttgtgtttggatcaaaaagaaactttgtttttccgcaattgaaggttgtatgtaaatctgctttgtggtgacctgatgtaaacagtgtcttcttaaaatcaaatgtaaatcaattacagattaaaaaaaaaagcctgtatttaactcatatgatctcccttcagcaacttattttgctttaattgctttaaatcttaagcaatattttttattcagtaaacaaattctttcacaaggtacaaaatcttgcataagctgaactaaaataaaaatgaaaaggagagattaaaggt

SEQ ID NO: 10096 - protein, 147 aa, Homo sapiens [sequence omitted]

SEQ ID NO: 10097 - DNA, 1799 bp, Homo sapiens
aggacgggcgcgtcttcagggtggaagcctggcgcacgtccggaggtgccgaggacccaaccagcccaaactctgggggaaatgactcccctctgccctcgccccgcgctctgctaccatttccttacgtctctgcttcgctcagcgatgcaaaacgcgcgaggcgcacggcagagggccgaagccgcggtactctccgggccaggcccgcccctcggccgcgccgcgcagcacgggattccccggccgctgtccagcgctggccgcctgagccaaggctgccgcggagccagtacagtcggggccgctggctggaagggcgagcttcctaaggcggggggaagcccggcgccggggccgggtaggaaaggcgggggaggggctccggccgtctggaaggaatccacgcggcttgaggctgtgggggaagtagggtggcgagcggtccttctgcgcgcggggggcggggggggtggggtggtccattagggtcccctggcgagggggcggctttctagtgtgtgagggcgacgccctagaagctccccttcaaagttggccccacgcgctgaatgtggaaagttgactgggacccagtagtttcccatcccaaacctgctttccgagaagggcttcaaacccaaaatgtgaatcccgcctcccctctcagccagaactgtggactcgtcccggggaggggcggtgggtggggcggggctggcgggaaatttcggttttggcgcgctccctgcggcgacgctcatcgtgcgctctcctcttcccccggtggtctcctcgctcgccttctggctctgccatgccctgctctgaagagacacccgccatttcacccagtaagcgggcccggcctgcggaggtgggcggcatgcagctccgctttgcccggctctccgagcacgccacggcccccacccggggctccgcgcgcgccgcgggctacgacctgtacagtgcctatgattacacaataccacctatggagaaagctgttgtgaaaacggacattcagatagcgctcccttctgggtgttatggaagagtggctccacggtcaggcttggctgcaaaacactttattgatgtaggagctggtgtcatagatgaagattatagaggaaatgttggtgttgtactgtttaattttggcaaagaaaagtttgaagtcaaaaaaggtgatcgaattgcacagctcatttgcgaacggattttttatccagaaatagaagaagttcaagccttggatgacaccgaaaggggttcaggaggttttggttccactggaaagaattaaaatttatgccaagaacagaaaacaagaagtcatacctttttcttaaaaaaaaaaaaaaagtttttgcttcaagtgttttggtgttttgcacttctgtaaacttactagctttaccttctaaaagtactgcattttttacttttttttatgatcaaggaaaagatcattaaaaaaaaacacaaagaagtttttctttgtgtttggatcaaaaagaaactttgtttttccgcaattgaaggttgtatgtaaatctgctttgtggtgacctgatgtaaacagtgtcttcttaaaatcaaatgtaaatcaattacagattaaaaaaaaaagcctgtatttaactcatatgatctcccttcagcaacttattttgctttaattgctttaaatcttaagcaatattttttattcagtaaacaaattctttcacaaggtacaaaatcttgcataagctgaactaaaataaaaatgaaaaggagagattaaaggt

SEQ ID NO: 10098 - protein, 164 aa, Homo sapiens; identical to SEQ ID NO: 1611

SEQ ID NO: 10099 - DNA, 2613 bp, Homo sapiens
aggacgggcgcgtcttcagggtggaagcctggcgcacgtccggaggtgccgaggacccaaccagcccaaactctgggggaaatgactcccctctgccctcgccccgcgctctgctaccatttccttacgtctctgcttcgctcagcgatgcaaaacgcgcgaggcgcacggcagagggccgaagccgcggtactctccgggccaggcccgcccctcggccgcgccgcgcagcacgggattccccggccgctgtccagcgctggccgcctgagccaaggctgccgcggagccagtacagtcggggccgctggctggaagggcgagcttcctaaggcggggggaagcccggcgccggggccgggtaggaaaggcgggggaggggctccggccgtctggaaggaatccacgcggcttgaggctgtgggggaagtagggtggcgagcggtccttctgcgcgcggggggcggggggggtggggtggtccattagggtcccctggcgagggggcggctttctagtgtgtgagggcgacgccctagaagctccccttcaaagttggccccacgcgctgaatgtggaaagttgactgggacccagtagtttcccatcccaaacctgctttccgagaagggcttcaaacccaaaatgtgaatcccgcctcccctctcagccagaactgtggactcgtcccggggaggggcggtgggtggggcggggctggcgggaaatttcggttttggcgcgctccctgcggcgacgctcatcgtgcgctctcctcttcccccggtggtctcctcgctcgccttctggctctgccatgccctgctctgaagagacacccgccatttcacccagtaagcgggcccggcctgcggaggtgggcggcatgcagctccgctttgcccggctctccgagcacgccacggcccccacccggggctccgcgcgcgccgcgggctacgacctgtacagtgcctatgattacacaataccacctatggagaaagctgttgtgaaaacggacattcagatagcgctcccttctgggtgttatggaagagtggctccacggtcaggcttggctgcaaaacactttattgatgtaggagctggtgtcatagatgaagattatagaggaaatgttggtgttgtactgtttaattttggcaaagaaaagtttgaagtcaaaaaaggtgatcgaattgcacagctcatttgcgaacggattttttatccagaaatagaagaagttcaagccttggatgacaccgaaaggggttcaggaggttttggttccactggaaagaattaaaatttatgccaagaacagaaaacaagaagtcatacctttttcttaaaaaaaaaaaaaaagtttttgcttcaagtgttttggtgttttgcacttctgtaaacttactagctttaccttctaaaagtactgcattttttacttttttttatgatcaaggaaaagatcattaaaaaaaaacacaaagaagtttttctttgtgtttggatcaaaaagaaactttgtttttccgcaattgaaggttgtatgtaaatctgctttgtggtgacctgatgtaaacagtgtcttcttaaaatcaaatgtaaatcaattacagattaaaaaaaaaagcctgtatttaactcatatgatctcccttcagcaacttattttgctttaattgctttaaatcttaagcaatattttttattcagtaaacaaattctttcacaaggtacaaaatcttgcataagctgaactaaaataaaaatgaaaaggagagattaaaggtattccttgttcttcccttctcttcactagtctaaaaacttctttttaatcttaagattctttgtgatgagggtgagaaaaagaatcctcagtttatttttccactattaatctttcttttgataaatcctctattgactgggtagaggtatgtttgtgaaagacatgtaacttggggatttgttactttaggtttgttcccttgaatttcatctcatcaggcaaattgtactagttgtagttacgagttttccctcagtgaagtagcaataggctgtaatcaagaaaatatgccatttatagagataagataaatgaaataatacttcagccaccaggtttttctgtctcacatacataagcagcatttcattgcagatatgggactgattctgtggcttaccttgattaacatcttttggaagttttgctagtgtgctttcctttctttactatgtttctcagattcctttgtatcagggttttgggtgtcacttaggttttgtccatcagattctgtgagacaccaggcatcgttttgaggatgtgggttatacacatggagtgcttctggaactatcagcccacttgaccacccagtttgtggaagcacaggcaagagtgttcttttctggtgattctccaggccatttaataccctgcaatgtaattgtccctctgtggctcacatttcattagtgagccatgaaatcaactcagtgggacatagccagcatttttgcataccaggttgggctataaaatatttctgttgtcaataaattttaaatgttttcctgctaaactaaccagaa

SEQ ID NO: 10100 - protein, 164 aa, Homo sapiens; identical to SEQ ID NO: 1611

SEQ ID NO: 10101 - DNA, 3200 bp, Homo sapiens
aggacgggcgcgtcttcagggtggaagcctggcgcacgtccggaggtgccgaggacccaaccagcccaaactctgggggaaatgactcccctctgccctcgccccgcgctctgctaccatttccttacgtctctgcttcgctcagcgatgcaaaacgcgcgaggcgcacggcagagggccgaagccgcggtactctccgggccaggcccgcccctcggccgcgccgcgcagcacgggattccccggccgctgtccagcgctggccgcctgagccaaggctgccgcggagccagtacagtcggggccgctggctggaagggcgagcttcctaaggcggggggaagcccggcgccggggccgggtaggaaaggcgggggaggggctccggccgtctggaaggaatccacgcggcttgaggctgtgggggaagtagggtggcgagcggtccttctgcgcgcggggggcggggggggtggggtggtccattagggtcccctggcgagggggcggctttctagtgtgtgagggcgacgccctagaagctccccttcaaagttggccccacgcgctgaatgtggaaagttgactgggacccagtagtttcccatcccaaacctgctttccgagaagggcttcaaacccaaaatgtgaatcccgcctcccctctcagccagaactgtggactcgtcccggggaggggcggtgggtggggcggggctggcgggaaatttcggttttggcgcgctccctgcggcgacgctcatcgtgcgctctcctcttcccccggtggtctcctcgctcgccttctggctctgccatgccctgctctgaagagacacccgccatttcacccagtaagcgggcccggcctgcggaggtgggcggcatgcagctccgctttgcccggctctccgagcacgccacggcccccacccggggctccgcgcgcgccgcgggctacgacctgtacagtgcctatgattacacaataccacctatggagaaagctgttgtgaaaacggacattcagatagcgctcccttctgggtgttatggaagagtggctccacggtcaggcttggctgcaaaacactttattgatgtaggagctggtgtcatagatgaagattatagaggaaatgttggtgttgtactgtttaattttggcaaagaaaagtttgaaggtatgttaaatatatacattcacataattttagtgaattttcagagtcatgtatgtgtaaattaatattgactcctttaattctcattgaataagacaggatatggcgaatgtgtcagtaacgtcagtaataaactattctttctttgaagtcaaaaaaggtgatcgaattgcacagctcatttgcgaacggattttttatccagaaatagaagaagttcaagtaagtattacaaaggaagatacagaataagtaatataacatcttaagtgaagaaatatatataatcttgagaatttaatatgctgtttgtaactaaatagtatatatgactaaacttattttaagcaaatttaaaatactagttttagaatttctttaaatgtttttcatgtagctattatgtagtattactttggataataagttatttaaacatactgtgaacttctaatattttattagaattttttaaagttatccagtattctaatttatggagctttttagaatttaattttctttctgtaatctcccttttgaaaagatgatatagcaagagtagaattctggctgtatttttcttaggagctggagaggaaaactgaaagaggctcttaaaaaaaactgtgaagcttactacctttctatctttcaggccttggatgacaccgaaaggggttcaggaggttttggttccactggaaagaattaaaatttatgccaagaacagaaaacaagaagtcatacctttttcttaaaaaaaaaaaaaaagtttttgcttcaagtgttttggtgttttgcacttctgtaaacttactagctttaccttctaaaagtactgcattttttacttttttttatgatcaaggaaaagatcattaaaaaaaaacacaaagaagtttttctttgtgtttggatcaaaaagaaactttgtttttccgcaattgaaggttgtatgtaaatctgctttgtggtgacctgatgtaaacagtgtcttcttaaaatcaaatgtaaatcaattacagattaaaaaaaaaagcctgtatttaactcatatgatctcccttcagcaacttattttgctttaattgctttaaatcttaagcaatattttttattcagtaaacaaattctttcacaaggtacaaaatcttgcataagctgaactaaaataaaaatgaaaaggagagattaaaggtattccttgttcttcccttctcttcactagtctaaaaacttctttttaatcttaagattctttgtgatgagggtgagaaaaagaatcctcagtttatttttccactattaatctttcttttgataaatcctctattgactgggtagaggtatgtttgtgaaagacatgtaacttggggatttgttactttaggtttgttcccttgaatttcatctcatcaggcaaattgtactagttgtagttacgagttttccctcagtgaagtagcaataggctgtaatcaagaaaatatgccatttatagagataagataaatgaaataatacttcagccaccaggtttttctgtctcacatacataagcagcatttcattgcagatatgggactgattctgtggcttaccttgattaacatcttttggaagttttgctagtgtgctttcctttctttactatgtttctcagattcctttgtatcagggttttgggtgtcacttaggttttgtccatcagattctgtgagacaccaggcatcgttttgaggatgtgggttatacacatggagtgcttctggaactatcagcccacttgaccacccagtttgtggaagcacaggcaagagtgttcttttctggtgattctccaggccatttaataccctgcaatgtaattgtccctctgtggctcacatttcattagtgagccatgaaatcaactcagtgggacatagccagcatttttgcataccaggttgggctataaaatatttctgttgtcaataaattttaaatgttttcctgctaaactaaccagaa

SEQ ID NO: 10102 - protein, 147 aa, Homo sapiens [sequence omitted]

SEQ ID NO: 10103 - DNA, 794 bp, Homo sapiens
tggaagcctggcgcacgtccggaggtgccgaggacccaaccagcccaaactctgggggaaatgactcccctctgccctcgccccgcgctctgctaccatttccttacgtctctgcttcgctcagcgatgcaaaacgcgcgaggcgcacggcagagggccgaagccgcggtactctccgggccaggcccgcccctcggccgcgccgcgcagcacgggattccccggccgctgtccagcgctggccgcctgagccaaggctgccgcggagccaagacacccgccatttcacccagtaagcgggcccggcctgcggaggtgggcggcatgcagctccgctttgcccggctctccgagcacgccacggcccccacccggggctccgcgcgcgccgcgggctacgacctgtacagtgcctatgattacacaataccacctatggagaaagctgttgtgaaaacggacattcagatagcgctcccttctgggtgttatggaagagtggctccacggtcaggcttggctgcaaaacactttattgatgtaggagctggtgtcatagatgaagattatagaggaaatgttggtgttgtactgtttaattttggcaaagaaaagtttgaagtcaaaaaaggtgatcgaattgcacagctcatttgcgaacggattttttatccagaaatagaagaagttcaagccttggatgacaccgaaaggggttcaggaggttttggttccactggaaagaattaaaatttatgccaagaacagaaaacaagaagtcatacctttttctt

SEQ ID NO: 10104 - protein, 229 aa, Homo sapiens
MTPLCPRPALCYHFLTSLLRSAMQNARGARQRAEAAVLSGPGPPLGRAAQHGIPRPLSSAGRLSQGCRGAKTPAISPSKRARPAEVGGMQLRFARLSEHATAPTRGSARAAGYDLYSAYDYTIPPMEKAVVKTDIQIALPSGCYGRVAPRSGLAAKHFIDVGAGVIDEDYRGNVGVVLFNFGKEKFEVKKGDRIAQLICERIFYPEIEEVQALDDTERGSGGFGSTGKN

SEQ ID NO: 10105 - DNA, 1093 bp, Homo sapiens
tggaagcctggcgcacgtccggaggtgccgaggacccaaccagcccaaactctgggggaaatgactcccctctgccctcgccccgcgctctgctaccatttccttacgtctctgcttcgctcagcgatgcaaaacgcgcgaggcgcacggcagagggccgaagccgcggtactctccgggccaggcccgcccctcggccgcgccgcgcagcacgggattccccggccgctgtccagcgctggccgcctgagccaaggctgccgcggagccaagacacccgccatttcacccagtaagcgggcccggcctgcggaggtgggcggcatgcagctccgctttgcccggctctccgagcacgccacggcccccacccggggctccgcgcgcgccgcgggctacgacctgtacagtgcctatgattacacaataccacctatggagaaagctgttgtgaaaacggacattcagatagcgctcccttctgggtgttatggaagagtggctccacggtcaggcttggctgcaaaacactttattgatgtaggagctggtgtcatagatgaagattatagaggaaatgttggtgttgtactgtttaattttggcaaagaaaagtttgaagtcaaaaaaggtgatcgaattgcacagctcatttgcgaacggattttttatccagaaatagaagaagttcaagccttggatgacaccgaaaggggttcaggaggttttggttccactggaaagaattaaaatttatgccaagaacagaaaacaagaagtcatacctttttcttaaaaaaaaaaaaaaagtttttgcttcaagtgttttggtgttttgcacttctgtaaacttactagctttaccttctaaaagtactgcattttttacttttttttatgatcaaggaaaagatcattaaaaaaaaacacaaagaagtttttctttgtgtttggatcaaaaagaaactttgtttttccgcaattgaaggttgtatgtaaatctgctttgtggtgacctgatgtaaacagtgtcttcttaaaatcaaatgtaaatcaattacagattaaaaaaaaaagcctgtatttaactcat

SEQ ID NO: 10106 - protein, 229 aa, Homo sapiens; identical to SEQ ID NO: 10104

SEQ ID NO: 10107 - DNA, 1237 bp, Homo sapiens
tggaagcctggcgcacgtccggaggtgccgaggacccaaccagcccaaactctgggggaaatgactcccctctgccctcgccccgcgctctgctaccatttccttacgtctctgcttcgctcagcgatgcaaaacgcgcgaggcgcacggcagagggccgaagccgcggtactctccgggccaggcccgcccctcggccgcgccgcgcagcacgggattccccggccgctgtccagcgctggccgcctgagccaaggctgccgcggagccaagacacccgccatttcacccagtaagcgggcccggcctgcggaggtgggcggcatgcagctccgctttgcccggctctccgagcacgccacggcccccacccggggctccgcgcgcgccgcgggctacgacctgtacagtgcctatgattacacaataccacctatggagaaagctgttgtgaaaacggacattcagatagcgctcccttctgggtgttatggaagagtggctccacggtcaggcttggctgcaaaacactttattgatgtaggagctggtgtcatagatgaagattatagaggaaatgttggtgttgtactgtttaattttggcaaagaaaagtttgaagtcaaaaaaggtgatcgaattgcacagctcatttgcgaacggattttttatccagaaatagaagaagttcaagccttggatgacaccgaaaggggttcaggaggttttggttccactggaaagaattaaaatttatgccaagaacagaaaacaagaagtcatacctttttcttaaaaaaaaaaaaaaagtttttgcttcaagtgttttggtgttttgcacttctgtaaacttactagctttaccttctaaaagtactgcattttttacttttttttatgatcaaggaaaagatcattaaaaaaaaacacaaagaagtttttctttgtgtttggatcaaaaagaaactttgtttttccgcaattgaaggttgtatgtaaatctgctttgtggtgacctgatgtaaacagtgtcttcttaaaatcaaatgtaaatcaattacagattaaaaaaaaaagcctgtatttaactcatatgatctcccttcagcaacttattttgctttaattgctttaaatcttaagcaatattttttattcagtaaacaaattctttcacaaggtacaaaatcttgcataagctgaactaaaataaaaatgaaaaggagagattaaaggt

SEQ ID NO: 10108 - protein, 229 aa, Homo sapiens; identical to SEQ ID NO: 10104

SEQ ID NO: 10109 - DNA, 2051 bp, Homo sapiens
tggaagcctggcgcacgtccggaggtgccgaggacccaaccagcccaaactctgggggaaatgactcccctctgccctcgccccgcgctctgctaccatttccttacgtctctgcttcgctcagcgatgcaaaacgcgcgaggcgcacggcagagggccgaagccgcggtactctccgggccaggcccgcccctcggccgcgccgcgcagcacgggattccccggccgctgtccagcgctggccgcctgagccaaggctgccgcggagccaagacacccgccatttcacccagtaagcgggcccggcctgcggaggtgggcggcatgcagctccgctttgcccggctctccgagcacgccacggcccccacccggggctccgcgcgcgccgcgggctacgacctgtacagtgcctatgattacacaataccacctatggagaaagctgttgtgaaaacggacattcagatagcgctcccttctgggtgttatggaagagtggctccacggtcaggcttggctgcaaaacactttattgatgtaggagctggtgtcatagatgaagattatagaggaaatgttggtgttgtactgtttaattttggcaaagaaaagtttgaagtcaaaaaaggtgatcgaattgcacagctcatttgcgaacggattttttatccagaaatagaagaagttcaagccttggatgacaccgaaaggggttcaggaggttttggttccactggaaagaattaaaatttatgccaagaacagaaaacaagaagtcatacctttttcttaaaaaaaaaaaaaaagtttttgcttcaagtgttttggtgttttgcacttctgtaaacttactagctttaccttctaaaagtactgcattttttacttttttttatgatcaaggaaaagatcattaaaaaaaaacacaaagaagtttttctttgtgtttggatcaaaaagaaactttgtttttccgcaattgaaggttgtatgtaaatctgctttgtggtgacctgatgtaaacagtgtcttcttaaaatcaaatgtaaatcaattacagattaaaaaaaaaagcctgtatttaactcatatgatctcccttcagcaacttattttgctttaattgctttaaatcttaagcaatattttttattcagtaaacaaattctttcacaaggtacaaaatcttgcataagctgaactaaaataaaaatgaaaaggagagattaaaggtattccttgttcttcccttctcttcactagtctaaaaacttctttttaatcttaagattctttgtgatgagggtgagaaaaagaatcctcagtttatttttccactattaatctttcttttgataaatcctctattgactgggtagaggtatgtttgtgaaagacatgtaacttggggatttgttactttaggtttgttcccttgaatttcatctcatcaggcaaattgtactagttgtagttacgagttttccctcagtgaagtagcaataggctgtaatcaagaaaatatgccatttatagagataagataaatgaaataatacttcagccaccaggtttttctgtctcacatacataagcagcatttcattgcagatatgggactgattctgtggcttaccttgattaacatcttttggaagttttgctagtgtgctttcctttctttactatgtttctcagattcctttgtatcagggttttgggtgtcacttaggttttgtccatcagattctgtgagacaccaggcatcgttttgaggatgtgggttatacacatggagtgcttctggaactatcagcccacttgaccacccagtttgtggaagcacaggcaagagtgttcttttctggtgattctccaggccatttaataccctgcaatgtaattgtccctctgtggctcacatttcattagtgagccatgaaatcaactcagtgggacatagccagcatttttgcataccaggttgggctataaaatatttctgttgtcaataaattttaaatgttttcctgctaaactaaccagaa

SEQ ID NO: 10110 - protein, 229 aa, Homo sapiens; identical to SEQ ID NO: 10104

SEQ ID NO: 10111 - DNA, 1251 bp, Homo sapiens
acggcggtggctcggtctcccggctgcgcgcggagcgggagggctctcctcacacaagcgcttccttgccgagaggctggagctgcggcaccgcaggcctgagccaccccttctctgctgtctccttctcttcctcagggctcccgtgtctgctcgccctccgacgctgctcagaatattaaaggagacaggaagaagtccagatgaagtgactcatggaaccatttgtttatctgaacctgagctaaatcttaggagagaaggactatggaaatgatgttagacaaaaagcaaattcaagtgattttcttattcaagttcaaaatgggtcataaagcagcagagacaactcgcagcatcaacaatgcatttggcccagaaattgctaacaaaggtacagtgcagtggtggttcaagaacttttgcaaaggagacgagagccgtgaagatgaggagtgttgtgcccggccatcaaaagttggcaacgaccaattgagagcaatcatcgaagctgatcctcttacaacactagaagttgccgagaactcaacatcaaccatcctacggtcattcagcatttgaagcaaattagaaggttgtaaaagctcgataagtgggtgcctcatgagctgactgaaaataaaaacaatcgtcattttgaagtgttgtcttctcttactttgtgtaacaacaatgaaccatttcttgatcagattgtgacgtgcgttggtaagtggattttatatgacaaccgctgatgaccagcttggtggttggactgagaagaagctccagagcacttcccaaagccaaacttctaccaaaatgttaatggtcactgtttgatggtctgctgccggtctgatccactacagctttctgagttccagcaaaaccattacatctgagaagtatgctcaacaaatctctgagatgcatggaaagctgcaacgcctgcagccagcattgatcaacataaagggcccagtccttcggcacaacaatgcctgacaatgcgtcgcacaaccaacgcttcaaaagttgaatgaattgggcacaaagttttgcctcatccaccgtattcacctgacttcttgccaactgactaccacttcttcaagcatctcagcaactttttgcagggaagatgtttccacaaccagaatgcagaaaaagctttccaagagtttatcgaatcccagatcacacatttttacactacaggaataaataaacttatttctcattggc

SEQ ID NO: 10112 - protein, 104 aa, Homo sapiens
MEMMLDKKQIQVIFLFKFKMGHKAAETTRSINNAFGPEIANKGTVQWWFKNFCKGDESREDEECCARPSKVGNDQLRAIIEADPLTTLEVAENSTSTILRSFSI

SEQ ID NO: 10113 - DNA, 1308 bp, Homo sapiens
acggcggtggctcggtctcccggctgcgcgcggagcgggagggctctcctcacacaagcgcttccttgccgagaggctggagctgcggcaccgcaggcctgagccaccccttctctgctgtctccttctcttcctcagggctcccgtgtctgctcgccctccgacgctgctcagaatattaaaggagacaggaagaagtccagatgaagtgactcatggaaccatttgtttatctgaacctgagctaaatcttaggagagaaggactatggaaatgatgttagacaaaaagcaaattcaagtgattttcttattcaagttcaaaatgggtcataaagcagcagagacaactcgcagcatcaacaatgcatttggcccagaaattgctaacaaaggtacagtgcagtggtggttcaagaacttttgcaaaggagacgagagccgtgaagatgaggagtgttgtgcccggccatcaaaagttggcaacgaccaattgagagcaatcatcgaagctgatcctcttacaacactagaagttgccgagaactcaacatcaaccatcctacggtcattcagcatttgaagcaaattagaaggttgtaaaagctcgataagtgggtgcctcatgagctgactgaaaataaaaacaatcgtcattttgaagtgttgtcttctcttactttgtgtaacaacaatgaaccatttcttgatcagattgtgacgtgcgttggtaagtggattttatatgacaaccgctgatgaccagcttggtggttggactgagaagaagctccagagcacttcccaaagccaaacttctaccaaaatgttaatggtcactgtttgatggtctgctgccggtctgatccactacagctttctgagttccagcaaaaccattacatctgagaagtatgctcaacaaatctctgagatgcatggaaagctgcaacgcctgcagccagcattgatcaacataaagggcccagtccttcggcacaacaatgcctgacaatgcgtcgcacaaccaacgcttcaaaagttgaatgaattgggcacaaagttttgcctcatccaccgtattcacctgacttcttgccaactgactaccacttcttcaagcatctcagcaactttttgcagggaagatgtttccacaaccagaatgcagaaaaagctttccaagagtttatcgaatcccagatcacacatttttacactacaggaataaataaacttatttctcattggcaaaaatgtgttgattgtaatgtttcctattttgatgaataaagatgtgtttgagcct

SEQ ID NO: 10114 - protein, 104 aa, Homo sapiens; identical to SEQ ID NO: 10112

SEQ ID NO: 10115 - DNA, 1134 bp, Homo sapiens
gcgcggagcgggagggctctcctcacacaagcgcttccttgccgagaggctggagctgcggcaccgcaggcctgagccaccccttctctgctgtctccttctcttcctcagggctcccgtgtctgctcgccctccgacgctgctcagactatggaaatgatgttagacaaaaagcaaattcaagtgattttcttattcaagttcaaaatgggtcataaagcagcagagacaactcgcagcatcaacaatgcatttggcccagaaattgctaacaaaggtacagtgcagtggtggttcaagaacttttgcaaaggagacgagagccgtgaagatgaggagtgttgtgcccggccatcaaaagttggcaacgaccaattgagagcaatcatcgaagctgatcctcttacaacactagaagttgccgagaactcaacatcaaccatcctacggtcattcagcatttgaagcaaattagaaggttgtaaaagctcgataagtgggtgcctcatgagctgactgaaaataaaaacaatcgtcattttgaagtgttgtcttctcttactttgtgtaacaacaatgaaccatttcttgatcagattgtgacgtgcgttggtaagtggattttatatgacaaccgctgatgaccagcttggtggttggactgagaagaagctccagagcacttcccaaagccaaacttctaccaaaatgttaatggtcactgtttgatggtctgctgccggtctgatccactacagctttctgagttccagcaaaaccattacatctgagaagtatgctcaacaaatctctgagatgcatggaaagctgcaacgcctgcagccagcattgatcaacataaagggcccagtccttcggcacaacaatgcctgacaatgcgtcgcacaaccaacgcttcaaaagttgaatgaattgggcacaaagttttgcctcatccaccgtattcacctgacttcttgccaactgactaccacttcttcaagcatctcagcaactttttgcagggaagatgtttccacaaccagaatgcagaaaaagctttccaagagtttatcgaatcccagatcacacatttttacactacaggaataaataaacttatttctcattggc

SEQ ID NO: 10116 - protein, 104 aa, Homo sapiens; identical to SEQ ID NO: 10112

SEQ ID NO: 10117 - DNA, 379 bp, Homo sapiens
tcacacaagcgcttccttgccgagaggctggagctgcggcaccgcaggcctgagccaccccttctctgctgtctccttctcttcctcagggctcccgtgtctgctcgccctccgacgctgctcaggaatttgacaagaaactgaagttttgattcagatatattttgaattgaaaccagagatgttctagagtttagattctttcatttgattaagggccaaggttcagctttacgctcatgggctgcatgctctaactctgggtggcctggactgaatccacagctttgtccactgattcctcgaagctgagcccaggctgggctagaggggctgaggtactcccagactgctgacaacagcattccatgaggtatgg

SEQ ID NO: 10118 - protein, 47 aa, Homo sapiens
SHKRFLAERLELRHRRPEPPLLCCLLLFLRAPVSARPPTLLRNLTRN

SEQ ID NO: 10119 - DNA, 5037 bp, Homo sapiens
cacacaagcgcttccttgccgagaggctggagctgcggcaccgcaggcctgagccaccccttctctgctgtctccttctcttcctcagggctcccgtgtctgctcgccctccgacgctgctcaggaatttgacaagaaactgaagttttgattcagatatattttgaattgaaaccagagatgttctagagtttagattctttcatttgattaaggtatggtctgaatatgcgttgcttggcagctcgggtcaactataagactttgattattatctgcgcactcttcactttggtcacagtacttttgtggaataagtgttccagtgacaaagcaatccagtttccacggcgttcgagtagtggcttcagagtggatgggtttgaaaaaagagcagcagcatctgagagtaacaactatatgaaccacgtggccaaacaacagtctgaggaagcattccctcaggaacagcagaaagcaccccctgttgttgggggcttcaatagcaatgtgggaagtaaggtgttagggctcaaatatgaagaaattgactgtctcataaatgatgaacacacaattaaagggagacgagaggggaacgaagtctttcttccattcacttgggttgagaaatattttgatgtttatggaaaggtggttcagtatgatggctatgatcggtttgaattctctcatagctattccaaagtctatgcacagagagccccctatcaccccgatggtgtgtttatgtcttttgaaggctacaatgtggaagtccgagacagagtcaagtgcataagtggggttgaaggtgtgccattatctacacaatggggacctcaaggctatttctatccaatccagattgcacagtatggattaagtcattacagcaagaatctaactgagaaacctcctcacatagaggtatatgaaacagcagaagacagagacaaaaacaagcctaatgactggactgtgccaaagggctgctttatggcgaatgtggctgataagtctagattcaccaatgtcaaacagtttattgcaccagaaaccagtgaaggtgtatccttgcaactgggaaacacaaaagattttattatttcatttgacctcaagttcttgacaaatggaagtgtgtccgtggttctagagaccacagaaaagaatcagctcttcactatacattatgtctcaaatgctcagctaattgcttttaaagaaagagatatatactatggcattgggcccagaacttcatggagcacagttaccagggacctggtcactgacctcaggaaaggagtgggtctttcaaacacaaaagctgtcaagccaaccaaaataatgcccaagaaggtggttaggttgattgcaaaaggtaagggattcctcgacaacattaccatctctaccacagcccacatggctgcattttttgctgctagtgattggctagtaaggaaccaggatgagaaaggtggctggccaattatggtgacccgtaagttaggggaagggttcaagtctttagagccaggatggtattctgccatggcccaagggcaagccatttctacattagtcagggcctatctgttaacaaaagaccatatattcctcaattcagctttaagggcaacagccccttataagtttctatctgagcagcatggagttaaagctgtgtttatgaataaacatgactggtatgaagaatatccaaccacacctagctcttttgttttaaatggctttatgtattctttaattgggctgtatgacttaaaagaaactgcaggggaaaaactcggaaaagaagcaaggtccttgtatgagcgtggcatggaatctcttaaagccatgctgcccttgtatgacactggctcaggaaccatctatgacctccgtcacttcatgcttggcatcgctcctaacctggctcgctgggactatcataccacccacatcaatcagttgcagctactcagtaccattgatgagtccccagtcttcaaagaatttgtcaagaggtggaaaagctaccttaaaggcagcagggcaaagcacaactagagctcacaaccaaaactgcacttcagcctctgctgtacacagaaactacaggctctgtctcaggagagcataggcacattttaaaaggttatgtactaggtttttgtggattctatcaaagtgataagtgatccttaaaaccagccttctaaaataattgcattccatgggttgggtatttagaaatgtaggtggcatttagaacacaatgtttaatcaatgggctgaacaaagatgcttcactttgccttgcccatcaccctatacagtttcgcagatagtctagtcactctatgtgagaaagataatggtaagtagttgctactggccaactgtctagcacttacctgaaaacttagtatggagctcttttaaaatgtgattatttatatttatgttgaaagcggactttaaaaaaaataatgtgctgtaacacagtaaatatgtacttgtagcctggatagcagactgtgttcaactttttaaaaagatgtttcctttctaaagattaatttcttgggagcaaatgagtatttgttgcatttgttcaatttgttgtatatggtgaatatttaattatggttttcttgaaacgtgtaaattaaaaacacaatcagtgttcaggcttcagttatataatgtaagcacaactaaaatgaaacttgttgactgcacaagaaattacaaaaatgtttctgttttgaaacttgatctacaatcagtaaaagtttgataatcagtatatcccttcccaacccccattgtgacagtttctttttgtcactgtctagaattttgtattttatttcagactataccttggagttttgtatattttgagagagatatttttgggacattattttggaaacttattacaaatctaaatttggaaaggagctagtagctttaaggccaccaccatattttacttttttaggatttttccccctttaaataaaaatattagatcaaatactatatgcaagaaatcatagcaaagtttttttttcctaccaagatcattcttgatcatcagcttcccaaactagtaagtctgtgcatcattgggtgtttttttttaatttaattttaaattatcccagctattagatagaagggatgttactgcacttatgtgtaatcagatctttatttaggtatacatatcctcctataccgcacataaatagatttcagagcccccatacaatgggcagtgtctgctatagggcttcaggcattaaataaaaccgagggttgttgattttgctgtgacagtacactaaatcaatactatatcttatacagtttgaaaatatgataccctacactttcaggggaccgagtctgacaaacacaatacatttatctgtgacctatatcaagtacacatttaggagccaggtaggttacctgcttacacactatattttaattgaattcaaactatcaagcactacttagaaactggaaaacatatatatgttagcatcaaagggggcagaagcaaagaagatacagatctgcactgaagacattagactggccatagaaaagtaagcttgaactcccaattgatgtgaccacactcttcttaattttgttcacagtaaaaacacttttttgagttattaggcttacccctagcttttgacctttgcatttcatatatgttagatgtctcagcaagaatatctggtctcccctaatttttattcccagtgccgatgttcaaaataaactttctccagtctgggaaccttttttacttccccatatttgttattatttagaatggttcatacgtctgctttgtttgcatactggtcttcagattatgagactcgatgataacagtatggtactgcttctgtgacaaatatcgtgccttaacaatgtggctgtccttttccactgaagaaggaaagacgttttgatctagaaatagcgttgtgatttccttgctgttggttttacactgccttccacattgcaacagcaagttgatttcttgtgatcccagaattttctaagaggatgagttgaatctatagcagcattgtcagtacagaccagtggttctcaaactttaaaatgcctcagcatcacttgggagcttattgaaatgcagatcccagagtcagtaaatctgcctgtgaagtatgatagtctgcatttgtaatgagcattcaagtgattctgatgcaggtgagctgggggcatacagggaggaacactgccctggactatccattgcatttttgcctctaaacaactacagaattttctagggttttaaattatgtaaaatgtttacttattctgagcttagagagaatggggagggtatttttaaattttattgttttatttctttaagtttttctttgctttaagattataggtattaggtttgtttttgtttttccacttatcttgagttcactttgatgttaaatctattgctacttcagttgtaaaaccagccaaaagtttctggatgaaggtcaagtttgaccttttaggagttattgtacataaaggcttcatccacgaaccatccagcgcacagaagcaagtgcaaaaatgacacaagcacaactctccagacgtggctccttctcctttctcagtgcagactctcactgaaagctgctattttcatcctccttgtggttgcttttcttgtttctcttccattgtacatgtgggttatataccatatgttaaatatgcaataaagtgtttacaggatgcccttctgaagggtagtcctttgtaaagctgtacagactttgcagtttaagcacaatgtgcacatgttagttttatatacagcaaaacttgattttttgcagatggaaaggtattttgtttctatacaaagtaaatggattgtttgtgcttaatgtaaagccgctttataaaactgtaaaataaagtttttttctt

SEQ ID NO: 10120 - protein, 617 aa, Homo sapiens; identical to SEQ ID NO: 1615

SEQ ID NO: 10121 - DNA, 5057 bp, Homo sapiens
cacacaagcgcttccttgccgagaggctggagctgcggcaccgcaggcctgagccaccccttctctgctgtctccttctcttcctcagggctcccgtgtctgctcgccctccgacgctgctcaggaatttgacaagaaactgaagttttgattcagatatattttgaattgaaaccagagatgttctagagtttagattctttcatttgattaaggtatggtctgaatatgcgttgcttggcagctcgggtcaactataagactttgattattatctgcgcactcttcactttggtcacagtacttttgtggaataagtgttccagtgacaaagcaatccagtttccacggcgttcgagtagtggcttcagagtggatgggtttgaaaaaagagcagcagcatctgagagtaacaactatatgaaccacgtggccaaacaacagtctgaggaagcattccctcaggaacagcagaaagcaccccctgttgttgggggcttcaatagcaatgtgggaagtaaggtgttagggctcaaatatgaagaaattgactgtctcataaatgatgaacacacaattaaagggagacgagaggggaacgaagtctttcttccattcacttgggttgagaaatattttgatgtttatggaaaggtggttcagtatgatggctatgatcggtttgaattctctcatagctattccaaagtctatgcacagagagccccctatcaccccgatggtgtgtttatgtcttttgaaggctacaatgtggaagtccgagacagagtcaagtgcataagtggggttgaaggtgtgccattatctacacaatggggacctcaaggctatttctatccaatccagattgcacagtatggattaagtcattacagcaagaatctaactgagaaacctcctcacatagaggtatatgaaacagcagaagacagagacaaaaacaagcctaatgactggactgtgccaaagggctgctttatggcgaatgtggctgataagtctagattcaccaatgtcaaacagtttattgcaccagaaaccagtgaaggtgtatccttgcaactgggaaacacaaaagattttattatttcatttgacctcaagttcttgacaaatggaagtgtgtccgtggttctagagaccacagaaaagaatcagctcttcactatacattatgtctcaaatgctcagctaattgcttttaaagaaagagatatatactatggcattgggcccagaacttcatggagcacagttaccagggacctggtcactgacctcaggaaaggagtgggtctttcaaacacaaaagctgtcaagccaaccaaaataatgcccaagaaggtggttaggttgattgcaaaaggtaagggattcctcgacaacattaccatctctaccacagcccacatggctgcattttttgctgctagtgattggctagtaaggaaccaggatgagaaaggtggctggccaattatggtgacccgtaagttaggggaagggttcaagtctttagagccaggatggtattctgccatggcccaagggcaagccatttctacattagtcagggcctatctgttaacaaaagaccatatattcctcaattcagctttaagggcaacagccccttataagtttctatctgagcagcatggagttaaagctgtgtttatgaataaacatgactggtatgaagaatatccaaccacacctagctcttttgttttaaatggctttatgtattctttaattgggctgtatgacttaaaagaaactgcaggggaaaaactcggaaaagaagcaaggtccttgtatgagcgtggcatggaatctcttaaagccatgctgcccttgtatgacactggctcaggaaccatctatgacctccgtcacttcatgcttggcatcgctcctaacctggctcgctgggactatcataccacccacatcaatcagttgcagctactcagtaccattgatgagtccccagtcttcaaagaatttgtcaagaggtggaaaagctaccttaaaggcagcagggcaaagcacaactagagctcacaaccaaaactgcacttcagcctctgctgtacacagaaactacaggctctgtctcaggagagcataggcacattttaaaaggttatgtactaggtttttgtggattctatcaaagtgataagtgatccttaaaaccagccttctaaaataattgcattccatgggttgggtatttagaaatgtaggtggcatttagaacacaatgtttaatcaatgggctgaacaaagatgcttcactttgccttgcccatcaccctatacagtttcgcagatagtctagtcactctatgtgagaaagataatggtaagtagttgctactggccaactgtctagcacttacctgaaaacttagtatggagctcttttaaaatgtgattatttatatttatgttgaaagcggactttaaaaaaaataatgtgctgtaacacagtaaatatgtacttgtagcctggatagcagactgtgttcaactttttaaaaagatgtttcctttctaaagattaatttcttgggagcaaatgagtatttgttgcatttgttcaatttgttgtatatggtgaatatttaattatggttttcttgaaacgtgtaaattaaaaacacaatcagtgttcaggcttcagttatataatgtaagcacaactaaaatgaaacttgttgactgcacaagaaattacaaaaatgtttctgttttgaaacttgatctacaatcagtaaaagtttgataatcagtatatcccttcccaacccccattgtgacagtttctttttgtcactgtctagaattttgtattttatttcagactataccttggagttttgtatattttgagagagatatttttgggacattattttggaaacttattacaaatctaaatttggaaaggagctagtagctttaaggccaccaccatattttacttttttaggatttttccccctttaaataaaaatattagatcaaatactatatgcaagaaatcatagcaaagtttttttttcctaccaagatcattcttgatcatcagcttcccaaactagtaagtctgtgcatcattgggtgtttttttttaatttaattttaaattatcccagctattagatagaagggatgttactgcacttatgtgtaatcagatctttatttaggtatacatatcctcctataccgcacataaatagatttcagagcccccatacaatgggcagtgtctgctatagggcttcaggcattaaataaaaccgagggttgttgattttgctgtgacagtacactaaatcaatactatatcttatacagtttgaaaatatgataccctacactttcaggggaccgagtctgacaaacacaatacatttatctgtgacctatatcaagtacacatttaggagccaggtaggttacctgcttacacactatattttaattgaattcaaactatcaagcactacttagaaactggaaaacatatatatgttagcatcaaagggggcagaagcaaagaagatacagatctgcactgaagacattagactggccatagaaaagtaagcttgaactcccaattgatgtgaccacactcttcttaattttgttcacagtaaaaacacttttttgagttattaggcttacccctagcttttgacctttgcatttcatatatgttagatgtctcagcaagaatatctggtctcccctaatttttattcccagtgccgatgttcaaaataaactttctccagtctgggaaccttttttacttccccatatttgttattatttagaatggttcatacgtctgctttgtttgcatactggtcttcagattatgagactcgatgataacagtatggtactgcttctgtgacaaatatcgtgccttaacaatgtggctgtccttttccactgaagaaggaaagacgttttgatctagaaatagcgttgtgatttccttgctgttggttttacactgccttccacattgcaacagcaagttgatttcttgtgatcccagaattttctaagaggatgagttgaatctatagcagcattgtcagtacagaccagtggttctcaaactttaaaatgcctcagcatcacttgggagcttattgaaatgcagatcccagagtcagtaaatctgcctgtgaagtatgatagtctgcatttgtaatgagcattcaagtgattctgatgcaggtgagctgggggcatacagggaggaacactgccctggactatccattgcatttttgcctctaaacaactacagaattttctagggttttaaattatgtaaaatgtttacttattctgagcttagagagaatggggagggtatttttaaattttattgttttatttctttaagtttttctttgctttaagattataggtattaggtttgtttttgtttttccacttatcttgagttcactttgatgttaaatctattgctacttcagttgtaaaaccagccaaaagtttctggatgaaggtcaagtttgaccttttaggagttattgtacataaaggcttcatccacgaaccatccagcgcacagaagcaagtgcaaaaatgacacaagcacaactctccagacgtggctccttctcctttctcagtgcagactctcactgaaagctgctattttcatcctccttgtggttgcttttcttgtttctcttccattgtacatgtgggttatataccatatgttaaatatgcaataaagtgtttacaggatgcccttctgaagggtagtcctttgtaaagctgtacagactttgcagtttaagcacaatgtgcacatgttagttttatatacagcaaaacttgattttttgcagatggaaaggtattttgtttctatacaaagtaaatggattgtttgtgcttaatgtaaagccgctttataaaactgtaaaataaagtttttttcttaaaaagaatatacctggata

SEQ ID NO: 10122 - protein, 617 aa, Homo sapiens; identical to SEQ ID NO: 1615

SEQ ID NO: 10123 - DNA, 942 bp, Homo sapiens
ccattcacttgggttgagaaatattttgatgtttatggaaaggtggttcagtatgatggctatgatcggtttgaattctctcatagctattccaaagtctatgcacagagagccccctatcaccccgatggtgtgtttatgtcttttgaaggctacaatgtggaagtccgagacagagtcaagtgcataagtggggttgaaggtgtgccattatctacacaatggggacctcaaggctatttctatccaatccagattgcacagtatggattaagtcattacagcaagaatctaactgagaaacctcctcacatagaggtatatgaaacagcagaagacagagacaaaaacaagcctaatgactggactgtgccaaagggctgctttatggcgaatgtggctgataagtctagattcaccaatgtcaaacagtttattgcaccagtctgaacctgagtccgggaaacctggattctagtccctgctctacaactaattagcttttggcattgggcaaaccatttaaccttgcaaagcctacatatcttcacctctaaaatggagatgtaatataataattcctgccctaccagcttcagaagattaagtatcaagtgagataatacatgtgaatgcgttttggacatttaagctgtgaaaagatcaagataggaagatttccctttaatattttaaaatttgtactacgtatatttttgttgttcttattcttgctgctgctactgctattttaatatgctcagtttcttggtagatctagatgagcagtattcaaaatgtcatctttctgggaattagccatcattaatactataaatattcaagagaaattttctctttaataatttgtcaaataaaacagctttaactttttgacctctgaagccagtggcttcggaataataaccatcatttattact

SEQ ID NO: 10124 - protein, 103 aa, Homo sapiens
MSFEGYNVEVRDRVKCISGVEGVPLSTQWGPQGYFYPIQIAQYGLSHYSKNLTEKPPHIEVYETAEDRDKNKPNDWTVPKGCFMANVADKSRFTNVKQFIAPV

SEQ ID NO: 10125 - DNA, 571 bp, Homo sapiens
cacatggcagagccggtgcgctggctgtatggagtgaggactaatggggaatcaaggacgtccagctgtggatggcagaagggccactgtctgaagtgggaagtctggacattcccaaaggagtctttgaaagactgggtcttctcctgagcctgagagcagtgcttcttccaatggcactgcttccattttaagcatcagcatggcccgggagcttgttggaatgaagaatctccagctccacccgaaacctgctgaatcagaaccagcatttaacacgtcaccaggatcccaggtcacttggctgtccttggctcaactgtgagtaaggaggagtcctgcggaatgaaaaatgactacccagatttgccaccaaaatccagcaggagtgccttagaaagcagggtaacatactcacaggatctgtggatcaggacgtgaacatctctggaagccattatctaccccacaccatctctctagcacttagtacacggcctgtacagagcagatgctcggcaaggatctggagaaagaaagaatgaatgaataaataaacaaagaaatcagg

SEQ ID NO: 10126 - protein, 40 aa, Homo sapiens
MARELVGMKNLQLHPKPAESEPAFNTSPGSQVTWLSLAQL

SEQ ID NO: 10127 - DNA, 530 bp, Homo sapiens
ctccgattcagttctgacactctctacctaaagaccgcgtccgatcccagaggttgagggctctgggtgtcctccgattcagttctgacactctctacctaaagaccgcgtcagatcccagaggttgagggctcagtctcacaagactgccccccgacttccgccgccaaccgcaagcccctggttgttttacctgtgcttctgaccaagcaggacatcatgacctccagtgtgcattcaacctaacagagctgctaaactcattgcctttctgctctgcctctcctctctcctgcaacaccctctctgtctcataaatatagtcacaattttctcatggtttaagccaagaaacagttaaaaactctaaagtcttttatccaatgcattaaaaaactgagatactaaattagataagttgttatccggtagaactcacgaaagaatcaaatgttctcgacaaaatttagaacaaaatttgaccctggaaaatggaggtgatagaaataaagtccacaaaaggaaacttg

SEQ ID NO: 10128 - protein, 62 aa, Homo sapiens
GLSLTRLPPDFRRQPQAPGCFTCASDQAGHHDLQCAFNLTELLNSLPFCSASPLSCNTLSVS

SEQ ID NO: 10129 - DNA, 421 bp, Homo sapiens
gtggtaggatcaagacactgttttctgttccagctcattttgcgaacaatgttatgtcacaggtcacttggctgtccttggctcaactgtgagtaaggaggagtcctgcggaatgaaaaatgactacccagatttgccaccaaaatccagcaggagtgccttagaaagcagagacgagaggacacagacacacagagacagcatgtgaagacaggcaagattgtgtgatgctgccacgagcccagggatgctgggaaccagaagctggaagagacaaggaaggattctccctctcagggttattgtggtgaccacagaatgcatttggaagtggctttgtaaactgcagagtgataagccaattcaatatttggagttgtgttttatcttccaaaggcctcagtaaacatttgtagaactg

SEQ ID NO: 10130 - protein, 31 aa, Homo sapiens
MKNDYPDLPPKSSRSALESRDERTQTHRDSM

SEQ ID NO: 10131 - DNA, 4257 bp, Homo sapiens
cgcgagtccggggtcgccgcagcccgggaggagtgtctggtctccggcctgcctgtgctgtccccgcgccctgtccactggactcccgagacccttggaacccaggacaccattggagaaactgggcattttaccaaggatttgactggaatggcatgcttcctttaaagatgaaagttgacttttagagccaattaaagccctttggggaatctggcctcataccttgtccacacagagttcctgtacaaggttcctgacctgtgggaagcggcacagcaccagctaggcagagacgccccaggccatgttagagctttgagtgaggcctggtaacagggaggcgctgtcacctactggccttgccaatccagctccaagatgctgagcctgaagctccccaggctgtttagcatagaccagataccccaggtgttccatgagcaaggcatcctgttcggctaccgccatccacagagttctgccactgcctgcatcctcagccttttccaaatgaccaatgagactctcaacatttggactcacttgctgcccttctggttctttgcatggaggtttgtgactgcactgtatatgacagacatcaagaatgacagctactcctggcccatgcttgtgtacatgtgcaccagctgcgtgtacccacttgtgtccagctgtgcgcacaccttcagctctatgtccaagaatgcccggcacatttgctacttcctggactatggtgccgtcaacctcttcagcctgggctcagccattgcctactctgcatacacgttcccggatgcgctcatgtgcaccactttccatgactactacgtggccctggctgtactgaacaccatcctcagcacaggcctctcctgctactccaggtttcttgaaatccagaagcccagactctgtaaggtgattcgtgtcctcgcctttgcttatccgtacacctgggactccctccccatcttctacaggctattcctgttcccaggggagagtgcacaaaatgaagccacctcgtaccaccagaagcacatgatcatgaccctcctggcctctttcttgtactctgcacatctgccagaacgcctagcccctggacgctttgactacatcggtcacagtcaccagctgtttcacgtgtgtgtgatcctggccacgcacatgcagatggaagccatacttctggacaagactctgaggaaggaatggctcctggccacctccaagcccttctctttctctcagatagctggagccatacttctgtgcatcatcttcagcctcagcaacataatttatttctcagctgctctgtatcggattcccaagccagaattacataaaaaagaaacatgactcagaccataagcttttcatgccagatgtcaacattaagctgcaacatcctaaccaccataagccggaggtggttacagcttatcatggcctaaaatattcataatggttggtgtcttttgaatgaattcatgtcaaaaatgttattcagctggggaaatttctctaaatgtacactgattctgtgtgtgtgattttaaaaggagaatatggttcaagcaagtccttgttaaggcaaactattgatatttcattaattttaaatttacttaaaatgtggttttaaattctatttaaacatttggattaagcatattactctggagctttgtattattctttaaaaatgaatcttgcttcatttgatgaatttcatgtcacaaagcttctctcaagagctctcgtagtggcctgtcaaccactttcggagaatgagccaggtcagtcactgggaggacctgtgaaagaaagttggtcactgagtgccttggggactggcaaaacattccagaatgaagagagctgtctggggagagcccttcttcccttctccacctagtgaagggagaacagaaggggagtcctctcttcccacaagtccattctgccttcaaagtgtaagttctcatgtcattatggatttggagtttgtcagtttttttcttaaaagtccacagcggggtgtcatgtgttctgttatgttctgttttctggttgccagtttgatctgcaaagtatttttcagtgcaggtaaaatgtgttaaaccataagagttgactgagttaatcccaattggttgtgctcatatgccaccttttaaaccaatggaaattgctatatttggggatgtcatacatttgatattgcttcagcatttcaaatatgttgcaaaatttagtatccatatgcataagaagttaatcaccttgccagtggggtggtcacatatagtgttctcaagctttactgtgaatcagaaacatccagtaagcttgtgacaaatgcagactcctagggaaaaccagggggttctgcttcactaggttaaatgtaggttttgtagaggagatctgcactggagcaagtctcccagatgattctaatacaggagggccagaggccaaacttgaagaactgctggtgttacatgttccaaaaggcattagacctatcagctttgtttcgcctgatctcaagttttagcaactcaccaactaaggcgtaacctcattttatgttccagcgttttctactctgaatagttctaaaacactgagcattttctcatttgttgcattactgattaaagttcagtatttcatggtgttttcagggaacacagaaatgcggatgcaaaacaacttttgacagaggcccatcaaacccagatctgcacttggtaatgacttaggggggcttcctcacaatgcaggatcctctttgctgactcaggaatactccatattttagactactgcctctaccattaactagcccagacatttgaatggccttgtaaacagctcactgtctaatactcgaaggacaagtaacaatttatattggatgagagtggtcaagaaatatgatttcgttagttttattatctgtttacttcctctggggaaggcagactgataaaattatatgggctggtaaatttttggtacattaattgcaagctgcatgacaaaatttgtttttctggcaacaatctgacattattagtggaattccacaccaacagggcttgtgagcttccatttcatcttactgtaacttcaattttatggcaaaaaaaggtacaaagtttaaatacccctttctagtaatgccaaagacatacagtgttttacattctctcctttataggtaacaaaataatgtttagctcagtaagtactgaaataatgagtgaccaatttgaaggatttttagattatttaatctttgcttatgttgctttttcacatgcttaatgatggaaatgaaatgttaaatcaacaaaataagatccagtgtttcataacatttttataagtttggtaaactttagtcccattatatacttttggggacagtgttataaatcagaattttacgacagtttgcagaacactgatttgaaagcttcctatgcaaaatgagaaggggttcaaatatattaattatcattaagtattaaataataggcattagatgtctaatgtgagtataatttcatccaagccatctcagaaagtctaaaaggttggcagggggtcagctgaagacctcactggagtgggtcttaatttttaaaaagtgtctcactacatttaagacatgtgacacattcccattggtaacaattgctcaccatggcattgtctcaaaaaagactatggtggggagggtggcacattcctaatgggatgtacctctccccactccccttgcttgagaagcactactcaaaaatttaccagaccttacaactgtgataaaacttgaatgtgtatgatgaataaggccattcagttaactttacctccctttacccattgaaggggttccttttccattgctcagtttttagaaaataattctcatcttttttctaaagaaatgaatttgtggctggtctgaaggtagtgagttagctcaattgattgttcgcagtcagttatagatcaagctccttgttctactcttcccctcttctcactactgcacttgactagtcttaaaacaaagaaagaacgaatgaatgaatgaatctgtggctggatgcagtggctcatgcctgtaatcccagcactttgggaggctgaagtgggaggactgcttgggcccaagaattcaggaccagtctgggcaacagagccagacactgtctctat

SEQ ID NO: 10132 - protein, 330 aa, Homo sapiens
MLSLKLPRLFSIDQIPQVFHEQGILFGYRHPQSSATACILSLFQMTNETLNIWTHLLPFWFFAWRFVTALYMTDIKNDSYSWPMLVYMCTSCVYPLVSSCAHTFSSMSKNARHICYFLDYGAVNLFSLGSAIAYSAYTFPDALMCTTFHDYYVALAVLNTILSTGLSCYSRFLEIQKPRLCKVIRVLAFAYPYTWDSLPIFYRLFLFPGESAQNEATSYHQKHMIMTLLASFLYSAHLPERLAPGRFDYIGHSHQLFHVCVILATHMQMEAILLDKTLRKEWLLATSKPFSFSQIAGAILLCIIFSLSNIIYFSAALYRIPKPELHKKET

SEQ ID NO: 10133 - DNA, 1045 bp, Homo sapiens
gcaactttgtccctttacgtagaattcttatgcatccctctgggggtaagaattggaattggaattatttggaaactttaatcttcattgtctcctctctctccttaccactccatggggcagctatgtattgagggaagagaaggtgcttttctgggcctcaatttcctcatctgtaaaatgagagcaacagaccctgtgtggttttaggagatagtaagtggttccaaaggactctgtgggctgcaaatcaaactgtaagagcggattgttattttctcatgtgtattagcctggcctccctggttggcggtaagtcctttctcagcatcattcttgactcctaacaaggatgcagcagagtaagagctttagacccagagtctctaagctggactaatccttagcagccatgtccccctgcttcttctttgcttcattttccatggctcacatccccttctgatggcctatagatttcactccttaatcttgtttgccatctgtcctccctgttagaatagcagctctgtgagggcaaagccttttgtctctctcgttccatggtctctcccaagagatcagagtgtagtaggtgctcagttaacacgtgctgagtagatgaacacatccaatgcaccatttctcagtatacagatggggagactgagacccagaggcgaggagtgactcttggaggcagagctggagcttttcctaattagactcaagttaattcaaatttgggtctctgtctcccactttgaattaccttggttgctaggggtgcttaagaggcccttggcaagaaccttcaggccagctgcctccagagttacccaaaggggcagctcccagactgaatggacagccgccacatgaggcgattggtgagttccaggaaggagtcatccccaccagacctccatcctcaaagaaaacctcccagggttgctctcccaaggcagccaattcctctgctagtgagttctctcttggtgaaaatagtgccctcttcaggcagccttttaaaattccccagtgc

SEQ ID NO: 10134 - protein, 59 aa, Homo sapiens
MDSRHMRRLVSSRKESSPPDLHPQRKPPRVALPRQPIPLLVSSLLVKIVPSSGSLLKFP

SEQ ID NO: 10135 - DNA, 2343 bp, Homo sapiens
agcttaacaagaccatggcctctggacccgcgatcagctcgctgtgtggtcctgagcagccacccaacatctctgggccttggattcctacctggcctttcttctggatgcatcatttttgcctttaggtatctggaccattcccccccatggatgataaagtctttgcttcacaccctcaggattaccttaaaggcctgaaaagaacagaggaggagtctgaggaggtgaattccagccgtgctcttgcaggctggctgggcagtgtgctggggaggagagggagcctctggctgggcctcctccaccgggcctggtgtgctgggaacaccccgcattgtcccaaggcctcagatttgactttcaaagggaaaacagctctcctgataaaggacaccattggagaaactgggcattttaccaaggatttgactggaatggcatgcttcctttaaagatgaaagttgacttttagagccaattaaagccctttggggaatctggcctcataccttgtccacacagagttcctgtacaaggttcctgacctgtgggaagcggcacagcaccagctaggcagagacgccccaggccatgttagagctttgagtgaggcctggtaacagggaggcgctgtcacctactggccttgccaatccagctccaagatgctgagcctgaagctccccaggctgtttagcatagaccagataccccaggtgttccatgagcaaggcatcctgttcggctaccgccatccacagagttctgccactgcctgcatcctcagccttttccaaatgaccaatgagactctcaacatttggactcacttgctgcccttctggttctttgcatggaggtttgtgactgcactgtatatgacagacatcaagaatgacagctactcctggcccatgcttgtgtacatgtgcaccagctgcgtgtacccacttgtgtccagctgtgcgcacaccttcagctctatgtccaagaatgcccggcacatttgctacttcctggactatggtgccgtcaacctcttcagcctgggctcagccattgcctactctgcatacacgttcccggatgcgctcatgtgcaccactttccatgactactacgtggccctggctgtactgaacaccatcctcagcacaggcctctcctgctactccaggtttcttgaaatccagaagcccagactctgtaaggtgattcgtgtcctcgcctttgcttatccgtacacctgggactccctccccatcttctacaggctattcctgttcccaggggagagtgcacaaaatgaagccacctcgtaccaccagaagcacatgatcatgaccctcctggcctctttcttgtactctgcacatctgccagaacgcctagcccctggacgctttgactacatcggtcacagtcaccagctgtttcacgtgtgtgtgatcctggccacgcacatgcagatggaagccatacttctggacaagactctgaggaaggaatggctcctggccacctccaagcccttctctttctctcagatagctggagccatacttctgtgcatcatcttcagcctcagcaacataatttatttctcagctgctctgtatcggattcccaagccagaattacataaaaaagaaacatgactcagaccataagcttttcatgccagatgtcaacattaagctgcaacatcctaaccaccataagccggaggtggttacagcttatcatggcctaaaatattcataatggttggtgtcttttgaatgaattcatgtcaaaaatgttattcagctggggaaatttctctaaatgtacactgattctgtgtgtgtgattttaaaaggagaatatggttcaagcaagtccttgttaaggcaaactattgatatttcattaattttaaatttacttaaaatgtggttttaaattctatttaaacatttggattaagcatattactctggagctttgtattattctttaaaaatgaatcttgcttcatttgatgaatttcatgtcacaaagcttctctcaagagctctcgtagtggcctgtcaaccactttcggagaatgagccaggtcagtcactgggaggacctgtgaaagaaagttggtcactgagtgccttggggactggcaaaacattccagaatgaagagagctgtctggggagagcccttcttcccttctccacctagtgaagggagaacagaaggggagtcctctcttcccacaagtccattctgccttcaaagtgtaagttctcatgtcattatggatttggagtttgtcagtttttttcttaaaagtccacagcgggg

SEQ ID NO: 10136 - protein, 330 aa, Homo sapiens; identical to SEQ ID NO: 10132

SEQ ID NO: 10137 - DNA, 4415 bp, Homo sapiens
agcttaacaagaccatggcctctggacccgcgatcagctcgctgtgtggtcctgagcagccacccaacatctctgggccttggattcctacctggcctttcttctggatgcatcatttttgcctttaggtatctggaccattcccccccatggatgataaagtctttgcttcacaccctcaggattaccttaaaggcctgaaaagaacagaggaggagtctgaggaggtgaattccagccgtgctcttgcaggctggctgggcagtgtgctggggaggagagggagcctctggctgggcctcctccaccgggcctggtgtgctgggaacaccccgcattgtcccaaggcctcagatttgactttcaaagggaaaacagctctcctgataaaggacaccattggagaaactgggcattttaccaaggatttgactggaatggcatgcttcctttaaagatgaaagttgacttttagagccaattaaagccctttggggaatctggcctcataccttgtccacacagagttcctgtacaaggttcctgacctgtgggaagcggcacagcaccagctaggcagagacgccccaggccatgttagagctttgagtgaggcctggtaacagggaggcgctgtcacctactggccttgccaatccagctccaagatgctgagcctgaagctccccaggctgtttagcatagaccagataccccaggtgttccatgagcaaggcatcctgttcggctaccgccatccacagagttctgccactgcctgcatcctcagccttttccaaatgaccaatgagactctcaacatttggactcacttgctgcccttctggttctttgcatggaggtttgtgactgcactgtatatgacagacatcaagaatgacagctactcctggcccatgcttgtgtacatgtgcaccagctgcgtgtacccacttgtgtccagctgtgcgcacaccttcagctctatgtccaagaatgcccggcacatttgctacttcctggactatggtgccgtcaacctcttcagcctgggctcagccattgcctactctgcatacacgttcccggatgcgctcatgtgcaccactttccatgactactacgtggccctggctgtactgaacaccatcctcagcacaggcctctcctgctactccaggtttcttgaaatccagaagcccagactctgtaaggtgattcgtgtcctcgcctttgcttatccgtacacctgggactccctccccatcttctacaggctattcctgttcccaggggagagtgcacaaaatgaagccacctcgtaccaccagaagcacatgatcatgaccctcctggcctctttcttgtactctgcacatctgccagaacgcctagcccctggacgctttgactacatcggtcacagtcaccagctgtttcacgtgtgtgtgatcctggccacgcacatgcagatggaagccatacttctggacaagactctgaggaaggaatggctcctggccacctccaagcccttctctttctctcagatagctggagccatacttctgtgcatcatcttcagcctcagcaacataatttatttctcagctgctctgtatcggattcccaagccagaattacataaaaaagaaacatgactcagaccataagcttttcatgccagatgtcaacattaagctgcaacatcctaaccaccataagccggaggtggttacagcttatcatggcctaaaatattcataatggttggtgtcttttgaatgaattcatgtcaaaaatgttattcagctggggaaatttctctaaatgtacactgattctgtgtgtgtgattttaaaaggagaatatggttcaagcaagtccttgttaaggcaaactattgatatttcattaattttaaatttacttaaaatgtggttttaaattctatttaaacatttggattaagcatattactctggagctttgtattattctttaaaaatgaatcttgcttcatttgatgaatttcatgtcacaaagcttctctcaagagctctcgtagtggcctgtcaaccactttcggagaatgagccaggtcagtcactgggaggacctgtgaaagaaagttggtcactgagtgccttggggactggcaaaacattccagaatgaagagagctgtctggggagagcccttcttcccttctccacctagtgaagggagaacagaaggggagtcctctcttcccacaagtccattctgccttcaaagtgtaagttctcatgtcattatggatttggagtttgtcagtttttttcttaaaagtccacagcggggtgtcatgtgttctgttatgttctgttttctggttgccagtttgatctgcaaagtatttttcagtgcaggtaaaatgtgttaaaccataagagttgactgagttaatcccaattggttgtgctcatatgccaccttttaaaccaatggaaattgctatatttggggatgtcatacatttgatattgcttcagcatttcaaatatgttgcaaaatttagtatccatatgcataagaagttaatcaccttgccagtggggtggtcacatatagtgttctcaagctttactgtgaatcagaaacatccagtaagcttgtgacaaatgcagactcctagggaaaaccagggggttctgcttcactaggttaaatgtaggttttgtagaggagatctgcactggagcaagtctcccagatgattctaatacaggagggccagaggccaaacttgaagaactgctggtgttacatgttccaaaaggcattagacctatcagctttgtttcgcctgatctcaagttttagcaactcaccaactaaggcgtaacctcattttatgttccagcgttttctactctgaatagttctaaaacactgagcattttctcatttgttgcattactgattaaagttcagtatttcatggtgttttcagggaacacagaaatgcggatgcaaaacaacttttgacagaggcccatcaaacccagatctgcacttggtaatgacttaggggggcttcctcacaatgcaggatcctctttgctgactcaggaatactccatattttagactactgcctctaccattaactagcccagacatttgaatggccttgtaaacagctcactgtctaatactcgaaggacaagtaacaatttatattggatgagagtggtcaagaaatatgatttcgttagttttattatctgtttacttcctctggggaaggcagactgataaaattatatgggctggtaaatttttggtacattaattgcaagctgcatgacaaaatttgtttttctggcaacaatctgacattattagtggaattccacaccaacagggcttgtgagcttccatttcatcttactgtaacttcaattttatggcaaaaaaaggtacaaagtttaaatacccctttctagtaatgccaaagacatacagtgttttacattctctcctttataggtaacaaaataatgtttagctcagtaagtactgaaataatgagtgaccaatttgaaggatttttagattatttaatctttgcttatgttgctttttcacatgcttaatgatggaaatgaaatgttaaatcaacaaaataagatccagtgtttcataacatttttataagtttggtaaactttagtcccattatatacttttggggacagtgttataaatcagaattttacgacagtttgcagaacactgatttgaaagcttcctatgcaaaatgagaaggggttcaaatatattaattatcattaagtattaaataataggcattagatgtctaatgtgagtataatttcatccaagccatctcagaaagtctaaaaggttggcagggggtcagctgaagacctcactggagtgggtcttaatttttaaaaagtgtctcactacatttaagacatgtgacacattcccattggtaacaattgctcaccatggcattgtctcaaaaaagactatggtggggagggtggcacattcctaatgggatgtacctctccccactccccttgcttgagaagcactactcaaaaatttaccagaccttacaactgtgataaaacttgaatgtgtatgatgaataaggccattcagttaactttacctccctttacccattgaaggggttccttttccattgctcagtttttagaaaataattctcatcttttttctaaagaaatgaatttgtggctggtctgaaggtagtgagttagctcaattgattgttcgcagtcagttatagatcaagctccttgttctactcttcccctcttctcactactgcacttgactagtcttaaaacaaagaaagaacgaatgaatga

SEQ ID NO: 10138 - protein, 330 aa, Homo sapiens; identical to SEQ ID NO: 10132

SEQ ID NO: 10139 - DNA, 406 bp, Homo sapiens
gacaccattggagaaactgggcattttaccaaggatttgactggaatggcatgcttcctttaaagatgaaagttgacttttagagccaattaaagccctttggggaatctggcctcataccttgtccacacagagttcctgtacaaggttcctgacctgtggtaagcatgagccacactgcacccagtccatgctaccctttttatatgaaacacctattaacacggtacaacaacacttcaaaacatattatttgaatttcggcctctgattttctagtcaacaatccattaaggcaaagacctgtttccaaactcagatgttctccaacttacactaatgtctggttttcttgaactatgtgagagaaaaaaataaacagaatttatttattatcataaagtca

SEQ ID NO: 10140 - protein, 32 aa, Homo sapiens
ISASDFLVNNPLRQRPVSKLRCSPTYTNVWFS

SEQ ID NO: 10141 - DNA, 1329 bp, Homo sapiens
aagtccttctggctgcggttaaaagggctcaccagcctctccctgaagtcttggcccgggagcctgtgtcctccaggtagctgtgctgtggggagctggagaggactgaagagctgaggaggcgaaatgcagaaatgataatgcctcacaagctggttgtacagattgaataacaatgtgaacagagcaccgagtataatccctgaaacagcaaaccagaggtcccgtctggctggcatgaatggaagggcaaacgctccgaccaaattgctctgggaatgtcattctaattattggatcctgacccagcagcatgctgataagctctgggttggagacgccctatctcagaggagctccaaacctgctcaaggccttttcttgccctctgcaactttcctgccaagcaattagcctccagggaagaagaggaaattggaacacggacacgcacagaggaaagaccaagtgaagatacagtgagaagatggccaacgacaagccgaggaacagggtctcagaggaccccaaccctgctgacaccttgatctcgggctttcagcttccagcactgtggcaaaattcatttctactgtttaggcctcccggtctgtgacatgttgtcacggtggccactgaagactcagacagcttccttctagctctggttcttctaccggtgtgctttcaggtgctccggagggcccggtggcagggaaagccaggtctccaggctcctggcccagggcgtgtttaggaggcagggccttctctgacacaagtatgaggagcagagaggtttctcttcttcagtctccactaggtcctggcctccatggcttctataggcagggacctggccagggcattcaccagagactttgacagggagtccaggcccagaccccataggcagagccaggagccctgtgccagcttcccagggagcaccggggcccaacgtagagtcaagagctggcatcagcacaggtgcaaggtggggttgggaagggcatggcagcttgggggtctgcagtgcacaggtggcctggcatgaggtaggtgggccggcttgaaggtctagaagatggatagacaccagagacttgtagtctatgtctccttcttgctgtcccctggatgtcacctcccctctgcccccagtgctgaactaacccccttcatcttttacttgggactccatcagtgactcatcattgcttttggtgtgacttaccagcggccgctccgtctgcctcttccttcccctccagggtcattttgaacactcttccttcctgacaactaaacttttcactgtttcccatc

SEQ ID NO: 10142 - protein, 52 aa, Homo sapiens
MLISSGLETPYLRGAPNLLKAFSCPLQLSCQAISLQGRRGNWNTDTHRGKTK

SEQ ID NO: 10143 - DNA, 763 bp, Homo sapiens
cttctggctgcggttaaaagggctcaccagcctctccctgaagtcttggcccgggagcctgtgtcctccaggtagctgtgctgtggggagctggagaggactgaagagctgaggaggcgaaatgcagaaatgataatgcctcacaagctggttgtacagattgaataacaatgtgaacagagcaccgagtataatccctgaaacagcaaaccagaggtcccgtctggctggcatgaatggaagggcaaacgctccgaccaaattgctctgggaatgtcattctaattattggatcctgacccagcagcatgctgataagctctgggttggagacgccctatctcagaggagctccaaacctgctcaaggccttttcttgccctctgcaactttcctgccaagcaattagcctccaggggtatctgagagcgggagactgggaggagcggggtccctcggggttgaagtggggagggctaacgggctggggatgccccctgttgtgtttccagggaaagcctgtccagattgccgttgccttctttaccttcagtgtcagagttggggtccagcctgtattgtggggagtaggaaaagcttttcttgttgagccctgggcttctgttaggggttgaattatgtccctccccacactccacattcatatgttgaagccctaacccctagttcctcagaatgtaactgtatttggagatacagtctttaaagaggtcattacattaaaatgaggtcactggggtgg

SEQ ID NO: 10144 - protein, 108 aa, Homo sapiens [sequence omitted]

SEQ ID NO: 10145 - DNA, 6723 bp, Homo sapiens
agaactgacctgaagtttcagtgtagtcagagagctcttcaagtaataaatcatggagaccagtcaggaaacttccctcttcttggtgaagatcttggaggaactggacagcaagcaaaataccgtttcttatcaggacctgtgcaaatctctctgtgcccggttcgacctgtcgcagcttgccaaactgagaagtgtgctcttctacacagcttgtctcgatcccaattttccagccacgctattcaaagacaagatgaaatgcactgtgaataaccagcaatcaaagaaaatcatggtggcagcagatattgtgacgatattcaacctgatccaaatgaatggcggggctgccaaggagaagctgcccacgggccgccagaaggtacgcaagaaggaggcatcctttgaatcatgtaggtcggacacagagatctgcaatgcagctgagtgtgagcccctgaactgtgagctgagtgagaggtctttcagccggggctaccccatcaggcagtcgtccaagtgccggaagatggactgcaaggactgcccacagtttgtccctgcctctgagcctaacttcctgttgggagttagcaaagaggtgaaaaaccgcgccgcttccctggacaggttgcaggccctggctccgtactctgtgaccagccctcagccctgtgagatgcagaggacctacttccccatgaacatcgaaaacgagtccatttcagaccaggactccctgcccatcaatcagagcatcaaggagaccttcatttccaatgaggagccatttgtggtccagtcctgtgtccagaaaaggaatatcttcaaagaggattttcacaatttgatggcagtgtcccccagtttggttggccccatcagcaaagcagagaatgagcacagggaaccccagagtcgaaaggaaccccacaagccacccttcttcaaccacagctttgaaatgccctataacagccagtacctgaatccagtgtattccccggttcctgacaaaaggcgagcaaagcacgaaagcttagatgaccttcaagcctctacatattttgggcccactcccgtgatgggaacccaagaagccaggcgctgtctagggaagcccaacaagcagactccctggccagccaaaagctggagcctaaacacagaggaagttcctgactttgaacggtcctttttcaatagaaatccctccgaggagaagctacactatccaaatgccagtagccagacccccaatttcccagccccagaaaggcgcccaacttaccttgtgccaaaggatcaacagccaattctccccattgcttatgcggcaaaacaaaatgggctcaaatctaaagagatctcatcccctgttgacctggagaagcatgaaccagtcaaaaagtttaaagacaagagcattaactgcaccagtgggcagctcagctcagacaccagtagcgtgggcacccagactgagcacgtgctggagcccaagaaatgcagagacctgtgcacctctggtcagggcaagtacagtgacaggcacaccatgaagcactcagacgatgactcagaaattgtcagcgacgacatcagtgacattttccgatttcttgatgacatgagcatcagtggctccacgggagtgatacagtcgtcctgctacaacagcacaggatccttgtctcagctccataagtcagactgcgacagttcccctgagcacaacttaaccaaaattgccaatggggtccccaacagcaagggagacaagggcaaccggcctgaaaacacccaccactcggaagaagagctgaagaccagtgtgtgcaaactggtgctcaggattggcgaaattgaacggaagctggaatccctgtcgggtgtccgtgatgaaatctcccaggtcttgggcaaactaaataaattggaccagaaaatgcaacagcctgagaaggtgagtgtgcagatagatctgaactccttgacaagcgagggtccgtctgatgacagtgcctctccccggatgttccacgcacacagtggctcccacggacccaaactagagaacaaccctgactggtgctgctctgatgctagcgggagcaacagtgaaagcctgcgggtcaaggccttaaaaaaaagcctcttcaccaggccatcctctaggtccctaacagaggagaacagtgccacagagtccaaaattgccagcatctccaactcgcccagagactggcgcaccatcacttataccaaccgtgtgggcctcaatgaggaggagataaaagacacaggcccaggagataataaagactggcatcggaaatctaaagaggcagacaggcagtacgacattcccccacagcaccgactgcccaagcagcccaaagatggcttcctggtggagcaggtgttcagccctcacccctaccctgcctccctcaaggcccacatgaagagcaaccccctgtacacagacatgcggctgaccgagttggccgaggtgaagcggggccaaccttcttggaccattgaggagtatgcacggaatgcgggcgacaagggcaagctgacagccctggacctgcagacgcaagaatctttaaacccaaataatttagagtactggatggaagacatttatactccaggatacgattcattactaaaacgtaaagaagccgaattcagacgagccaaggtctgcaagatagctgctctgatcgctgctgcggcatgcaccgtcatcctcgttattgtcgtgcccatctgcacaatgaaatcatgagctaagaatgcaaccttacgtacagcttatgactaccaatgtcgtcgtctgtatcttagaatcttgcagcagtgaggcaacaatttgttgaaatggagatgaaatcatggaggcatttctacaaatgttgaatgaaggtggttttcagaaagtatacattctagtgagaaatctacctacctattagctttgactcaattacactctgacgcatttttagaagtgcaatatcttttcctaccaaaagaacatcatggactatcaataaatacaaattgaatattccaagccaaaaaaggaagattaattgggttctttccattttgatgatgtttcatggtggggaataagttatacagaagatatttaatacacgcctctttagaagaaactaagggaaatagcaacataagaagaaaagaggtggcttctcttttccataatgttcttagaccattgctggtgaagtaacagggtgtgtgtccctaaagggtattacttctctgtcgacttttatcaagggctactgacgtttcattcttgcccttttgtcatcaacacgacagagtgtctgcatcactgcagatcttcatggaaacattctggaccttcttccttgcacttggagtgagaaggagctggactaccaagtcaggcgtggaatgaagtatgctcagactgcatgatgggccaaggtattcaggccaggagacctcgtcctcaatccaaagtgtaggggagctgcctgctaacgatgtaaggtcagtatttgaaaatcatggccactccaaaggatctcctgttcttgctttggtgtgtggctccattccttgattttctatctcctggtggtaccagatgctctgcctctcatacatgagttgaagagtttggaacttgtccttgtgccttgaagagtagagacaatggctaaacgttgacattctatctgtaaaccatggttttcacgcaccactaatatctgccattttcaatggctttaaaaagattttgaaagcttgctcaataatgttcaataatataataataataaaggcactgaggtcttctcagttaccccaacacctactccagagttttgaatacttgtcagcagtgcaaaaaatattatctgtttaaccacttatctatatgtctatctatctatctatatgtctatctatctatctaaatacttgatttttatttattgtcttctctgttaaataacttgagagcaaggtttctttcgtgtaaaagaagctgttgtaatttcatccaaatttgatctgtttccacctgctgaatggtgctctgacaataatggaacagaaagaatccttatcagcatctgattccaatgtcttgttacaggtcaaagaaaaaaggattgacagaaactagctaccttatatatattttttgataataaggtgggatataaatagattttggtagcaagtgtaatcactccgtatgatataataaatttctaaaagatttgagagcatctcaatttttaaagcaataggagtctagcatccattctgaaaaatcgcaaataatgcttagcttgctgtgtctgattctgttgttcaccattaaggggtagacagttaattttattatgttaacaagtgagggatgaatgttttcatctgtggtgaacctttatttttagaagtcttcatgttatctatttgtattatcatgtttatgtatggattttcaatttcagtaaccgaaaacttaagccttagtatgaaaaactgaggatttataattgaaaatgaaaaaaatatgttactctctatcatcagaattatagtctttggtgctctgttttcaatggggcatattacataaggttgtttctttcaccccaaagagactactaggttaccactctgggcattgcctttccacctaacccctcaaccagtaagactctacaccatattgtagccccactattctcctctttatcacagatgaagtgccagagcatcagagataggtagctcccaacctcttgctctggatttgcagaagagggggagatgtacttacccaggataagaaaaatctagtcaaatccaccccaaatcttccatttaacaggtaggaccatcgaggctggaccaaaccactttttccactgcccttggtgaatctattcctagtggaccccatttgggcatgtgcctagctaccttgggaaggcatgactataagtcacacctcaggcttggaaatgaaaggattctatagaatattctatactttccatagctggagaggtagtcagaaattcagtcttgctctgagtccacagtagctttaaaattcaactcaacattgttgtcacgtaacggaaacatctagacctggtaataatccaggaaattgcaaaatggaggccaaaagtaaggtgggtttctctggaaaggggtcatcctcagtctgataataccaagtctgacgctgaggttatgaatcattaccatggcttggagctattggatgcttggggtcttgggatagatagaaggtgaggttcacagttggagcttttcttgccattgaccccaagctcaccccagccttccttccctgaccctgagactcaccctatctatctcccctattccctcagtttgcagaatgagcaagatagagtctggctaggagggaaacatctatccatctctctaatctttgcccatcacctcctgttgcaatgagttcccgcaggtgacatacggactggcctctctactgtactgggtgccatctcccaccatactctggcatttttatgtaaaggataatttcttgtacctgagtctaaaattacaacgttatcaaaattcacttcgtttttcctgcattttaaaagtaataaaatattatttgagattattttgaaattaaatatccttaaccaatgattaaattcataatcatttcatcttctttcataatcatttcatcttctaatctgaatttgttttgaacacagccttgcagaaaagcaaaaaatatttccccgctcaaattttgccgacattttataccagtatccccttcattacagtaaactaaatcataacttacatcatccattactagctgatcataaattgttagtattttaaggtatgcaactatgtgattgacatctgtaaggctagtttaatagacgtgctaaatatcactgttctgaatatctgtgccatagttctgatacccttattggaatcaaggcagtgctgtttctgtttacaagttatcaagataagagcagtggcatcacatttgttgttgttgtttttttttttgaaatagaaaaaaacagaagaagctctgccaacaataaaagattttgttaagtggtataaaaatttgtgaatgttgaaattcaacatgcttcatattataaccaacctgcaagaatattgtggtcaattgtgtgaataccaaatcagtatatactgtatactgtactatgaaaatttgtatttaaaggcaaagatacaagtaattgttggtataattggggaaaagggtattcaatatttattaagtaacaatgagaaatgcaacaaacttccttatttatgccttatgaataaaagagtgtggaatgtaaggtgaaattttatgtgcaagatcctgaaggaatgggtattcttgaaggcagggactgtcttttctatgtttgttctgtacagctctcagcacactcttggtgcttgataaatgttatgttatataataccaataactaagcacatttttagatcttttttcaaatggcttgtgtaaaatttggttaatgtacaatggttggtttgaagctatcatgtaaaattggcctctccaaatataatcagaaataaaccgaaaaaaatataaaa

SEQ ID NO: 10146 - protein, 916 aa, Homo sapiens; identical to SEQ ID NO: 1619

SEQ ID NO: 10147 - DNA, 449 bp, Homo sapiens
atgacaagagctgacagcatccatcctgggtccctgaccggagagagggaaggaaacatctgtgctggggcctgctccctctgccccagcactggggaatcactgccttcctggctgctgccacataccacaatctcctctgctggagaggagaggatgtgttcctcccaggccacggggcccctctgccttgccccaagcacagagctacctaagggactgacctttgccacactggagctcacctcccgggggcctctggcctacccttttccctgccagctgaagagactgccggcagcctggacgtcctggttagctgaaggcagctgaaatgtgggcctccctatgtggggtttagtactgaattatgtgtttgtggttttgcttctttttgtagacccacaaatatttttatttgaatagtaaagagctgtgctcagattgta

SEQ ID NO: 10148 - protein, 110 aa, Homo sapiens
MTRADSIHPGSLTGEREGNICAGACSLCPSTGESLPSWLLPHTTISSAGEERMCSSQATGPLCLAPSTELPKGLTFATLELTSRGPLAYPFPCQLKRLPAAWTSWLAEGS

SEQ ID NO: 10149 - DNA, 716 bp, Homo sapiens
atggagtgtgcggcgatggggaccccctcatcatggtctttgaatacatgaagcatggagacctgaataagttcctcagggcccatgggccagatgcaatgatccttgtggatggacagccacgccaggccaagggtgagctggggctctcccaaatgctccacattgccagtcagatcgcctcgggtatggtgtacctggcctcccagcactttgtgcaccgagacctggccaccaggaactgcctggttggagcgaatctgctagtgaagattggggacttcggcatgtccagagatgtctacagcacggattattacaggtatacatcggctaaggccttggaggaatgctctgatttgtcagatcgcgagaatactgtgaaggattctctctatgagctgatacccccggacaggttgtgcaggcatgaggactgatactggggaaaaaagacggggaagatgccccataagaaaattctgagacgttgaagcatgcttatattggattctgtcctcgggaaaggagaggaaaaggctgaaggagaccattgaatctggtgttgagtcattcacgtctctctactcctgtggagggcccttacggatgtgtcataacaggatctccttttccttcctcaagtgcaaaaggccttttttttttttttcctgagacaaactgaatatataacataaaaagatacataaatttcc

SEQ ID NO: 10150 - protein, 135 aa, Homo sapiens
MVFEYMKHGDLNKFLRAHGPDAMILVDGQPRQAKGELGLSQMLHIASQIASGMVYLASQHFVHRDLATRNCLVGANLLVKIGDFGMSRDVYSTDYYRYTSAKALEECSDLSDRENTVKDSLYELIPPDRLCRHED

SEQ ID NO: 10151 - DNA, 1243 bp, Homo sapiens
aagggaaaaggggtatttggattcccaaataaaagacagttgcttggcccctgctttgtgttttaagtaacaaataatttcatattcttttctttgttgctcacatctaccataatacgacttaaaaagtctgtcttattttcgggtgagaggtaagggtattggaatagccttttctctcagttaaactttgtgaatgttatctgtgtttaactccaagtttgagactgagagtggggcaaatgaagcctttttccactaattcctgtgttttatgtgaaatccctcttaaagcgggagattgagttctgttttccttgtttcacagatgaagactgaagaacagagaaagtaggggctagttaagtcagtaatagtatcaaaaccaatgaagtagttgtgtttgaattagtatgatcattgtttcttttttgaagactcaaaatatggtttgctgttcaaagaagcttacctcttgatttcttaccttttagtttcctcaagattgtgagactcttccctggaagaggtcagagttagagagatgggtcgaggtgtaatttggttctaagctctttgagggcaaggattgtggatcttaaaggaagattgtaaaactccaggtttcttggttctggcagatcacagtcttcttacctcctctgaccccctttgctgtagaagctgatgaaaagaatgaccgaacatccctgaacaggaagctagacaggaaccttgtcctgttagtcagagagaagtttggagaccaggatgtttggatactgccccaggcagagtggcagcctggggagacccttcgaggaacagctgaacgaaccctggccacactctcagaaaacaacatggaagccaagttcctaggaaatgcaccctgtgggcactacacattcaagttcccccaggcaatgcggacagagagtaacctcggagccaaggtgttcttcttcaaagcactgctattaactggagacttttcccaggctgggaataagggccatcatgtgtgggtcactaaggatgagctgggtgactatttgaaaccaaaatacctggcccaagttaggaggtttgtttcagacctctgatgggccgagctgcctgtggacggtgctcagacaagtctgggattagagcctcaaggacattgtgtgattgcctcacatttgcaggtaatatcaagcagcaaactaaattctgagaaataaacgagtctattactgtg

SEQ ID NO: 10152 - protein, 36 aa, Homo sapiens
MFGYCPRQSGSLGRPFEEQLNEPWPHSQKTTWKPSS

SEQ ID NO: 10153 - DNA, 802 bp, Homo sapiens
ggagaacgaaagatggcggcgcccgtaaggcggacgctgttaggggtggcggggggttggcggcggttcgagaggctctgggccggcagtctaagctctcgcagcctggctcttgcagccgcaccctcaagcaacggatccccatggcgcttgttgggcgcgttgtgcctgcagcggccacctgtagtctccaagccgttgaccccattgcaggaagagatggcgtctctactgcagcagaagctgatgaaaagaatgaccgaacatccctgaacaggaagctagacaggaaccttgtcctgttagtcagagagaagtttggagaccaggatgtttggatactgccccaggcagagtggcagcctggggagacccttcgaggaacagctgaacgaaccctggccacactctcagaaaacaacatggaagccaagttcctaggaaatgcaccctgtgggcactacacattcaagttcccccaggcaatgcggacagagagtaacctcggagccaaggtgttcttcttcaaagcactgctattaactggagacttttcccaggctgggaataagggccatcatgtgtgggtcactaaggatgagctgggtgactatttgaaaccaaaatacctggcccaagttaggaggtttgtttcagacctctgatgggccgagctgcctgtggacggtgctcagacaagtctgggattagagcctcaaggacattgtgtgattgcctcacatttgcaggtaatatcaagcagcaaactaaattctgagaaataaacgagtctattactgtg

SEQ ID NO: 10154 - protein, 173 aa, Homo sapiens
MALVGRVVPAAATCSLQAVDPIAGRDGVSTAAEADEKNDRTSLNRKLDRNLVLLVREKFGDQDVWILPQAEWQPGETLRGTAERTLATLSENNMEAKFLGNAPCGHYTFKFPQAMRTESNLGAKVFFFKALLLTGDFSQAGNKGHHVWVTKDELGDYLKPKYLAQVRRFVSDL

SEQ ID NO: 10155 - DNA, 1018 bp, Homo sapiens
gggatccctgggagccgcggtgcattgtgggagaacgaaagatggcggcgcccgtaaggcggacgctgttaggggtggcggggggttggcggcggttcgagaggctctgggccggcagtctaagctctcgcagcctggctcttgcagccgcaccctcaagcaacggatccccatggcgcttgttgggcgcgttgtgcctgcagcggccacctgtagtctccaagccgttgaccccattgcaggaagagatggcgtctctactgcagcagattgagatagagagaagcctgtattcagaccacgagcttcgtgctctggatgaaaaccagcgactggcaaagaagaaagctgaccttcatgatgaagaagatgaacaggatatattgctggcgcaagatttggaagatatgtgggagcagaaatttctacagttcaaacttggagctcgcataacagaagctgatgaaaagaatgaccgaacatccctgaacaggaagctagacaggaaccttgtcctgttagtcagagagaagtttggagaccaggatgtttggatactgccccaggcagagtggcagcctggggagacccttcgaggaacagctgaacgaaccctggccacactctcagaaaacaacatggaagccaagttcctaggaaatgcaccctgtgggcactacacattcaagttcccccaggcaatgcggacagagagtaacctcggagccaaggtgttcttcttcaaagcactgctattaactggagacttttcccaggctgggaataagggccatcatgtgtgggtcactaaggatgagctgggtgactatttgaaaccaaaatacctggcccaagttaggaggtttgtttcagacctctgatgggccgagctgcctgtggacggtgctcagacaagtctgggattagagcctcaaggacattgtgtgattgcctcacatttgcaggtaatatcaagcagcaaactaaattctgagaaataaacgagtctattactgtg

SEQ ID NO: 10156 - protein, 279 aa, Homo sapiens [sequence omitted]

SEQ ID NO: 10157 - DNA, 839 bp, Homo sapiens
tggatcaatgggaatgtgttgtatgaccaagagttgaagatgtttcaaggagaggcccagcatatacaaaggcatggaagtatgaaaatgattgagatagagagaagcctgtattcagaccacgagcttcgtgctctggatgaaaaccagcgactggcaaagaagaaagctgaccttcatgatgaagaagatgaacaggatatattgctggcgcaagatttggaagatatgtgggagcagaaatttctacagttcaaacttggagctcgcataacagaagctgatgaaaagaatgaccgaacatccctgaacaggaagctagacaggaaccttgtcctgttagtcagagagaagtttggagaccaggatgtttggatactgccccaggcagagtggcagcctggggagacccttcgaggaacagctgaacgaaccctggccacactctcagaaaacaacatggaagccaagttcctaggaaatgcaccctgtgggcactacacattcaagttcccccaggcaatgcggacagagagtaacctcggagccaaggtgttcttcttcaaagcactgctattaactggagacttttcccaggctgggaataagggccatcatgtgtgggtcactaaggatgagctgggtgactatttgaaaccaaaatacctggcccaagttaggaggtttgtttcagacctctgatgggccgagctgcctgtggacggtgctcagacaagtctgggattagagcctcaaggacattgtgtgattgcctcacatttgcaggtaatatcaagcagcaaactaaattctgagaaataaacgagtctattactgtg

SEQ ID NO: 10158 - protein, 220 aa, Homo sapiens
MFQGEAQHIQRHGSMKMIEIERSLYSDHELRALDENQRLAKKKADLHDEEDEQDILLAQDLEDMWEQKFLQFKLGARITEADEKNDRTSLNRKLDRNLVLLVREKFGDQDVWILPQAEWQPGETLRGTAERTLATLSENNMEAKFLGNAPCGHYTFKFPQAMRTESNLGAKVFFFKALLLTGDFSQAGNKGHHVWVTKDELGDYLKPKYLAQVRRFVSDL

SEQ ID NO: 10159 - DNA, 1193 bp, Homo sapiens
gggagaacgaaagatggcggcgcccgtaaggcggacgctgttaggggtggcggggggttggcggcggttcgagaggctctgggccggcagtctaagctctcgcagcctggctcttgcagccgcaccctcaagcaacggatccccatggcgcttgttgggcgcgttgtgcctgcagcggccacctgtagtctccaagccgttgaccccattgcaggaagagatggcgtctctactgcagcagattgagatagagagaagcctgtattcagaccacgagcttcgtgctctggatgaaaaccagcgactggcaaagaagaaagctgaccttcatgatgaagaagatgaacaggatatattgctggcgcaagatttggaagatatgtgggagcagaaatttctacagttcaaacttggagctcgcataacaggttgtgatccttttaggccagccagaaggaagggaaaaggggtatttggattcccaaataaaagacagttgcttggcccctgctttgtgttttaagtaacaaataatttcatattcttttctttgttgctcacatctaccataatacgacttaaaaagtctgtcttattttcgggtgagaggtaagggtattggaatagccttttctctcagttaaactttgtgaatgttatctgtgtttaactccaagtttgagactgagagtggggcaaatgaagcctttttccactaattcctgtgttttatgtgaaatccctcttaaagcgggagattgagttctgttttccttgtttcacagatgaagactgaagaacagagaaagtaggggctagttaagtcagtaatagtatcaaaaccaatgaagtagttgtgtttgaattagtatgatcattgtttcttttttgaagactcaaaatatggtttgctgttcaaagaagcttacctcttgatttcttaccttttagtttcctcaagattgtgagactcttccctggaagaggtcagagttagagagatgggtcgaggtgtaatttggttctaagctctttgagggcaaggattgtggatcttaaaggaagattgtaaaactccaggtttcttggttctggcagatcacagtcttcttacctcctctgaccccctttgctgtagaagctgatgaaaagaatgaccgaacatccctgaacaggaagctagacaggaacct

SEQ ID NO: 10160 - protein, 169 aa, Homo sapiens
MAAPVRRTLLGVAGGWRRFERLWAGSLSSRSLALAAAPSSNGSPWRLLGALCLQRPPVVSKPLTPLQEEMASLLQQIEIERSLYSDHELRALDENQRLAKKKADLHDEEDEQDILLAQDLEDMWEQKFLQFKLGARITGCDPFRPARRKGKGVFGFPNKRQLLGPCFVF

SEQ ID NO: 10161 - DNA, 1037 bp, Homo sapiens
agtcccggaactgctagaacgaaccattcgcatatggagggggtgacccaccatctcagaacattaaaaaagggaaagaatcccctggtgaactacagtgaaagtcttattgagcatttaaatggaaataaaaatattcagtggacctaatgaagagtagatgactttcccttctgtcccctccccgacaggcactcatggtaccggcgccggcgcagctgtgactgtcgctgcagacggaaactgactggggtcaattcaagtcatgcaggctgtgagaaacgcggggtcgcggttcctgcggtcctggacttggccccagacagccggcagggtcgtggccagaacgccggccgggaccatctgcacaggcgctcgacagctccaagacgctgcggccaagcagaaagttgaacagaacgcggctcccagccacaccaagttcagcacacagatccaggtagtctctgctagtaatgagccccttgcctttgcttcctgtggcacagagggatttcggaatgccaagaagggcacaggcatcgcagcacagacagcaggcatagccgcagcggcgagagctaaacaaaagggcgtgatccacatccgagttgtggtgaaaggcctggggccaggacgcttgtctgccatgcacggactgatcatgggcggcctggaagtgatctcaatcacagacaacaccccaatcccacacaacggctgccgccccaggaaggctcggaagctgtgatgggaaggaggcctgcacttggacctgacctcaagcctcagctccagtgggaccttgtaaaatgctccctgtcagagctctccagaatatgcttgttggagatccttcaggcagtaagggagagttttgcctccttacacagtggcctttgcttgcacctccagctggagatgggtgtgccccagaagtaagctttgcatctcttacaagaggggagctacaggggcagccgtggcctaggcccaaactctgctctgagaaaataaatatctgtaccacctgtcat

SEQ ID NO: 10162 - protein, 161 aa, Homo sapiens; identical to SEQ ID NO: 1625

SEQ ID NO: 10163 - DNA, 1136 bp, Homo sapiens
agtcccggaactgctagaacgaaccattcgcatatggagggggtgacccaccatctcagaacattaaaaaagggaaagaatcccctggtgaactacagtgaaagtcttattgagcatttaaatggaaataaaaatattcagtggacctaatgaagagtagatgactttcccttctgtcccctccccgacaggcactcatggtaccggcgccggcgcagctgtgactgtcgctgcagacggaaactgactggggtcaattcaagtcatgcaggctgtgagaaacgcggggtcgcggttcctgcggtcctggacttggccccagacagccggcagggtcgtggccagaacgccggccgggaccatctgcacaggcgctcgacagctccaagacgctgcggccaagcagaaagttgaacagaacgcggctcccagccacaccaagttcagcatttaccctcccattccaggagaggagagctctctgaggtgggcaggaaagaaatttgaggagatcccaattgcacacattaaagcatcccacaacaacacacagatccaggtagtctctgctagtaatgagccccttgcctttgcttcctgtggcacagagggatttcggaatgccaagaagggcacaggcatcgcagcacagacagcaggcatagccgcagcggcgagagctaaacaaaagggcgtgatccacatccgagttgtggtgaaaggcctggggccaggacgcttgtctgccatgcacggactgatcatgggcggcctggaagtgatctcaatcacagacaacaccccaatcccacacaacggctgccgccccaggaaggctcggaagctgtgatgggaaggaggcctgcacttggacctgacctcaagcctcagctccagtgggaccttgtaaaatgctccctgtcagagctctccagaatatgcttgttggagatccttcaggcagtaagggagagttttgcctccttacacagtggcctttgcttgcacctccagctggagatgggtgtgccccagaagtaagctttgcatctcttacaagaggggagctacaggggcagccgtggcctaggcccaaactctgctctgagaaaataaatatctgtaccacctgtcat

SEQ ID NO: 10164 - protein, 194 aa, Homo sapiens; identical to SEQ ID NO: 1623

SEQ ID NO: 10165 - DNA, 1260 bp, Homo sapiens
agtcccggaactgctagaacgaaccattcgcatatggagggggtgacccaccatctcagaacattaaaaaagggaaagaatcccctggtgaactacagtgaaagtcttattgagcatttaaatggaaataaaaatattcagtggacctaatgaagagtagatgactttcccttctgtcccctccccgacaggcactcatggtaccggcgccggcgcagctgtgactgtcgctgcagacggaaactgactggggtcaattcaagtcatgcaggctgtgagaaacgcggggtcgcggttcctgcggtcctggacttggccccagacagccggcagggtcgtggccagaacgccggccgggaccatctgcacaggcgctcgacagctccaagacgctgcggccaagcagaaagttgaacagaacgcggctcccagccacaccaagttcagcatttaccctcccattccaggagaggagagctctctgaggtgggcaggaaagaaatttgaggagatcccaattgcacacattaaagcatcccacaacaacacacagatccaggtagtctctgctagtaatgagccccttgcctttgcttcctgtggcacagagggatttcggaatgccaagaagggcacaggcatcgcagcacagacagcaggcatagccgcagcggcgagagctaaacaaaagggcgtgatccacatccgagttgtggtgaaaggcctggggccaggacgcttgtctgccatgcacggactgatcatgggcggcctggaagtgatctcaatcacagacaacaccccaatcccacacaacggctgccgccccaggaaggctcggaagctgtgatgggaaggaggcctgcacttggacctgacctcaagcctcagctccagtgggaccttgtaaaatgctccctgtcagagctctccagaatatgcttgttggagatccttcaggcagtaagggagagttttgcctccttacacagtggcctttgcttgcacctccagctggagatgggtgtgccccagaagtaagctttgcatctcttacaagaggggagctacaggggcagccgtggcctaggcccaaactctgctctgagaaaataaatatctgtaccacctgtcataattttgagattttttgctttcagagttacgtaattcctaattcctcttgaaaaagagagtgtgaaatgaggtgaggcctcagatgaaagtaaaatataaatgtgagttgctatttaccagaca

SEQ ID NO: 10166 - protein, 194 aa, Homo sapiens; identical to SEQ ID NO: 1623

SEQ ID NO: 10167 - DNA, 2032 bp, Homo sapiens
tgtcgctgcagacggaaactgactggggtcaattcaagtcatgcaggctgtgagaaacgcggggtcgcggttcctgcggtcctggacttggccccagacagccggcagggtcgtggccagaacgccggccgggaccatctgcacaggcgctcgacagctccaagacgctgcggccaagcagaaagttgaacagaacgcggctcccagccacaccaagttcaggtgagccccacttggaccagccctctggagacccgcaacccctgactcttgcccgacaccctccagagtcagaaccagtgaattttcagctatgtcacttgctatccgtgggaccttatgcaaataaatctgagcctcagccttctcatctaaaaatgcggataatgctgagagaggttgtgagaatcagatgagccgtggtacagagtaaatgttcagtgaacattcgttaaatcaatgagtgaatgtgagatatccataacatgtatcagcgttcttttcttctgagatggagatcttttcagaccaataaccttccctgcctccaaaacaaaatggggaggtagagggcgctagcgatggaacagatgttcctgcacgtcttacggatggtccagggtgggttttgtgctcagccctaggaactggcatcttgcttcccaccagtgccaccacctctgtatgctgtatacacatccacttaacttcacatccatttaacaaacatttaccaagaatctactatgagtgagacaccatgctaggtgccgtgaatacagatacaaaagatcattcctccccacaagtagttcacagtctttgagggaagacaaacatgcaaacattttaaccataatctgctcaataatataatggaggtaagcattggttggaagtatgaaatcataagtgtctaactcctggccgggtgcagtagctcatgcctttaatcccagcactttaggcggccaaggtgggcgaattacttgaggtcaggagatcgagaccagcctggccaacatggcgaaaccccgtctccactaaaagcacaaaaactagccaggcgtgatgtctggcacctgtaatcccagccactcaggaggctgaagtagaagaatcgcatgaacccagggagcggaggttgcagtgagccaagatcacgccactgtactccagcctgggtgacagattgagactctgtctcaaagaaaaaaaaaaaaaaaaagaataagtgtctcattcctgaggaaatcaggcaagaccatggagaaaagaacatggagctcagaagtgaatgggagttcatctggacaagttgaagtgggtcattggagacaaagcatttaccctcccattccaggagaggagagctctctgaggtgggcaggaaagaaatttgaggagatcccaattgcacacattaaagcatcccacaacaacacacagatccaggtagtctctgctagtaatgagccccttgcctttgcttcctgtggcacagagggatttcggaatgccaagaagggcacaggcatcgcagcacagacagcaggcatagccgcagcggcgagagctaaacaaaagggcgtgatccacatccgagttgtggtgaaaggcctggggccaggacgcttgtctgccatgcacggactgatcatgggcggcctggaagtgatctcaatcacagacaacaccccaatcccacacaacggctgccgccccaggaaggctcggaagctgtgatgggaaggaggcctgcacttggacctgacctcaagcctcagctccagtgggaccttgtaaaatgctccctgtcagagctctccagaatatgcttgttggagatccttcaggcagtaagggagagttttgcctccttacacagtggcctttgcttgcacctccagctggagatgggtgtgccccagaagtaagctttgcatctcttacaagaggggagctacaggggcagccgtggcctaggcccaaactctgctctgagaaaataaatatctgtaccacctgtcat

SEQ ID NO: 10168 - protein, 159 aa, Homo sapiens
MEKRTWSSEVNGSSSGQVEVGHWRQSIYPPIPGEESSLRWAGKKFEEIPIAHIKASHNNTQIQVVSASNEPLAFASCGTEGFRNAKKGTGIAAQTAGIAAAARAKQKGVIHIRVVVKGLGPGRLSAMHGLIMGGLEVISITDNTPIPHNGCRPRKARKL

SEQ ID NO: 10169 - DNA, 484 bp, Homo sapiens
aactgactggggtcaattcaagtcatgcaggctgtgagaaacgcggggtcgcggttcctgcggtcctggacttggccccagacagccggcagggtcgtggccagaacgccggccgggaccatctgcacaggcgctcgacagctccaagacgctgcggccaagcagaaagttgaacagaacgcggctcccagccacaccaagttcagcatttaccctcccattccaggagaggagagctctctgaggtgggcaggaaagaaatttgaggagatcccaattgcacacattaaagcatcccacaacaacacacagatccaggtagtctctgctagtaatgagccccttgcctttgcttcctgtggcacagagggatttcggaatgccaaaagtaagctttgcatctcttacaagaggggagctacaggggcagccgtggcctaggcccaaactctgctctgagaaaataaatatctgtaccacctgt

SEQ ID NO: 10170 - protein, 138 aa, Homo sapiens
MQAVRNAGSRFLRSWTWPQTAGRVVARTPAGTICTGARQLQDAAAKQKVEQNAAPSHTKFSIYPPIPGEESSLRWAGKKFEEIPIAHIKASHNNTQIQVVSASNEPLAFASCGTEGFRNAKSKLCISYKRGATGAAVA

SEQ ID NO: 10171 - DNA, 833 bp, Homo sapiens
aactgactggggtcaattcaagtcatgcaggctgtgagaaacgcggggtcgcggttcctgcggtcctggacttggccccagacagccggcagggtcgtggccagaacgccggccgggaccatctgcacaggcgctcgacagctccaagacgctgcggccaagcagaaagttgaacagaacgcggctcccagccacaccaagttcagcatttaccctcccattccaggagaggagagctctctgaggtgggcaggaaagaaatttgaggagatcccaattgcacacattaaagcatcccacaacaaagggatttcggaatgccaagaagggcacaggcatcgcagcacagacagcaggcatagccgcagcggcgagagctaaacaaaagggcgtgatccacatccgagttgtggtgaaaggcctggggccaggacgcttgtctgccatgcacggactgatcatgggcggcctggaagtgatctcaatcacagacaacaccccaatcccacacaacggctgccgccccaggaaggctcggaagctgtgatgggaaggaggcctgcacttggacctgacctcaagcctcagctccagtgggaccttgtaaaatgctccctgtcagagctctccagaatatgcttgttggagatccttcaggcagtaagggagagttttgcctccttacacagtggcctttgcttgcacctccagctggagatgggtgtgccccagaagtaagctttgcatctcttacaagaggggagctacaggggcagccgtggcctaggcccaaactctgctctgagaaaataaatatctgtaccacctgtcat

SEQ ID NO: 10172 - protein, 118 aa, Homo sapiens
MQAVRNAGSRFLRSWTWPQTAGRVVARTPAGTICTGARQLQDAAAKQKVEQNAAPSHTKFSIYPPIPGEESSLRWAGKKFEEIPIAHIKASHNKGISECQEGHRHRSTDSRHSRSGES

SEQ ID NO: 10173 - DNA, 957 bp, Homo sapiens
aactgactggggtcaattcaagtcatgcaggctgtgagaaacgcggggtcgcggttcctgcggtcctggacttggccccagacagccggcagggtcgtggccagaacgccggccgggaccatctgcacaggcgctcgacagctccaagacgctgcggccaagcagaaagttgaacagaacgcggctcccagccacaccaagttcagcatttaccctcccattccaggagaggagagctctctgaggtgggcaggaaagaaatttgaggagatcccaattgcacacattaaagcatcccacaacaaagggatttcggaatgccaagaagggcacaggcatcgcagcacagacagcaggcatagccgcagcggcgagagctaaacaaaagggcgtgatccacatccgagttgtggtgaaaggcctggggccaggacgcttgtctgccatgcacggactgatcatgggcggcctggaagtgatctcaatcacagacaacaccccaatcccacacaacggctgccgccccaggaaggctcggaagctgtgatgggaaggaggcctgcacttggacctgacctcaagcctcagctccagtgggaccttgtaaaatgctccctgtcagagctctccagaatatgcttgttggagatccttcaggcagtaagggagagttttgcctccttacacagtggcctttgcttgcacctccagctggagatgggtgtgccccagaagtaagctttgcatctcttacaagaggggagctacaggggcagccgtggcctaggcccaaactctgctctgagaaaataaatatctgtaccacctgtcataattttgagattttttgctttcagagttacgtaattcctaattcctcttgaaaaagagagtgtgaaatgaggtgaggcctcagatgaaagtaaaatataaatgtgagttgctatttaccagaca

SEQ ID NO: 10174 - protein, 118 aa, Homo sapiens; identical to SEQ ID NO: 10172

SEQ ID NO: 10175 - DNA, 918 bp, Homo sapiens
ctgactggggtcaattcaagtcatgcaggctgtgagaaacgcggggtcgcggttcctgcggtcctggacttggccccagacagccggcagggtcgtggccagaacgccggccgggaccatctgcacaggcgctcgacagctccaagacgctgcggccaagcagaaagttgaacagaacgcggctcccagccacaccaagttcagcacacagatccaggtagtctctgctagtaatgagccccttgcctttgcttcctgtggcacagagggatttcggaatgccaagaagggcacaggcatcgcagcacagacagcaggcatagccgcagcggcgagagctaaacaaaagggcgtgatccacatccgagttgtggtgaaaggcctggggccaggacgcttgtctgccatgcacggactgatcatgggcggcctggaagtgatctcaatcacagacaacaccccaatcccacacaacggctgccgccccaggaaggctcggaagctgtgatgggaaggaggcctgcacttggacctgacctcaagcctcagctccagtgggaccttgtaaaatgctccctgtcagagctctccagaatatgcttgttggagatccttcaggcagtaagggagagttttgcctccttacacagtggcctttgcttgcacctccagctggagatgggtgtgccccagaagtaagctttgcatctcttacaagaggggagctacaggggcagccgtggcctaggcccaaactctgctctgagaaaataaatatctgtaccacctgtcataattttgagattttttgctttcagagttacgtaattcctaattcctcttgaaaaagagagtgtgaaatgaggtgaggcctcagatgaaagtaaaatataaatgtgagttgctatttaccagaca

SEQ ID NO: 10176 - protein, 161 aa, Homo sapiens; identical to SEQ ID NO: 1625

SEQ ID NO: 10177 - DNA, 463 bp, Homo sapiens
aattcaagtcatgcaggctgtgagaaacgcggggtcgcggttcctgcggtcctggacttggccccagacagccggcagggtcgtggccagaacgccggccgggaccatctgcacaggcgctcgacagctccaagacgctgcggccaagcagaaagttgaacagaacgcggctcccagccacaccaagttcagggacaaggaagatggggagtatgcatgaaaatcccttctcatagcggaaagtccccagatgtgtctgaagtcagcaagtcaagaaacagcatcataagcacagcagtcacacatgcggtggtggcaccagaaggactgaaaaggaatggtgggggcagccacttaagaagcagcagggggcacagagctgttattttttaaccatgtgttgtatttctttgatttttaaaaagtcgagacaattttaaataaaatctttcttctaattgca

SEQ ID NO: 10178 - protein, 69 aa, Homo sapiens
MQAVRNAGSRFLRSWTWPQTAGRVVARTPAGTICTGARQLQDAAAKQKVEQNAAPSHTKFRDKEDGEYA

SEQ ID NO: 10179 - DNA, 582 bp, Homo sapiens
aattcaagtcatgcaggctgtgagaaacgcggggtcgcggttcctgcggtcctggacttggccccagacagccggcagggtcgtggccagaacgccggccgggaccatctgcacaggcgctcgacagctccaagacgctgcggccaagcagaaagttgaacagaacgcggctcccagccacaccaagttcagagtccagatattgtctatggttgatgaaataagaaacagaggtttgactgtattttttaaattgtgggaagaggaacctacaaaggatctgaaaataatgaacacgggtatacctgcagggacaaggaagatggggagtatgcatgaaaatcccttctcatagcggaaagtccccagatgtgtctgaagtcagcaagtcaagaaacagcatcataagcacagcagtcacacatgcggtggtggcaccagaaggactgaaaaggaatggtgggggcagccacttaagaagcagcagggggcacagagctgttattttttaaccatgtgttgtatttctttgatttttaaaaagtcgagacaattttaaataaaatctttcttctaattgca

SEQ ID NO: 10180 - protein, 114 aa, Homo sapiens
MQAVRNAGSRFLRSWTWPQTAGRVVARTPAGTICTGARQLQDAAAKQKVEQNAAPSHTKFRVQILSMVDEIRNRGLTVFFKLWEEEPTKDLKIMNTGIPAGTRKMGSMHENPFS

SEQ ID NO: 10181 - DNA, 978 bp, Homo sapiens
gcggggtcgcggttcctgcggtcctggacttggccccagacagccgggtaacaaatgactgccccctcgagcccaccgccacctccaggactatgctcctactcgtgtcccttgagccacccgggccccagtgaccgttaggccgtggccctcaccgagcttttcttcccagcagggtcgtggccagaacgccggccgggaccatctgcacaggcgctcgacagctccaagacgctgcggccaagcagaaagttgaacagaacgcggctcccagccacaccaagttcagcatttaccctcccattccaggagaggagagctctctgaggtgggcaggaaagaaatttgaggagatcccaattgcacacattaaagcatcccacaacaacacacagatccaggtagtctctgctagtaatgagccccttgcctttgcttcctgtggcacagagggatttcggaatgccaagaagggcacaggcatcgcagcacagacagcaggcatagccgcagcggcgagagctaaacaaaagggcgtgatccacatccgagttgtggtgaaaggcctggggccaggacgcttgtctgccatgcacggactgatcatgggcggcctggaagtgatctcaatcacagacaacaccccaatcccacacaacggctgccgccccaggaaggctcggaagctgtgatgggaaggaggcctgcacttggacctgacctcaagcctcagctccagtgggaccttgtaaaatgctccctgtcagagctctccagaatatgcttgttggagatccttcaggcagtaagggagagttttgcctccttacacagtggcctttgcttgcacctccagctggagatgggtgtgccccagaagtaagctttgcatctcttacaagaggggagctacaggggcagccgtggcctaggcccaaactctgctctgagaaaataaatatctgtaccacctgtcat

SEQ ID NO: 10182 - protein, 74 aa, Homo sapiens
MLPVRALQNMLVGDPSGSKGEFCLLTQWPLLAPPAGDGCAPEVSFASLTRGELQGQPWPRPKLCSEKINICTTC

SEQ ID NO: 10183 - DNA, 1102 bp, Homo sapiens
gcggggtcgcggttcctgcggtcctggacttggccccagacagccgggtaacaaatgactgccccctcgagcccaccgccacctccaggactatgctcctactcgtgtcccttgagccacccgggccccagtgaccgttaggccgtggccctcaccgagcttttcttcccagcagggtcgtggccagaacgccggccgggaccatctgcacaggcgctcgacagctccaagacgctgcggccaagcagaaagttgaacagaacgcggctcccagccacaccaagttcagcatttaccctcccattccaggagaggagagctctctgaggtgggcaggaaagaaatttgaggagatcccaattgcacacattaaagcatcccacaacaacacacagatccaggtagtctctgctagtaatgagccccttgcctttgcttcctgtggcacagagggatttcggaatgccaagaagggcacaggcatcgcagcacagacagcaggcatagccgcagcggcgagagctaaacaaaagggcgtgatccacatccgagttgtggtgaaaggcctggggccaggacgcttgtctgccatgcacggactgatcatgggcggcctggaagtgatctcaatcacagacaacaccccaatcccacacaacggctgccgccccaggaaggctcggaagctgtgatgggaaggaggcctgcacttggacctgacctcaagcctcagctccagtgggaccttgtaaaatgctccctgtcagagctctccagaatatgcttgttggagatccttcaggcagtaagggagagttttgcctccttacacagtggcctttgcttgcacctccagctggagatgggtgtgccccagaagtaagctttgcatctcttacaagaggggagctacaggggcagccgtggcctaggcccaaactctgctctgagaaaataaatatctgtaccacctgtcataattttgagattttttgctttcagagttacgtaattcctaattcctcttgaaaaagagagtgtgaaatgaggtgaggcctcagatgaaagtaaaatataaatgtgagttgctatttaccagaca

SEQ ID NO: 10184 - protein, 91 aa, Homo sapiens [sequence omitted]

SEQ ID NO: 10185 - DNA, 753 bp, Homo sapiens
ggaatggtgggggcagccacttaagaagcagcagggggcacagagctgttattttttaaccatgtgttgtatttctttgatttttaaaaagtcgagacaattttaaataaaatctttcttctaattgcagcatttaccctcccattccaggagaggagagctctctgaggtgggcaggaaagaaatttgaggagatcccaattgcacacattaaagcatcccacaacaacacacagatccaggtagtctctgctagtaatgagccccttgcctttgcttcctgtggcacagagggatttcggaatgccaagaagggcacaggcatcgcagcacagacagcaggcatagccgcagcggcgtctgccatgcacggactgatcatgggcggcctggaagtgatctcaatcacagacaacaccccaatcccacacaacggctgccgccccaggaaggctcggaagctgtgatgggaaggaggcctgcacttggacctgacctcaagcctcagctccagtgggaccttgtaaaatgctccctgtcagagctctccagaatatgcttgttggagatccttcaggcagtaagggagagttttgcctccttacacagtggcctttgcttgcacctccagctggagatgggtgtgccccagaagtaagctttgcatctcttacaagaggggagctacaggggcagccgtggcctaggcccaaactctgctctgagaaaataaatatctgtaccacctgtcat

SEQ ID NO: 10186 - protein, 74 aa, Homo sapiens; identical to SEQ ID NO: 10182

SEQ ID NO: 10187 - DNA, 724 bp, Homo sapiens
agcaatatttagaaatttccattaggtggcggtgctgtcctaggctaaacagatcacagtcacgtgaattctgcaacctgccaaattctgtggtctctgctggcgcctgtcctccactatagccatctgccctttgcctccctgtttacttctctggatgccctttccctgagctcacacaccccttgctctaggaggcagtagcaagagatttggatgcagtagttctctctccggggcactaaccactctgcttctctccagagagctaaacaaaagggcgtgatccacatccgagttgtggtgaaaggcctggggccaggacgcttgtctgccatgcacggactgatcatgggcggcctggaagtgatctcaatcacagacaacaccccaatcccacacaacggctgccgccccaggaaggctcggaagctgtgatgggaaggaggcctgcacttggacctgacctcaagcctcagctccagtgggaccttgtaaaatgctccctgtcagagctctccagaatatgcttgttggagatccttcaggcagtaagggagagttttgcctccttacacagtggcctttgcttgcacctccagctggagatgggtgtgccccagaagtaagctttgcatctcttacaagaggggagctacaggggcagccgtggcctaggcccaaactctgctctgagaaaataaatatctgtaccacctgtcat

SEQ ID NO: 10188 - protein, 74 aa, Homo sapiens; identical to SEQ ID NO: 10182

SEQ ID NO: 10189 - DNA, 4196 bp, Homo sapiens
tctcccgcctctttagtgtcacagtctgctcccagcccaggttgtacctcttcatttcctagtgaccacctgacataagcttgccgcttctctaggcccaacccctgcccacccatgtcagttgaggtggtgccattcttttgccatgcatcacctatgcatacctaaggctgaggagaccagaacacctctaacctgctttgccaccaaacacattggttaaagggagctttgtttgctgaaggtttgttattggtgtgttgttgatggctaacatttattaaaagcttacttactatgggccagatgctatgccaagcaccttatataggaaagtatttgcatttcatgaattttgagatgcagtttttgaaactggagtgtatcttaaagttggtgtcttctcagtgtcagcaaggcagcagttgcaacattgctgttctcgtcgcctgtggatgtgcaaactgggtgtgctcttcccattgtcatcatttttgttgagtaatgtgcattgttgataaccacatgtgttcagtgtaagcgctttttaagatgccttcaaaaacattatactgtgatttggtattataataaaaggtggttttatactcagaaaggcagagcagtggggttaatttgatattagtaaagcacagatttgccattggaggaatgaacttttactgacatgctgagattcatgcgaaaggattgcctatcaaacagcaaacaaggcgcaactaaaggagaagttgacccatcctttggaataaatggaagaagttttaatgtagtgagagacaccaattcatgcagagcacaggactaatcattgagatgtgaatcgatttgttagatgcttcctgctgactttgaacaggagctgattaatttccagggacatgtgattcaatatagaaagaagtgaaactagaggttaagtcgaataagaaacaaaatctgaaaaaggccaaaagcgctttttgaatacgtatatcttaaaggtactggcatttgtcttaatcaactatgggaaggcacacgcgaaatgactgtcatgaagaaagaaatttgttatacgcataggtccctagaaattgaaggcgtggtatgcatgcagggccatgggtaagcacctggattggtcaggaggcagagggaacaggcgaaaacatggataagagcctgtgttgtggtttctgcagaaattaatgtgccagacagcaggtaagcaggtttgggattgactaatttgaattttgatgggccctggggtctaggtgctatccctggttgtctggtacctggccctggggtgattagggctgagtgtgagagccctataaaaaggtgcttgaggtgtgggctctggattggttggtttgcatatgaaagacgtgttctcaggcaagttgtttgctatctccaggaattagcaaactctgggaggggcagtccagggtcagtacagccccaagatgtcaagtcatcagaaaacaaaaggcatggttaatataatataaaaatgattccaagcaataagcattgtcatggtttaatttgttcttagagtgacagattgtggtagtcagcctctaagatggcctacagtgaccctaccttctatattcatgccctcccacatcgtatcatggttgattggcatgaccaataaaacacagtagaagtgatgatgtgccactttcaaggcttatttataaaagacatttcaaggctaggcttttgcaccccgcccgcacccctggaatcattcagccgccatatcacaagaacacacaggcaagctcctggagagatctccttgctgaggaactgaggcttcctgctgatagccatgtgaatgaaatatcctggaatccagtcctcccgcttcattcaagcctatagatgacagcaacctcatgagaaactctgagccagaactgcccagctaagccactcccagattattgattctcagaaattgtgtaagataataaatgatttttttttttttaagacagggtctccttctgttgcccaggctggagtgtggtggcatgatcatggctcactgtagacctcctgggctcaaacgatcctcccgtctcagcctcctgagtggttgggaccacaggtacatgtcaccatgcctggctaattgtttttaattttttgtagaaacagggccttcctatgttgtccaggctggtctcaaactcctaggttcaagcgattctcctaccttggccttccaaagtgctgagattacaagcatgagccactgcgcctggccaataaatgctttaagctgctgaattttggaggtaatttgttgtgtagcaatatatagccaacacatacataaataaaggtgtctttttgcaatatggcatcctctgaaaaatgcagtattcctattttgtagataaggaaactgaccttagagagatcaagcaatttgctaaaagtaacattactggttaatgtcaagtaaactttaacctggcctatgtcagaattcatttaaatctctgaatttatttaggtctaaactggttattttactgatttctaaaaatattaatagggaaatttgatatttttgtgtctttgtatccatcttcttccttgtaggtggatggcttagcaaagtattttttattaaaggttgacaatatatcccacataatttctctttctcctgtttttttctttaaatttattttattttattttttatttttttgagacagagtctcagtttgttgcccaggctggagtgtagtggtgagatctcagctcttgcaaccgccgcctcccagacttaagcgattctcatgccccagtctcccaagtagctgggattacaggcatgtgccaccactcccagctaatttttatatttttagtagatactgggttttgccatgctggccaggctggtctccaactcctagcctcaagtgatccacctgccttggcctcccaaagtgctgggattacaggtgtgaccctggcctctttctccttcttaacactagtgtgttagttgacttgtgtgtttattcatatgttatacatttattgaggacctgctaagggccagggactaggaatagaagaatgtgtaaatcacagctctaacctttgcctttctagtctggtaatgtctctgaatgccgatctctctctctcttagaaagaggtgccttgtcctctctctcaactgtcccaccatcagtaagggaaccaggaaaccagtctttgagtatggagttaacaagaaagctgagtgttgggcggcttttttgtggaagctcactgcttatccatgtaatgtttcattaattctttgatgctgaagtttcacctcctgcagggagcatttgcagcaccccaggcgagttgtcagcagttgctgcctggcagtagcacacattaactctagtgagcagaagtggagctcgaaggctccccacactgctgcaccttgagctgctcttcctggcccagcctgttctgcttcctgggaccccagatctggtctccaagtactgtttctcttctaagtgtagtcattaacttcccagagtgagaagaagagactaaaaaaaaagagagacagactgtctcttagttttaattaattgttgaaagaatagagaggggccatatttctactgaaagaaaggagaagttggggaatgggaatattctgaaccggaatgaaaaagtgaatgaaaggtaatctttagattcagtctctttgccctagtctttaaaagtttctgttgggggttatttgccctagtctttaaaagtttctgttgggggttacaaagtttgaaatctgtcttaaggagggatgtattactcaaaataaattgcctctatcattcagtgtgatatgatggacttggaaggggcaggattagaggaggtgagggataaaaatctacatattgtgtacagtgtatactactccagtgatagatgcactaaaatctcagccttcaccacagttcatgcatgtaaccaaaaccactgctaccccaaaagctgctgaaataaaaagcaacaacaacaaaaacaaatggactctagcttgttttcctttcagatcttctcttttaaatgtcattctggctaaaacaattttttaaaaatgtttatctgaaaagtgattgtcaacc

SEQ ID NO: 10190 - protein, 67 aa, Homo sapiens [sequence omitted]

SEQ ID NO: 10191 - DNA, 2639 bp, Homo sapiens
ctcttgcattcagaagaaaagagaatgagttttggtggaccactagcctttgctgggataccagcatcttcatagctgtcacctaccctcagatcctctcgtctttcgttattcagcctaggttgcatgatctaacacgataatcactcccttaacttccttgctgttctgcctccttcatgcaaatttggaaaactctcaactctgtacatgtctgtctctgaacagctgaaaatagctgcagaaaaaccatgtctattcttaaattcatgaccacagacttaaaatgggcactcaagatcgctgagcaatcctttcaacattgtaagactttccttatttgtttactttccaactctctgaaattgctgttttgcacctttgcctctcacttcaaaacccctccttcagtaggccaggcttggtggctcagacctataatctcagtgctttgggaggccaaggtgggaggattgcttgaacccaggctggagtgtggtggcatgatcatggctcactgtagacctcctgggctcaaacgatcctcccgtctcagcctcctgagtggttgggaccacaggtacatgtcaccatgcctggctaattgtttttaattttttgtagaaacagggccttcctatgttgtccaggctggtctcaaactcctaggttcaagcgattctcctaccttggccttccaaagtgctgagattacaagcatgagccactgcgcctggccaataaatgctttaagctgctgaattttggaggtaatttgttgtgtagcaatatatagccaacacatacataaataaaggtgtctttttgcaatatggcatcctctgaaaaatgcagtattcctattttgtagataaggaaactgaccttagagagatcaagcaatttgctaaaagtaacattactggttaatgtcaagtaaactttaacctggcctatgtcagaattcatttaaatctctgaatttatttaggtctaaactggttattttactgatttctaaaaatattaatagggaaatttgatatttttgtgtctttgtatccatcttcttccttgtaggtggatggcttagcaaagtattttttattaaaggttgacaatatatcccacataatttctctttctcctgtttttttctttaaatttattttattttattttttatttttttgagacagagtctcagtttgttgcccaggctggagtgtagtggtgagatctcagctcttgcaaccgccgcctcccagacttaagcgattctcatgccccagtctcccaagtagctgggattacaggcatgtgccaccactcccagctaatttttatatttttagtagatactgggttttgccatgctggccaggctggtctccaactcctagcctcaagtgatccacctgccttggcctcccaaagtgctgggattacaggtgtgaccctggcctctttctccttcttaacactagtgtgttagttgacttgtgtgtttattcatatgttatacatttattgaggacctgctaagggccagggactaggaatagaagaatgtgtaaatcacagctctaacctttgcctttctagtctggtaatgtctctgaatgccgatctctctctctcttagaaagaggtgccttgtcctctctctcaactgtcccaccatcagtaagggaaccaggaaaccagtctttgagtatggagttaacaagaaagctgagtgttgggcggcttttttgtggaagctcactgcttatccatgtaatgtttcattaattctttgatgctgaagtttcacctcctgcagggagcatttgcagcaccccaggcgagttgtcagcagttgctgcctggcagtagcacacattaactctagtgagcagaagtggagctcgaaggctccccacactgctgcaccttgagctgctcttcctggcccagcctgttctgcttcctgggaccccagatctggtctccaagtactgtttctcttctaagtgtagtcattaacttcccagagtgagaagaagagactaaaaaaaaagagagacagactgtctcttagttttaattaattgttgaaagaatagagaggggccatatttctactgaaagaaaggagaagttggggaatgggaatattctgaaccggaatgaaaaagtgaatgaaaggtaatctttagattcagtctctttgccctagtctttaaaagtttctgttgggggttatttgccctagtctttaaaagtttctgttgggggttacaaagtttgaaatctgtcttaaggagggatgtattactcaaaataaattgcctctatcattcagtgtgatatgatggacttggaaggggcaggattagaggaggtgagggataaaaatctacatattgtgtacagtgtatactactccagtgatagatgcactaaaatctcagccttcaccacagttcatgcatgtaaccaaaaccactgctaccccaaaagctgctgaaataaaaagcaacaacaacaaaaacaaatggactctagcttgttttcctttcagatcttctcttttaaatgtcattctggctaaaacaattttttaaaaatgtttatctgaaaagtgattgtcaacc

SEQ ID NO: 10192 - protein, 120 aa, Homo sapiens
MSILKFMTTDLKWALKIAEQSFQHCKTFLICLLSNSLKLLFCTFASHFKTPPSVGQAWWLRPIISVLWEAKVGGLLEPRLECGGMIMAHCRPPGLKRSSRLSLLSGWDHRYMSPCLANCF

SEQ ID NO: 10193 - DNA, 674 bp, Homo sapiens
tctgagagctgtacagtagtggctgaggtggggtttgcagtgaaggatgtgacacaccccagatggagctgaatgggcgtgggacctcaggtcttggccacagtggcctgctgtgcattgatcctgctacagagtgtccattatcagccaggcgcggtggctcacgcctgtaatccctgcactttgggaggccgaggtagggcggatacctgaggtcgggagttcaagaccagcatgaccaacgcagagaaaccccgtctctactaaaaatacaaaattagccgggcgtggtggcgcatgcttgtagtcccagctactcgggaggctgaggcaggagaatcgcttgaacccgggaggcagaggttgagagctgcacacgactgacgtaaccatggagggggccatgtagggctccagccgcctgcagatctccagggaggcacagtcgatgacaaggaggcccggcccattgctgtaccagacctcagagccgctgttgaccacctccatggccttcactgggtaggggttctgccgtgcgtcttcatccgcgatgctgaacttggacctgttggctgtgtgtgagcacaggtaggagcagctgtcctttggggtgccccgcaccacgggaaacacagccacaagcccatcggcgaggcccgctaagaccaggt

SEQ ID NO: 10194 - protein, 46 aa, Homo sapiens
MGVGPQVLATVACCALILLQSVHYQPGAVAHACNPCTLGGRGRADT

SEQ ID NO: 10195 - DNA, 556 bp, Homo sapiens
tgaggaagcccacattcttcttactgcatgcttcctggtgcttacagtgggcaaggctctgtcaaccacaagccatcttctgtaggaaaaaaaggagaggggacttgtaggttaatataactgaggcgtctgagtaggtggcttcaggtatggctctatccagggcctctctatctcatcttatcacagcttcatggagccgtagcttccatggagagagaagtggagtgatgggccagaggccattggcacgcgtggctttctgattggggcaccacctaaaccaagatttgccttctaaagtcgaagacttgctttctttcccactctcccagaggaaactaagaaaaaagtgaaatgtaagcactgctgccgaagctgcctttgccccacgaccaccgtctcgtcccagctcatacctcacggggtcagatagcttcagtcttccagcgagagaaatcctggtgccccaggcacctggggagaagctcacagttactgtggctattgtcgctgttggtttgaactttctaataaaactgtatctgtggccagg

SEQ ID NO: 10196 - protein, 38 aa, Homo sapiens
MALSRASLSHLITASWSRSFHGERSGVMGQRPLARVAF

SEQ ID NO: 10197 - DNA, 823 bp, Homo sapiens
acagggcaccggggcaaaacggagccattctgtgacaaactcacctcccaaagccactcagggtggttggctgcaacagcagcgactcagagggaaaggccactgcaccagccctcagctcagggggaaggcggtgagatgacaccacagggcattaagccagggccccagatcaggtgtgacgtggaaaccaagcatgcttcagggaaggcctggcagcagagacccgacttctgggcaggcagagcagtcaaggctgcccagcagctgctggtggaccctgggaaaccagctggggctgcacagggccatcctctcccgctgagctgatggaacacgtatgtcacctcctcctgaggatgcggcccagatggaaatcactcctggctgcccaaacggaggcccggtgcctctggtcatgtccacatctcgtccagcgcttctgctgcctcaccaagtctggaaagagctgctcttatctcaggctacccacttccactccgcgcccctgcctgtcccatctcttggaatgagcgccagcttcctgggagtggagtgtacctctttcccaaacaggccctctgtctggaacgcgcctcttctcactccctgagtcatcaataaatctgtctcactttgtcctgactcaagctttgcagtcatagagttgggtctgcggagttgccattttcacaggatgagggatccaagacactgtgcaatattctcacaggatgagggatccaagacactgtgcaatattctcacagtatttcttaaaggtcatttcacttttcgggcttatttttaaaaaggttttatt

SEQ ID NO: 10198 - protein, 90 aa, Homo sapiens
MSPPPEDAAQMEITPGCPNGGPVPLVMSTSRPALLLPHQVWKELLLSQATHFHSAPLPVPSLGMSASFLGVECTSFPNRPSVWNAPLLTP

SEQ ID NO: 10199 - DNA, 2163 bp, Homo sapiens
ccaagctatcacattacaccccaacaaaaacccaccctaccagtacaggctccacagctacatgctgagccgcaagatatccgagctccgccatcgcacaatacagctgcaccgcgaaattgtcctgatgagcaaatacagcaacacagaaattcataaagaggacctccagctgggaatccctccctccttcatgaggtttcagccccgccagcgagaggagattctggaatgggagtttctgactggaaaatacttgtattcggcagttgacggccagccccctcgaagaggaatggactccgcccagagggaagccttggacgacattgtcatgcaggtcatggagatgatcaatgccaacgccaagaccagagggcgcatcattgacttcaaagagatccagtacggccagcagctggctgagatgtggctggaaaaaaatgatccaagttacagtaaaagcagcaataataatggctcagtgaggacagcctaatgtccagctttgctggaaaagacgtttttaattatctaatttatttttcaaaaattttttgtatgatcagtttttgaagtccgtatacaaggatatattttacaagtggttttcttacataggactcctttaagattgagctttctgaacaagaaggtgatcagtgtttgcctttgaacacatcttcttgctgaacattatgtagcagacctgcttaactttgacttgaaatgtacctgatgaacaaaacttttttaaaaaaatgttttcttttgagaccctttgctccagtcctatggcagaaaacgtgaacattcctgcaaagtattattgtaacaaaacactgtaactctggtaaatgttctgttgtgattgttaacattccacagattctaccttttgtgttttgttttttttttttacaattgttttaaagccatttcatgttccagttgtaagataaggaaatgtgataatagctgtttcatcattgtcttcaggagagctttccagagttgatcatttcctctcatggtactctgctcagcatggccacgtaggttttttgtttgttttgttttgttctttttttgagacggagtctcactctgttacccaggctggaatgcagtggcgcaatcttggctcactttaacctccacttccctggttcaagcaattcccctgcctttgcctcccgagtagctgggattacaggcacacaccaccacgcccagctagtttttttgtatttttagtagagacggggtttcaccatgcaagcccagctggccacgtaggttttaaagcaaggggcgtgaagaaggcacagtgaggtatgtggctgttctcgtggtagttcattcggcctaaatagacctggcattaaatttcaagaaggatttggcattttctcttcttgacccttctctttaaagggtaaaatattaatgtttagaatgacaaagatgaattattacaataaatctgatgtacacagactgaaacatacacacatacaccctaatcaaaacgttggggaaaaatgtatttggttttgttcctttcatcctgtctgtgttatgtgggtggagatggttttcattctttcattactgttttgttttatcctttgtatctgaaatacctttaatttatttaatatctgttgttcagagctctgccatttcttgagtacctgttagttagtattatttatgtgtatcgggagtgtgtttagtctgttttatttgcagtaaaccgatctccaaagatttccttttggaaacgctttttcccctccttaatttttatattccttactgttttactaaatattaagtgttctttgacaattttggtgctcatgtgttttggggacaaaagtgaaatgaatctgtcattataccagaaagttaaattctcagatcaaatgtgccttaataaatttgttttcatttagatttcaaacagtgatagacttgccattttaatacacgtcattggagggctgcgtatttgtaaatagcctgatgctcatttggaaaaataaaccagtgaacaatatttttctattgtacttttcgaaccattttgtctcattattcctgttttagctgaagaattgtattacatttggagagtaaaaaacttaaacacgattc

SEQ ID NO: 10200 - protein, 145 aa, Homo sapiens
MLSRKISELRHRTIQLHREIVLMSKYSNTEIHKEDLQLGIPPSFMRFQPRQREEILEWEFLTGKYLYSAVDGQPPRRGMDSAQREALDDIVMQVMEMINANAKTRGRIIDFKEIQYGQQLAEMWLEKNDPSYSKSSNNNGSVRTA

SEQ ID NO: 10201 - DNA, 4564 bp, Homo sapiens
ggctcctgttgcaatggcgagctaagccggaggatgtgcagctgcggcggcggcgccggctacgaagaggacggggacaggcgccgtgcgaaccgagcccagccagccggaggacgcgggcagggcgggacgggagcccggactcgtctgccgccgccgtcgtcgccgtcgtgccggccccgcgtccccgcgcgcgagcgggaggagccgccgccacctcgcgcccgagccgccgctagcgcgcgccgggcatggtcccctcttaaaggcgcaggccgcggcggcgggggcgggcgtgcggaacaaagcgccggcgcggggcctgcgggcggctcgggggccgcgatgggcgcggcgggcccgcggcggcggcggcgctgcccgggccgggcctcgcggcgctagggcgggctggcctccgcgggcgggggcagcgggctgagggcgcgcggagcctgcggcggcggcccggcgggcggagcggcgcgggcatggccgcgcgcggccggcgcgcctggctcagcgtgctgctcgggctcgtcctgggcttcgtgctggcctcgcggctcgtcctgccccgggcttccgagctgaagcgagcgggcccacggcgccgcgccagccccgagggctgccggtccgggcaggcggcggcttcccaggccggcggggcgcgcggcgatgcgcgcggggcgcagctctggccgcccggctcggacccagatggcggcccgcgcgacaggaactttctcttcgtgggagtcatgaccgcccagaaatacctgcagactcgggccgtggccgcctacagaacatggtccaagacaattcctgggaaagttcagttcttctcaagtgagggttctgacacatctgtaccaattccagtagtgccactacggggtgtggacgactcctacccgccccagaagaagtccttcatgatgctcaagtacatgcacgaccactacttggacaagtatgaatggtttatgagagcagatgatgacgtgtacatcaaaggagaccgtctggagaacttcctgaggagtttgaacagcagcgagcccctctttcttgggcagacaggcctgggcaccacggaagaaatgggaaaactggccctggagcctggtgagaacttctgcatgggggggcctggcgtgatcatgagccgggaggtgcttcggagaatggtgccgcacattggcaagtgtctccgggagatgtacaccacccatgaggacgtggaggtgggaaggtgtgtccggaggtttgcaggggtgcagtgtgtctggtcttatgagatgcagcagcttttttatgagaattacgagcagaacaaaaaggggtacattagagatctccataacagtaaaattcaccaagctatcacattacaccccaacaaaaacccaccctaccagtacaggctccacagctacatgctgagccgcaagatatccgagctccgccatcgcacaatacagctgcaccgcgaaattgtcctgatgagcaaatacagcaacacagaaattcataaagaggacctccagctgggaatccctccctccttcatgaggtttcagccccgccagcgagaggagattctggaatgggagtttctgactggaaaatacttgtattcggcagttgacggccagccccctcgaagaggaatggactccgcccagagggaagccttggacgacattgtcatgcaggtcatggagatgatcaatgccaacgccaagaccagagggcgcatcattgacttcaaagagatccagtacggctaccgccgggtgaaccccatgtatggggctgagtacatcctggacctgctgcttctgtacaaaaagcacaaagggaagaaaatgacggtccctgtgaggaggcacgcgtatttacagcagactttcagcaaaatccagtttgtggagcatgaggagctggatgcacaagagttggccaagagaatcaatcaggaatctggatccttgtcctttctctcaaactccctgaagaagctcgtcccctttcagctccctgggtcgaagagtgagcacaaagaacccaaagataaaaagataaacatactgattcctttgtctgggcgtttcgacatgtttgtgagatttatgggaaactttgagaagacgtgtcttatccccaatcagaacgtcaagctcgtggttctgcttttcaattctgactccaaccctgacaaggccaaacaagttgaactgatgagagattaccgcattaagtaccctaaagccgacatgcagattttgcctgtgtctggagagttttcaagagccctggccctggaagtaggatcctcccagtttaacaatgaatctttgctcttcttctgcgacgtcgacctcgtgtttactacagaattccttcagcgatgtcgagcaaatacagttctgggccaacaaatatattttccaatcatcttcagccagtatgacccaaagattgtttatagtgggaaagttcccagtgacaaccattttgcctttactcagaaaactggcttctggagaaactatgggtttggcatcacgtgtatttataagggagatcttgtccgagtgggtggctttgatgtttccatccaaggctgggggctggaggatgtggaccttttcaacaaggttgtccaggcaggtttgaagacgtttaggagccaggaagtaggagtagtccacgtccaccatcctgtcttttgtgatcccaatcttgaccccaaacagtacaaaatgtgcttggggtccaaagcatcgacctatgggtccacccagcagctggctgagatgtggctggaaaaaaatgatccaagttacagtaaaagcagcaataataatggctcagtgaggacagcctaatgtccagctttgctggaaaagacgtttttaattatctaatttatttttcaaaaattttttgtatgatcagtttttgaagtccgtatacaaggatatattttacaagtggttttcttacataggactcctttaagattgagctttctgaacaagaaggtgatcagtgtttgcctttgaacacatcttcttgctgaacattatgtagcagacctgcttaactttgacttgaaatgtacctgatgaacaaaacttttttaaaaaaatgttttcttttgagaccctttgctccagtcctatggcagaaaacgtgaacattcctgcaaagtattattgtaacaaaacactgtaactctggtaaatgttctgttgtgattgttaacattccacagattctaccttttgtgttttgttttttttttttacaattgttttaaagccatttcatgttccagttgtaagataaggaaatgtgataatagctgtttcatcattgtcttcaggagagctttccagagttgatcatttcctctcatggtactctgctcagcatggccacgtaggttttttgtttgttttgttttgttctttttttgagacggagtctcactctgttacccaggctggaatgcagtggcgcaatcttggctcactttaacctccacttccctggttcaagcaattcccctgcctttgcctcccgagtagctgggattacaggcacacaccaccacgcccagctagtttttttgtatttttagtagagacggggtttcaccatgcaagcccagctggccacgtaggttttaaagcaaggggcgtgaagaaggcacagtgaggtatgtggctgttctcgtggtagttcattcggcctaaatagacctggcattaaatttcaagaaggatttggcattttctcttcttgacccttctctttaaagggtaaaatattaatgtttagaatgacaaagatgaattattacaataaatctgatgtacacagactgaaacatacacacatacaccctaatcaaaacgttggggaaaaatgtatttggttttgttcctttcatcctgtctgtgttatgtgggtggagatggttttcattctttcattactgttttgttttatcctttgtatctgaaatacctttaatttatttaatatctgttgttcagagctctgccatttcttgagtacctgttagttagtattatttatgtgtatcgggagtgtgtttagtctgttttatttgcagtaaaccgatctccaaagatttccttttggaaacgctttttcccctccttaatttttatattccttactgttttactaaatattaagtgttctttgacaattttggtgctcatgtgttttggggacaaaagtgaaatgaatctgtcattataccagaaagttaaattctcagatcaaatgtgccttaataaatttgttttcatttagatttcaaacagtgatagacttgccattttaatacacgtcattggagggctgcgtatttgtaaatagcctgatgctcatttggaaaaataaaccagtgaacaatatttttctattgtacttttcgaaccattttgtctcattattcctgttttagctgaagaattgtattacatttggagagtaaaaaacttaaacacgattc

SEQ ID NO: 10202 - protein, 802 aa, Homo sapiens; identical to SEQ ID NO: 1629

SEQ ID NO: 10203 - DNA, 2077 bp, Homo sapiens
ccaagctatcacattacaccccaacaaaaacccaccctaccagtacaggctccacagctacatgctgagccgcaagatatccgagctccgccatcgcacaatacagctgcaccgcgaaattgtcctgatgagcaaatacagcaacacagaaattcataaagaggacctccagctgggaatccctccctccttcatgaggtttcagccccgccagcgagaggagattctggaatgggagtttctgactggaaaatacttgtattcggcagttgacggccagccccctcgaagaggaatggactccgcccagagggaagccttggacgacattgtcatgcaggtcatggagatgatcaatgccaacgccaagaccagagggcgcatcattgacttcaaagagatccagtacggccagcagctggctgagatgtggctggaaaaaaatgatccaagttacagtaaaagcagcaataataatggctcagtgaggacagcctaatgtccagctttgctggaaaagacgtttttaattatctaatttatttttcaaaaattttttgtatgatcagtttttgaagtccgtatacaaggatatattttacaagtggttttcttacataggactcctttaagattgagctttctgaacaagaaggtgatcagtgtttgcctttgaacacatcttcttgctgaacattatgtagcagacctgcttaactttgacttgaaatgtacctgatgaacaaaacttttttaaaaaaatgttttcttttgagaccctttgctccagtcctatggcagaaaacgtgaacattcctgcaaagtattattgtaacaaaacactgtaactctggtaaatgttctgttgtgattgttaacattccacagattctaccttttgtgttttgttttttttttttacaattgttttaaagccatttcatgttccagttgtaagataaggaaatgtgataatagctgtttcatcattgtcttcaggagagctttccagagttgatcatttcctctcatggtactctgctcagcatggccacgtaggttttttgtttgttttgttttgttctttttttgagacggagtctcactctgttacccaggctggaatgcagtggcgcaatcttggctcactttaacctccacttccctggttcaagcaattcccctgcctttgcctcccgagtagctgggattacaggcacacaccaccacgcccagctagtttttttgtatttttagtagagacggggtttcaccatgcaagcccagctggccacgtaggttttaaagcaaggggcgtgaagaaggcacagtgaggtatgtggctgttctcgtggtagttcattcggcctaaatagacctggcattaaatttcaagaaggatttggcattttctcttcttgacccttctctttaaagggtaaaatattaatgtttagaatgacaaagatgaattattacaataaatctgatgtacacagactgaaacatacacacatacaccctaatcaaaacgttggggaaaaatgtatttggttttgttcctttcatcctgtctgtgttatgtgggtggagatggttttcattctttcattactgttttgttttatcctttgtatctgaaatacctttaatttatttaatatctgttgttcagagctctgccatttcttgagtacctgttagttagtattatttatgtgtatcgggagtgtgtttagtctgttttatttgcagtaaaccgatctccaaagatttccttttggaaacgctttttcccctccttaatttttatattccttactgttttactaaatattaagtgttctttgacaattttggtgctcatgtgttttggggacaaaagtgaaatgaatctgtcattataccagaaagttaaattctcagatcaaatgtgccttaataaatttgttttcatttagatttcaaacagtgatagacttgccattttaatacacgtcattggagggctgcgtatttgtaaatagcctgatgctcatttggaaaaataaaccagtgaacaatatttttctattgt

SEQ ID NO: 10204 - protein, 145 aa, Homo sapiens; identical to SEQ ID NO: 10200

SEQ ID NO: 10205 - DNA, 4478 bp, Homo sapiens
ggctcctgttgcaatggcgagctaagccggaggatgtgcagctgcggcggcggcgccggctacgaagaggacggggacaggcgccgtgcgaaccgagcccagccagccggaggacgcgggcagggcgggacgggagcccggactcgtctgccgccgccgtcgtcgccgtcgtgccggccccgcgtccccgcgcgcgagcgggaggagccgccgccacctcgcgcccgagccgccgctagcgcgcgccgggcatggtcccctcttaaaggcgcaggccgcggcggcgggggcgggcgtgcggaacaaagcgccggcgcggggcctgcgggcggctcgggggccgcgatgggcgcggcgggcccgcggcggcggcggcgctgcccgggccgggcctcgcggcgctagggcgggctggcctccgcgggcgggggcagcgggctgagggcgcgcggagcctgcggcggcggcccggcgggcggagcggcgcgggcatggccgcgcgcggccggcgcgcctggctcagcgtgctgctcgggctcgtcctgggcttcgtgctggcctcgcggctcgtcctgccccgggcttccgagctgaagcgagcgggcccacggcgccgcgccagccccgagggctgccggtccgggcaggcggcggcttcccaggccggcggggcgcgcggcgatgcgcgcggggcgcagctctggccgcccggctcggacccagatggcggcccgcgcgacaggaactttctcttcgtgggagtcatgaccgcccagaaatacctgcagactcgggccgtggccgcctacagaacatggtccaagacaattcctgggaaagttcagttcttctcaagtgagggttctgacacatctgtaccaattccagtagtgccactacggggtgtggacgactcctacccgccccagaagaagtccttcatgatgctcaagtacatgcacgaccactacttggacaagtatgaatggtttatgagagcagatgatgacgtgtacatcaaaggagaccgtctggagaacttcctgaggagtttgaacagcagcgagcccctctttcttgggcagacaggcctgggcaccacggaagaaatgggaaaactggccctggagcctggtgagaacttctgcatgggggggcctggcgtgatcatgagccgggaggtgcttcggagaatggtgccgcacattggcaagtgtctccgggagatgtacaccacccatgaggacgtggaggtgggaaggtgtgtccggaggtttgcaggggtgcagtgtgtctggtcttatgagatgcagcagcttttttatgagaattacgagcagaacaaaaaggggtacattagagatctccataacagtaaaattcaccaagctatcacattacaccccaacaaaaacccaccctaccagtacaggctccacagctacatgctgagccgcaagatatccgagctccgccatcgcacaatacagctgcaccgcgaaattgtcctgatgagcaaatacagcaacacagaaattcataaagaggacctccagctgggaatccctccctccttcatgaggtttcagccccgccagcgagaggagattctggaatgggagtttctgactggaaaatacttgtattcggcagttgacggccagccccctcgaagaggaatggactccgcccagagggaagccttggacgacattgtcatgcaggtcatggagatgatcaatgccaacgccaagaccagagggcgcatcattgacttcaaagagatccagtacggctaccgccgggtgaaccccatgtatggggctgagtacatcctggacctgctgcttctgtacaaaaagcacaaagggaagaaaatgacggtccctgtgaggaggcacgcgtatttacagcagactttcagcaaaatccagtttgtggagcatgaggagctggatgcacaagagttggccaagagaatcaatcaggaatctggatccttgtcctttctctcaaactccctgaagaagctcgtcccctttcagctccctgggtcgaagagtgagcacaaagaacccaaagataaaaagataaacatactgattcctttgtctgggcgtttcgacatgtttgtgagatttatgggaaactttgagaagacgtgtcttatccccaatcagaacgtcaagctcgtggttctgcttttcaattctgactccaaccctgacaaggccaaacaagttgaactgatgagagattaccgcattaagtaccctaaagccgacatgcagattttgcctgtgtctggagagttttcaagagccctggccctggaagtaggatcctcccagtttaacaatgaatctttgctcttcttctgcgacgtcgacctcgtgtttactacagaattccttcagcgatgtcgagcaaatacagttctgggccaacaaatatattttccaatcatcttcagccagtatgacccaaagattgtttatagtgggaaagttcccagtgacaaccattttgcctttactcagaaaactggcttctggagaaactatgggtttggcatcacgtgtatttataagggagatcttgtccgagtgggtggctttgatgtttccatccaaggctgggggctggaggatgtggaccttttcaacaaggttgtccaggcaggtttgaagacgtttaggagccaggaagtaggagtagtccacgtccaccatcctgtcttttgtgatcccaatcttgaccccaaacagtacaaaatgtgcttggggtccaaagcatcgacctatgggtccacccagcagctggctgagatgtggctggaaaaaaatgatccaagttacagtaaaagcagcaataataatggctcagtgaggacagcctaatgtccagctttgctggaaaagacgtttttaattatctaatttatttttcaaaaattttttgtatgatcagtttttgaagtccgtatacaaggatatattttacaagtggttttcttacataggactcctttaagattgagctttctgaacaagaaggtgatcagtgtttgcctttgaacacatcttcttgctgaacattatgtagcagacctgcttaactttgacttgaaatgtacctgatgaacaaaacttttttaaaaaaatgttttcttttgagaccctttgctccagtcctatggcagaaaacgtgaacattcctgcaaagtattattgtaacaaaacactgtaactctggtaaatgttctgttgtgattgttaacattccacagattctaccttttgtgttttgttttttttttttacaattgttttaaagccatttcatgttccagttgtaagataaggaaatgtgataatagctgtttcatcattgtcttcaggagagctttccagagttgatcatttcctctcatggtactctgctcagcatggccacgtaggttttttgtttgttttgttttgttctttttttgagacggagtctcactctgttacccaggctggaatgcagtggcgcaatcttggctcactttaacctccacttccctggttcaagcaattcccctgcctttgcctcccgagtagctgggattacaggcacacaccaccacgcccagctagtttttttgtatttttagtagagacggggtttcaccatgcaagcccagctggccacgtaggttttaaagcaaggggcgtgaagaaggcacagtgaggtatgtggctgttctcgtggtagttcattcggcctaaatagacctggcattaaatttcaagaaggatttggcattttctcttcttgacccttctctttaaagggtaaaatattaatgtttagaatgacaaagatgaattattacaataaatctgatgtacacagactgaaacatacacacatacaccctaatcaaaacgttggggaaaaatgtatttggttttgttcctttcatcctgtctgtgttatgtgggtggagatggttttcattctttcattactgttttgttttatcctttgtatctgaaatacctttaatttatttaatatctgttgttcagagctctgccatttcttgagtacctgttagttagtattatttatgtgtatcgggagtgtgtttagtctgttttatttgcagtaaaccgatctccaaagatttccttttggaaacgctttttcccctccttaatttttatattccttactgttttactaaatattaagtgttctttgacaattttggtgctcatgtgttttggggacaaaagtgaaatgaatctgtcattataccagaaagttaaattctcagatcaaatgtgccttaataaatttgttttcatttagatttcaaacagtgatagacttgccattttaatacacgtcattggagggctgcgtatttgtaaatagcctgatgctcatttggaaaaataaaccagtgaacaatatttttctattgt

SEQ ID NO: 10206 - protein, 802 aa, Homo sapiens; identical to SEQ ID NO: 1629

SEQ ID NO: 10207 - DNA, 819 bp, Homo sapiens
ggttgccagcacttcagttagacttgacacagaacagctggatttctagcttccctttaaacccggctgcactgggcctgtgtggcacgtcctggtccccccgagctccatcccttctggcttacatccaccttgtccctgacaaaagggtgagaaaaccacttctctgtaatgaactgaaacgctgcctaagtccgaatgggaagttgtcgctctgtagcagtgatggtctgtagctgaggctgaaccgtgtacgtgctgaaggacagtcatgtaaacagttaacaggaagaacgaggacttaatgagaatgttggctctccttgcagcggacaagaaggacatttgctaatgaagactgtggaaggtatttgttaaccaaagattagatatgggtagttgatggttattcccagctgggctagaagttcctgggaatagcgtgaccttggtattagcccctctcagattcactggagaatgacgcagagccctgaaacatctcacaggaagggagatggctttgctggagttgaaggatatggaggcactttttataacaaagattaagggttgtttcatggacagtggaaattaaatgaagtcatcagtgccactataagcatcttaagaaggtttctttgctgagttttttttaagcaaggaatactcttgtgagtattaagttaacctgtctagattgagttgtgttttcttctgcagtacttctaactttctgttttataatattcttctaggtgatgtgccaaattatagattattgaaataccttataataaaatcctcttaaactttgaa

SEQ ID NO: 10208 - protein, 77 aa, Homo sapiens
LPALQLDLTQNSWISSFPLNPAALGLCGTSWSPRAPSLLAYIHLVPDKRVRKPLLCNELKRCLSPNGKLSLCSSDGL

SEQ ID NO: 10209 - DNA, 1355 bp, Homo sapiens
acttttgcgacgcgcagccatgatggtgggctccctgctggccacctatggctggtacatcgtcttcagctgcatccttctctacgtggtctttcagaagctttccgcccggctaagagccttgaggcagaggcagctggaccgagctgcggctgctgtggaacctgatgttgttgttaaacgacaagaagctttagcagctgctcgactgaaaatgcaagaagaactaaatgcgcaagttgaaaagcataaggaaaaactgaaacaacttgaagaagaaaaaaggagacagaagattgaaatgtgggacagcatgcaagaaggaaaaagttacaaaggaaatgcaaagaagccccaggaggaagacagtcctgggccttccacttcatctgtcctgaaacggaaatcggacagaaagcctttgcggggaggaggttataacccgttgtctggtgaaggaggcggagcttgctcctggagacctggacgcagaggcccgtcatctggcggatgaggctaagaatcttgtagaatattccgtggttgcttcttgaccaagggaaatacagtctggctgtgagagacttaaaatctcttgaggagcgctctggagaatggctgaaggagaggaaacaggagccttgagcagtgtaattacaaacaaataggttggcatagtcttaagtctttgagtctagagagatttgagttttgttttgcctgtggaggcaattgggggtttcaggtcaaagagagggtcagtggaaacaagggtgggccttgtgaggtgtggggaagccctgggaccctcactccccttccagtgtgtaactggattggctcccaccagcccagaagatttacgacgtgggaaatggtatacttggattaaaatatttcatccagatttgtttacatctagagagaaccccttgtaggttataaggaaactttttaacattcttccttgaatatattttctgtagctgaaaatgtttgtgaagtggctgtcaactacacatcgcatgagtagaggggctctgggtcggggtttcatatgcagcagagcagctcccttgctgccgtccatcaagagccctcaacacaagagtttgttataaatagaaataaacgacaaaaagtagaggggtatgtttaagtacactattagatgtgactgactaccttgaaacctgatttttttccatggggagaaacagtgcttgaattctgcatgccccccttgcatctagcaccttttggtaggggtggaaggagggtgtcagggagaatgattaggagataatggaggggaggggaaacttgcgttgtgtaatagcatttgaagagcactt

SEQ ID NO: 10210 - protein, 164 aa, Homo sapiens
MMVGSLLATYGWYIVFSCILLYVVFQKLSARLRALRQRQLDRAAAAVEPDVVVKRQEALAAARLKMQEELNAQVEKHKEKLKQLEEEKRRQKIEMWDSMQEGKSYKGNAKKPQEEDSPGPSTSSVLKRKSDRKPLRGGGYNPLSGEGGGACSWRPGRRGPSSGG

SEQ ID NO: 10211 - DNA, 1483 bp, Homo sapiens
acgtgtgcgtaggagcgcaccggaagcgcccggctggaggcgcggcggcagggctgggcggcggcggcggcggcggtcatggaacgccaagaggagtctctgtccgcgcggccggccctggagaccgaggggctgcgcttcctgcacaccacggtgggctccctgctggccacctatggctggtacatcgtcttcagctgcatccttctctacgtggtctttcagaagctttccgcccggctaagagccttgaggcagaggcagctggaccgagctgcggctgctgtggaacctgatgttgttgttaaacgacaagaagctttagcagctgctcgactgaaaatgcaagaagaactaaatgcgcaagttgaaaagcataaggaaaaactgaaacaacttgaagaagaaaaaaggagacagaagattgaaatgtgggacagcatgcaagaaggaaaaagttacaaaggaaatgcaaagaagccccaggaggaagacagtcctgggccttccacttcatctgtcctgaaacggaaatcggacagaaagcctttgcggggaggaggttataacccgttgtctggtgaaggaggcggagcttgctcctggagacctggacgcagaggcccgtcatctggcggatgaggctaagaatcttgtagaatattccgtggttgcttcttgaccaagggaaatacagtctggctgtgagagacttaaaatctcttgaggagcgctctggagaatggctgaaggagaggaaacaggagccttgagcagtgtaattacaaacaaataggttggcatagtcttaagtctttgagtctagagagatttgagttttgttttgcctgtggaggcaattgggggtttcaggtcaaagagagggtcagtggaaacaagggtgggccttgtgaggtgtggggaagccctgggaccctcactccccttccagtgtgtaactggattggctcccaccagcccagaagatttacgacgtgggaaatggtatacttggattaaaatatttcatccagatttgtttacatctagagagaaccccttgtaggttataaggaaactttttaacattcttccttgaatatattttctgtagctgaaaatgtttgtgaagtggctgtcaactacacatcgcatgagtagaggggctctgggtcggggtttcatatgcagcagagcagctcccttgctgccgtccatcaagagccctcaacacaagagtttgttataaatagaaataaacgacaaaaagtagaggggtatgtttaagtacactattagatgtgactgactaccttgaaacctgatttttttccatggggagaaacagtgcttgaattctgcatgccccccttgcatctagcaccttttggtaggggtggaaggagggtgtcagggagaatgattaggagataatggaggggaggggaaacttgcgttgtgtaatagcatttgaagagcactt

SEQ ID NO: 10212 - protein, 187 aa, Homo sapiens
MERQEESLSARPALETEGLRFLHTTVGSLLATYGWYIVFSCILLYVVFQKLSARLRALRQRQLDRAAAAVEPDVVVKRQEALAAARLKMQEELNAQVEKHKEKLKQLEEEKRRQKIEMWDSMQEGKSYKGNAKKPQEEDSPGPSTSSVLKRKSDRKPLRGGGYNPLSGEGGGACSWRPGRRGPSSGG

SEQ ID NO: 10213 - DNA, 1143 bp, Homo sapiens
acttttgcgacgcgcagccatgatggtgggctccctgctggccacctatggctggtacatcgtcttcagctgcatccttctctacgtggtctttcagaagctttccgcccggctaagagccttgaggcagaggcagctggaccgagctgcggctgctgtggaacctgatgttgttgttaaacgacaagaagctttagcagctgctcgactgaaaatgcaagaagaactaaatgcgcaagttgaaaagcataaggaaaaactgaaacaacttgaagaagaaaaaaggagacagaagattgaaatgtgggacagcatgcaagaaggaaaaagttacaaaggaaatgcaaagaagccccaggaggaagacagtcctgggccttccacttcatctgtcctgaaacggaaatcggacagaaagcctttgcggggaggaggttataacccgttgtctggtgaaggaggcggagcttgctcctggagacctggacgcagaggcccgtcatctggcggatgaggctaagaatcttgtagaatattccgtggttgcttcttgaccaagggaaatacagtctggctgtgagagacttaaaatctcttgaggagcgctctggagaatggctgaaggagaggaaacaggagccttgagcagtgtaattacaaacaaataggttggcatagtcttaagtctttgagtctagagagatttgagttttgttttgcctgtggaggcaattgggggtttcaggtcaaagagagggtcagtggaaacaagggtgggccttgtgaggtgtggggaagccctgggaccctcactccccttccagtgtgtaactggattggctcccaccagcccagaagatttacgacgtgggaaatggtatacttggattaaaatatttcatccagatttgtttacatctagagagaaccccttgtaggttataaggaaactttttaacattcttccttgaatatattttctgtagctgaaaatgtttgtgaagtggctgtcaactacacatcgcatgagtagaggggctctgggtcggggtttcatatgcagcagagcagctcccttgctgccgtccatcaagagccctcaacacaagagtttgttataaatagaaataaacgacaaaaagt

SEQ ID NO: 10214 - protein, 164 aa, Homo sapiens; identical to SEQ ID NO: 10210

SEQ ID NO: 10215 - DNA, 1248 bp, Homo sapiens
aagcgcccggctggaggcgcggcggcagggctgggcggcggcggcggcggcggtcatggaacgccaagaggagtctctgtccgcgcggccggccctggagaccgaggggctgcgcttcctgcacaccacggtgggctccctgctggccacctatggctggtacatcgtcttcagctgcatccttctctacgtggtctttcagaagctttccgcccggctaagagccttgaggcagaggcagctggaccgagctgcggctgctgtggaacctgatgttgttgttaaacgacaagaagctttagcagctgctcgactgaaaatgcaagaagaactaaatgcgcaagttgaaaagcataaggaaaaactgaaacaacttgaagaagaaaaaaggagacagaagattgaaatgtgggacagcatgcaagaaggaaaaagttacaaaggaaatgcaaagaagccccaggaggaagacagtcctgggccttccacttcatctgtcctgaaacggaaatcggacagaaagcctttgcggggaggaggttataacccgttgtctggtgaaggaggcggagcttgctcctggagacctggacgcagaggcccgtcatctggcggatgaggctaagaatcttgtagaatattccgtggttgcttcttgaccaagggaaatacagtctggctgtgagagacttaaaatctcttgaggagcgctctggagaatggctgaaggagaggaaacaggagccttgagcagtgtaattacaaacaaataggttggcatagtcttaagtctttgagtctagagagatttgagttttgttttgcctgtggaggcaattgggggtttcaggtcaaagagagggtcagtggaaacaagggtgggccttgtgaggtgtggggaagccctgggaccctcactccccttccagtgtgtaactggattggctcccaccagcccagaagatttacgacgtgggaaatggtatacttggattaaaatatttcatccagatttgtttacatctagagagaaccccttgtaggttataaggaaactttttaacattcttccttgaatatattttctgtagctgaaaatgtttgtgaagtggctgtcaactacacatcgcatgagtagaggggctctgggtcggggtttcatatgcagcagagcagctcccttgctgccgtccatcaagagccctcaacacaagagtttgttataaatagaaataaacgacaaaaagt

SEQ ID NO: 10216 - protein, 187 aa, Homo sapiens; identical to SEQ ID NO: 10212

SEQ ID NO: 10217 - DNA, 2452 bp, Homo sapiens
agcgcccggctggaggcgcggcggcagggctgggcggcggcggcggcggcggtcatggaacgccaagaggagtctctgtccgcgcggccggccctggagaccgaggggctgcgcttcctgcacaccacgggtgagtcgttgcggggcagccgggcgcgcgccgccacttttgcgacgcgcagccatgatgggtgggtcgtccgccgctgcaccgggcgccggagcctgggaggcctgggaacggtcgggcgttggcgcttacgcggaccttgggcagcaggcccggaccttgcgcggaggcttctcgggagccgcacttccctgggcggctcggctgtcccttgtttgcgcaagtcttttttgcgaaccaagcccttcctgtggtagttactggggtcactcggccgttggcgtttgcctctgggacccgtcccacacagccccatacacactcctgactccccgcgctgtcacccctttctatgtggctctgaaaggcctttgccttcctgattcagattagttgctcttcattcttcaaaacccagttgctgtgccctccacactctaactgcccccgactccccagatggttgggaagtctcacttctcagtgatccctgaattgtcgcacttcttgagttcgtgttttaacgatctacttaggaggctttttcctcagcctagaccatgaaggctttgagggcaggagttacactttgtgtttgttgagtcttatggaaaggtcaactagtagtgtcatttttagttttttgaaaactgtttttcttttcagtgggctccctgctggccacctatggctggtacatcgtcttcagctgcatccttctctacgtggtctttcagaagctttccgcccggctaagagccttgaggcagaggcagctggaccgagctgcggctgctgtggaacctgatgttgttgttaaacgacaagaagctttagcagctgctcgactgaaaatgcaagaagaactaaatgcgcaagttgaaaagcataaggaaaaactgaaacaagtatgaactggtttcagtttgaatgtgtgcatagaaattgtctgaggtttagtggctaacgatgcctgtgtctgtgttgtctataagcttctaggaccaggtcctatcccattagattcaataagcatttcagttcctaccatgtaagtattggtgatatcaagaagaatacacgattgttagggaacactagatgtgtgaatatattaccatgaaaggtccagagcacaaaaggagggacaggctggagcagggagcatgtgagtgtgtgtgtgcatgtgcctgtgtcttccccattaccaaaaatgtcctgacaggagtgagtttcagaagaatggagtcagtaatctttttcatgaaacattttgctttctttaatagtgtacaaaaaccaaagctgctctatgtgagttaaactcacactaccagatcacaacagttttattaactaaagaaaacgagggtgaagtttgttctgaaagacatttaaattaagaattatcagagttagctttgtctttgagagaaatggcagcttctgaattctttctgtaaaatgtgattgtttctcagcttgaagaagaaaaaaggagacagaagattgaaatgtgggacagcatgcaagaaggaaaaagttacaaaggaaatgcaaagaagccccaggaggaagacagtcctgggccttccacttcatctgtcctgaaacggaaatcggacagaaagcctttgcggggaggaggttataacccgttgtctggtgaaggaggcggagcttgctcctggagacctggacgcagaggcccgtcatctggcggatgaggctaagaatcttgttagtgtcacttttgacattagcaagatgaacccttaaccctcgattcaattgccttacgcacgcttttcacagtgactagccaaggggaggtggggttgatttctgttcctaactacacctgcatatgtcagggctccagtcagcaaaaggtatagatgttgcctctaggcatgaggtcattggtcacattctacttggagacagtgattgcattcattgatttcatggttaattgctagttggtaggtaaaggcctctagatgattagcaatcttgataaaagaggcctagtaatgttcttttgaggttagaaatccttgctgctaggacagtctctgtgacaggttgcgttgaatgatgtcttccttatcaatggtgagcccaccagtgaggattactgatgtggacagttgatggggtttgtttctgtatatttatttttatgtacagaactttgtaaaaacgaaactatttaaaaaacaagaataacatttttagcatctttattcaaggagatttatggacttcaatttgtctatcaaacattaaatagctttttattacaacctctaactatta

SEQ ID NO: 10218 - protein, 70 aa, Homo sapiens [sequence omitted]

SEQ ID NO: 10219 - DNA, 1262 bp, Homo sapiens
gaccacgaccgcgtccgggcgcgccacgtgtgcgtaggagcgcaccggaagcgcccggctggaggcgcggcggcagggctgggcggcggcggcggcggcggtcatggaacgccaagaggagtctctgtccgcgcggccggccctggagaccgaggggctgcgcttcctgcacaccacggtgggctccctgctggccacctatggctggtacatcgtcttcagctgcatccttctctacgtggtctttcagaagctttccgcccggctaagagccttgaggcagaggcagctggaccgagctgcggctgctgtggaacctgatgttgttgttaaacgacaagaagctttagcagctgctcgactgaaaatgcaagaagaactaaatgcgcaagttgaaaagcataaggaaaaactgaaacaacttgaagaagaaaaaaggagacagaagattgaaatgtgggacagcatgcaagaaggaaaaagttacaaaggaaatgcaaagaagccccaggaggaagacagtcctgggccttccacttcatctgtcctgaaacggaaatcggacagaaagcctttgcggggaggaggttataacccgttgtctggtgaaggaggcggagcttgctcctggagacctggacgcagaggcccgtcatctggcggatgaggctaagaatcttgttagtgtcacttttgacattagcaagatgaacccttaaccctcgattcaattgccttacgcacgcttttcacagtgactagccaaggggaggtggggttgatttctgttcctaactacacctgcatatgtcagggctccagtcagcaaaaggtatagatgttgcctctaggcatgaggtcattggtcacattctacttggagacagtgattgcattcattgatttcatggttaattgctagttggtaggtaaaggcctctagatgattagcaatcttgataaaagaggcctagtaatgttcttttgaggttagaaatccttgctgctaggacagtctctgtgacaggttgcgttgaatgatgtcttccttatcaatggtgagcccaccagtgaggattactgatgtggacagttgatggggtttgtttctgtatatttatttttatgtacagaactttgtaaaaacgaaactatttaaaaaacaagaataacatttttagcatctttattcaaggagatttatggacttcaatttgtctatcaaacattaaatagctttttattacaacctctaactatta

SEQ ID NO: 10220 - protein, 187 aa, Homo sapiens; identical to SEQ ID NO: 10212

SEQ ID NO: 10221 - DNA, 893 bp, Homo sapiens
atcacaacagttttattaactaaagaaaacgagggtgaagtttgttctgaaagacatttaaattaagaattatcagagttagctttgtctttgagagaaatggcagcttctgaattctttctgtaaaatgtgattgtttctcagcttgaagaagaaaaaaggagacagaagattgaaatgtgggacagcatgcaagaaggaaaaagttacaaaggaaatgcaaagaagccccaggaggaagacagtcctgggccttccacttcatctgtcctgaaacggaaatcggacagaaagcctttgcggggaggaggttataacccgttgtctggtgaaggaggcggagcttgctcctggagacctggacgcagaggcccgtcatctggcggatgaggctaagaatcttgttagtgtcacttttgacattagcaagatgaacccttaaccctcgattcaattgccttacgcacgcttttcacagtgactagccaaggggaggtggggttgatttctgttcctaactacacctgcatatgtcagggctccagtcagcaaaaggtatagatgttgcctctaggcatgaggtcattggtcacattctacttggagacagtgattgcattcattgatttcatggttaattgctagttggtaggtaaaggcctctagatgattagcaatcttgataaaagaggcctagtaatgttcttttgaggttagaaatccttgctgctaggacagtctctgtgacaggttgcgttgaatgatgtcttccttatcaatggtgagcccaccagtgaggattactgatgtggacagttgatggggtttgtttctgtatatttatttttatgtacagaactttgtaaaaacgaaactatttaaaaaacaagaat

SEQ ID NO: 10222 - protein, 70 aa, Homo sapiens [sequence omitted]

SEQ ID NO: 10223 - DNA, 1170 bp, Homo sapiens
gaccacgaccgcgtccgggcgcgccacgtgtgcgtaggagcgcaccggaagcgcccggctggaggcgcggcggcagggctgggcggcggcggcggcggcggtcatggaacgccaagaggagtctctgtccgcgcggccggccctggagaccgaggggctgcgcttcctgcacaccacggtgggctccctgctggccacctatggctggtacatcgtcttcagctgcatccttctctacgtggtctttcagaagctttccgcccggctaagagccttgaggcagaggcagctggaccgagctgcggctgctgtggaacctgatgttgttgttaaacgacaagaagctttagcagctgctcgactgaaaatgcaagaagaactaaatgcgcaagttgaaaagcataaggaaaaactgaaacaacttgaagaagaaaaaaggagacagaagattgaaatgtgggacagcatgcaagaaggaaaaagttacaaaggaaatgcaaagaagccccaggaggaagacagtcctgggccttccacttcatctgtcctgaaacggaaatcggacagaaagcctttgcggggaggaggttataacccgttgtctggtgaaggaggcggagcttgctcctggagacctggacgcagaggcccgtcatctggcggatgaggctaagaatcttgttagtgtcacttttgacattagcaagatgaacccttaaccctcgattcaattgccttacgcacgcttttcacagtgactagccaaggggaggtggggttgatttctgttcctaactacacctgcatatgtcagggctccagtcagcaaaaggtatagatgttgcctctaggcatgaggtcattggtcacattctacttggagacagtgattgcattcattgatttcatggttaattgctagttggtaggtaaaggcctctagatgattagcaatcttgataaaagaggcctagtaatgttcttttgaggttagaaatccttgctgctaggacagtctctgtgacaggttgcgttgaatgatgtcttccttatcaatggtgagcccaccagtgaggattactgatgtggacagttgatggggtttgtttctgtatatttatttttatgtacagaactttgtaaaaacgaaactatttaaaaaacaagaat

SEQ ID NO: 10224 - protein, 187 aa, Homo sapiens; identical to SEQ ID NO: 10212

SEQ ID NO: 10225 - DNA, 844 bp, Homo sapiens
ggcgcggcggcagggctgggcggcggcggcggcggcggtcatggaacgccaagaggagtctctgtccgcgcggccggccctggagaccgaggggctgcgcttcctgcacaccacggtgggctccctgctggccacctatggctggtacatcgtcttcagctgcatccttctctacgtggtctttcagaagctttccgcccggctaagagccttgaggcagaggcagctggaccgagctgcggctgctgtggaacctgatgttgttgttaaacgacaagaagctttagcagctgctcgactgaaaatgcaagaagaactaaatgcgcaagttgaaaagcataaggaaaaactgaaacaacttgaagaagaaaaaaggagacagaagattgaaatgtgggacagcatgcaagaaggaaaaagttacaaaggaaatgcaaagaagccccaggtgactggagacctcggccggctggcatgcggtagatgaagattgccaagtagaatgttttaattgcttcttacactactgtgtgtgttcaaacaggaggaagacagtcctgggccttccacttcatctgtcctgaaacggaaatcggacagaaagcctttgcggggaggaggtaagcaccactgatgtcaaatgttaacagattttcaacacttacaggatatagttaccttttaggaacaagattgtttgtttctttgtccataaattaagactaattccttaggattgtgaagattcaataaaggaaacagatgcaaatcacctcctaggtcctcactaagtacttagaaggattgtacttatagtattctaacttgatccttctgcagcccc

SEQ ID NO: 10226 - protein, 148 aa, Homo sapiens
MERQEESLSARPALETEGLRFLHTTVGSLLATYGWYIVFSCILLYVVFQKLSARLRALRQRQLDRAAAAVEPDVVVKRQEALAAARLKMQEELNAQVEKHKEKLKQLEEEKRRQKIEMWDSMQEGKSYKGNAKKPQVTGDLGRLACGR

SEQ ID NO: 10227 - DNA, 349 bp, Homo sapiens
gcagggctgggcggcggcggcggcggcggtcatggaacgccaagaggagtctctgtccgcgcggccggccctggagaccgaggggctgcgcttcctgcacaccacggtgggctccctgctggccacctatggctggtacatcgtcttcagctgcatccttctctacgtggtctttcagaagctttccgcccggctaagagccttgaggcagaggcagctggaccgagctgcggctgctgtggaacctgatgttgttgttaaacgacaagaagctttagcagctgctcgactgaaaatgcaagaagaactaaatgcgcaagttgaaaagcataaggaaaaactgaaacaa

SEQ ID NO: 10228 - protein, 105 aa, Homo sapiens
MERQEESLSARPALETEGLRFLHTTVGSLLATYGWYIVFSCILLYVVFQKLSARLRALRQRQLDRAAAAVEPDVVVKRQEALAAARLKMQEELNAQVEKHKEKLK

SEQ ID NO: 10229 - DNA, 2792 bp, Homo sapiens
ggagttctccagtttgtaagacggctcctcgcctcccctctgcttcttcctgtacaaaggccgtcaccctgcaagccttgttgctctcaacatgggttgtctctacttgttcctattttagagttactgcagaatgccttgccatctagcttggttgtagctggtaaccataggtttttgtttttttgctatccttattgcactatgttttatggaacaattggagaagattaaaaattcaccctgcccactgggcgtggtggctcacgcctgtaatcccagctctttgggaggccgaggcaggcagatcacgaggtcaggagatcgagaccatcgtggctaatacagtgaaaccccgtctctactaaaaatgcaaaaaaaattagccgggcatggtggtgggcgcctgtagtcccagctacttgggaggctgaggcaggagaatggcatgaattcgggaggcggagcttgcagtgagccaagatcacgccactgtactccagcctgggcaacagagcgagactccgtctcaaaaaaaaaaaaaaaaaaaatcaccctgccttctttccattaattcgatcatttttaagctatactattccttgtccctgcaaattttatttaaagagattttcaggggcagctaggataaatgtaccttctttcaaaagacagtatacctttgttgttcttagacgctgaagctggcgctagcaggaaagcccacttacaccaagattctggcttgcagttcccagtgtgaataggttgctccagagtcccatcagctttgccattgttttcttttccaaatcatggctcagcagccactttgagattcctgtaggaaagcaatttcttatctcctgctattgagacagaagctgttaatgccaagattttaagaagctcccatgtattcatcggtagaaattatttaaacatttgtgatgtgctagtattgggcttgttgctagagagtaaaaattcagtaaataatgaaaagacaacttgcttcaaaagcactctccatttcagaatctcaaaatagcgtgtggtattcgcgttcttacctgtggctattgcttgacagggtgatctggaccctctggcatctctcaaatcgctgacttacctaagtatcctaagaaatccggtaaccaataagaagcattacagattgtatgtgatttataaagttccgcaagtcagagtactggatttccagaaagtgaaactaaaagtaagtagtaatctgttgcttgtgagccattatagagttgtgtgtttttctttatatttttgttactgattattaaaattgtctaaatgagtaaattttaccattagtttgtaataaaagtgggagggaaaatgttacatcacatttttttctaatagcagagtttatgatagaacttttaagttggagctctcttatgtaatgctggctattccgaagttcgcaaagtgctgaggccacggtgagcagtcttaacagtggattgtctgcctagatacgttcccagcggagaacttaatgtaacctactttcgtgcagctccgtgtgttaggatgatttttccctttattaggaattcattattttattattcatttaattgccttcttagttccctgggatcccctccttggagctaggagaatgaactttcttcagggagctctaccaaagaaagaagaccactgtgtcttctcttaatttgaaattgctttttggtattttcaccagcccggagtactgtaggagagttcgcttccatgtcttctgaggaatgcatctaaatgcatgtggtattcctatttccattaactctgtgtgtggtgtcgctgtaggagcgtcaggaagcagagaaaatgttcaagggcaaacggggtgcacagcttgcaaaggatattgccaggagaagcaaaacgtaagacacggatatccaacttaactctacttcaccttcagaaacatgatctgatctgtctggcagttcgtctcctacaaaattaaccaaaaactctgacatattaatgtggtattaaatttgagtgcttatagtccatgtacatcaatggtccacacatcacaagaaatttctaccagcttagcagagcaaatatttcagtagtcagtcttcatgtgataccatgtacatcctattttctatataggaagatgaactggatggtgtttctgaaggagagagttcttgtatcagtttgttaacaaagataagatactacactggttgaattactttcaaaagcttttgaaagtaaaagagaagcaacttctgttggtctaggtctaacagttatgttcttccccctcttaagttttaatccaggtgctggtttgccaactgacaaaaagaaaggtgggccatctccaggggatgtagaagcaatcaagaatgccatagcaaatgcttcaactctggctgaagtggagaggctgaaggggttgctgcagtctggtcagatccctggcagagaacgcagatcagggcccactgatgatggtgaagaagagatggaagaagacacagtcacaaacgggtcctgagcagtgaggcagatgtataataataggccctcttggaacaagtcttgcttttcgaacatggtataatagccttgtttgtgttagcaaagtggaatctatcagcattgttgaaatgcttaagactgctgctgataattttgtaatataagttttgaaatctaaatgtcaattttctacaaattataaaaataaactccactcactatgctaccaa

SEQ ID NO: 10230 - protein, 82 aa, Homo sapiens [sequence omitted]

SEQ ID NO: 10231 - DNA, 673 bp, Homo sapiens
gccgtataggtgagggacttgatcaggctctgccctgtctgacagaactcattctcaccaataatagtctcgtggaactgggtgatctggaccctctggcatctctcaaatcgctgacttacctaagtatcctaagaaatccggtaaccaataagaagcattacagattgtatgtgatttataaagttccgcaagtcagagtactggatttccagaaagtgaaactaaaattttaatccaggtgctggtttgccaactgacaaaaagaaaggtgggccatctccaggggatgtagaagcaatcaagaatgccatagcaaatgcttcaactctggctgaagtggagaggctgaaggggttgctgcagtctggtcagatccctggcagagaacgcagatcagggcccactgatgatggtgaagaagagatggaagaagacacagtcacaaacgggtcctgagcagtgaggcagatgtataataataggccctcttggaacaagtcttgcttttcgaacatggtataatagccttgtttgtgttagcaaagtggaatctatcagcattgttgaaatgcttaagactgctgctgataattttgtaatataagttttgaaatctaaatgtcaattttctacaaattataaaaataaactccactcactatgctaccaa

SEQ ID NO: 10232 - protein, 77 aa, Homo sapiens
RIGEGLDQALPCLTELILTNNSLVELGDLDPLASLKSLTYLSILRNPVTNKKHYRLYVIYKVPQVRVLDFQKVKLKF

SEQ ID NO: 10233 - DNA, 700 bp, Homo sapiens
gcgcgggggaacgggaggctgcaggatggtcaagctgacggcggagctgatcgagcaggcggcgcagtacaccaacgcggtgcgcgaccgggagctggacctccgggggtgatctggaccctctggcatctctcaaatcgctgacttacctaagtatcctaagaaatccggtaaccaataagaagcattacagattgtatgtgatttataaagttccgcaagtcagagtactggatttccagaaagtgaaactaaaattttaatccaggtgctggtttgccaactgacaaaaagaaaggtgggccatctccaggggatgtagaagcaatcaagaatgccatagcaaatgcttcaactctggctgaagtggagaggctgaaggggttgctgcagtctggtcagatccctggcagagaacgcagatcagggcccactgatgatggtgaagaagagatggaagaagacacagtcacaaacgggtcctgagcagtgaggcagatgtataataataggccctcttggaacaagtcttgcttttcgaacatggtataatagccttgtttgtgttagcaaagtggaatctatcagcattgttgaaatgcttaagactgctgctgataattttgtaatataagttttgaaatctaaatgtcaattttctacaaattataaaaataaactccactcactatgctaccaa

SEQ ID NO: 10234 - protein, 70 aa, Homo sapiens
SSRRRSTPTRCATGSWTSGGDLDPLASLKSLTYLSILRNPVTNKKHYRLYVIYKVPQVRVLDFQKVKLKF

SEQ ID NO: 10235 - DNA, 2081 bp, Homo sapiens
ggggcacgctgggacgtctcgctggcgggaggccacgggctttccacagcgcgggggaacgggaggctgcaggatggtcaagctgacggcggagctgatcgagcaggcggcgcagtacaccaacgcggtgcgcgaccgggagctggacctccgggggtataaaattcccgtcattgaaaatctaggtgctacgttagaccagtttgatgctattgatttttctgacaatgagatcaggaaactggatggttttcctttgttgagaagactgaaaacattgttagtgaacaacaacagaatatgccgtataggtgagggacttgatcaggctctgccctgtctgacagaactcattctcaccaataatagtctcgtggaactgggtgatctggaccctctggcatctctcaaatcgctgacttacctaagtatcctaagaaatccggtaaccaataagaagcattacagattgtatgtgatttataaagttccgcaagtcagagtactggatttccagaaagtgaaactaaaagtaagtagtaatctgttgcttgtgagccattatagagttgtgtgtttttctttatatttttgttactgattattaaaattgtctaaatgagtaaattttaccattagtttgtaataaaagtgggagggaaaatgttacatcacatttttttctaatagcagagtttatgatagaacttttaagttggagctctcttatgtaatgctggctattccgaagttcgcaaagtgctgaggccacggtgagcagtcttaacagtggattgtctgcctagatacgttcccagcggagaacttaatgtaacctactttcgtgcagctccgtgtgttaggatgatttttccctttattaggaattcattattttattattcatttaattgccttcttagttccctgggatcccctccttggagctaggagaatgaactttcttcagggagctctaccaaagaaagaagaccactgtgtcttctcttaatttgaaattgctttttggtattttcaccagcccggagtactgtaggagagttcgcttccatgtcttctgaggaatgcatctaaatgcatgtggtattcctatttccattaactctgtgtgtggtgtcgctgtaggagcgtcaggaagcagagaaaatgttcaagggcaaacggggtgcacagcttgcaaaggatattgccaggagaagcaaaacgtaagacacggatatccaacttaactctacttcaccttcagaaacatgatctgatctgtctggcagttcgtctcctacaaaattaaccaaaaactctgacatattaatgtggtattaaatttgagtgcttatagtccatgtacatcaatggtccacacatcacaagaaatttctaccagcttagcagagcaaatatttcagtagtcagtcttcatgtgataccatgtacatcctattttctatataggaagatgaactggatggtgtttctgaaggagagagttcttgtatcagtttgttaacaaagataagatactacactggttgaattactttcaaaagcttttgaaagtaaaagagaagcaacttctgttggtctaggtctaacagttatgttcttccccctcttaagttttaatccaggtgctggtttgccaactgacaaaaagaaaggtgggccatctccaggggatgtagaagcaatcaagaatgccatagcaaatgcttcaactctggctgaagtggagaggctgaaggggttgctgcagtctggtcagatccctggcagagaacgcagatcagggcccactgatgatggtgaagaagagatggaagaagacacagtcacaaacgggtcctgagcagtgaggcagatgtataataataggccctcttggaacaagtcttgcttttcgaacatggtataatagccttgtttgtgttagcaaagtggaatctatcagcattgttgaaatgcttaagactgctgctgataattttgtaatataagttttgaaatctaaatgtcaattttctacaaattataaaaataaactccactcactatgctaccaa

SEQ ID NO: 10236 - protein, 175 aa, Homo sapiens
MVKLTAELIEQAAQYTNAVRDRELDLRGYKIPVIENLGATLDQFDAIDFSDNEIRKLDGFPLLRRLKTLLVNNNRICRIGEGLDQALPCLTELILTNNSLVELGDLDPLASLKSLTYLSILRNPVTNKKHYRLYVIYKVPQVRVLDFQKVKLKVSSNLLLVSHYRVVCFSLYFCY

SEQ ID NO: 10237 - DNA, 1055 bp, Homo sapiens
ggggcacgctgggacgtctcgctggcgggaggccacgggctttccacagcgcgggggaacgggaggctgcaggatggtcaagctgacggcggagctgatcgagcaggcggcgcagtacaccaacgcggtgcgcgaccgggagctggacctccgggggtataaaattcccgtcattgaaaatctaggtgctacgttagaccagtttgatgctattgatttttctgacaatgagatcaggaaactggatggttttcctttgttgagaagactgaaaacattgttagtgaacaacaacagaatatgccgtataggtgagggacttgatcaggctctgccctgtctgacagaactcattctcaccaataatagtctcgtggaactgggtgatctggaccctctggcatctctcaaatcgctgacttacctaagtatcctaagaaatccggtaaccaataagaagcattacagattgtatgtgatttataaagttccgcaagtcagagtactggatttccagaaagtgaaactaaaagagcgtcaggaagcagagaaaatgttcaagggcaaacggggtgcacagcttgcaaaggatattgccaggagaagcaaaacttttaatccaggtgctggtttgccaactgacaaaaagaaaggtgggccatctccaggggatgtagaagcaatcaagaatgccatagcaaatgcttcaactctggctgaagtggagaggctgaaggggttgctgcagtctggtcagatccctggcagagaacgcagatcagggcccactgatgatggtgaagaagagatggaagaagacacagtcacaaacgggtcctgagcagtgaggcagatgtataataataggccctcttggaacaagtcttgcttttcgaacatggtataatagccttgtttgtgttagcaaagtggaatctatcagcattgttgaaatgcttaagactgctgctgataattttgtaatataagttttgaaatctaaatgtcaattttctacaaattataaaaataaactccactcactatgctaccaa

SEQ ID NO: 10238 - protein, 255 aa, Homo sapiens; identical to SEQ ID NO: 1635

SEQ ID NO: 10239 - DNA, 705 bp, Homo sapiens
gcgcggggcacgctgggacgtctcgctggcgggaggccacgggctttccacagcgcgggggaacgggaggctgcaggatggtcaagctgacggcggagctgatcgagcaggcggcgcagtacaccaacgcggtgcgcgaccgggagctggacctccgggtatcctaagaaatccggtaaccaataagaagcattacagattgtatgtgatttataaagttccgcaagtcagagtactggatttccagaaagtgaaactaaaattttaatccaggtgctggtttgccaactgacaaaaagaaaggtgggccatctccaggggatgtagaagcaatcaagaatgccatagcaaatgcttcaactctggctgaagtggagaggctgaaggggttgctgcagtctggtcagatccctggcagagaacgcagatcagggcccactgatgatggtgaagaagagatggaagaagacacagtcacaaacgggtcctgagcagtgaggcagatgtataataataggccctcttggaacaagtcttgcttttcgaacatggtataatagccttgtttgtgttagcaaagtggaatctatcagcattgttgaaatgcttaagactgctgctgataattttgtaatataagttttgaaatctaaatgtcaattttctacaaattataaaaataaactccactcactatgctaccaa

SEQ ID NO: 10240 - protein, 88 aa, Homo sapiens
RGARWDVSLAGGHGLSTARGNGRLQDGQADGGADRAGGAVHQRGARPGAGPPGILRNPVTNKKHYRLYVIYKVPQVRVLDFQKVKLKF

SEQ ID NO: 10241 - DNA, 2561 bp, Homo sapiens
cggagtctggaggacccctgattccagacgttggtgtttaaaagttaaggcgaatgtggaaacacccgaggggaactttctcatgcattagcgcacctcgaggtgggaggggaagcggtgactgtcctccctccaccagccgtcgcgggaacccgtggggttcagtgaagggtccagcagttcaggtgcccgccccgggcctgggccttggctccgggctacagtgtgagatcccgggctaggtggcccgcctggggcaggtcgccgggacaaccccaccgccccgcaagtccagcccggcctcgggcacgccaaaggattcctagcaagtacaagcttctgacttcacagagaggccatggtaaacatcccaaggagtgcatcagccatgggttcagggatttcagccactgcatagaagacaagctgtaacctaattcaatcacacttggcagcaaccggtgaagaggcagtctgggctctggggagctcccccgtgacagatggaaggggcccctacatctggagaggctctagaacctcctcccagtgaggctaacgtggtctgaaggggtctctttgcccagtgacattctggggttgggatctgggatttcctccattgcttccttacatcaacatttgctaaagctcaaaagaagaccttccacgtaatgacatcaaacagatctgaaaccacagttaaagtaacgtccacttaacacttggtcagcactcatgtttcattttgtgtgccgtggaaagaaatacaggctcctgtgccatgggatgttaactcttttattaatttagggttaacattgtacttgcttcattgatttctctttcagagttgtagattcaataaacaacatctgggttctctccagctcacaggtgacaaggcaaatgcactgtcgtcaaacaggggagcaggacaatatggagaaagacgaggtcgaaaaaatttaaggcaaatgttacttccctattcaagggaattgatcaagcagatctgtgcatttcaatgaaaatatatgaaatatttgtcaaaataattaacatcggtaaaaattagaacatgtagcttataaaatgcctacacaggtttggcagaataaatccaactgtgtcatgtaggcttgtaatatacacagacacaggagtttccaccttaaaaacgagtcttctgaagggcagaggccaaatgtattttaaaagcaattccataaaatgggaagtgatggatgattaacaatgcatggctggctttacattttgttcagaggaattgcttggccatcggggtaccttttggctggccacagaatgcctcctgttgcctctcctcagaaggctctgcatcaggtcgaggtggtcgttcaggccatgagactcctgaagacacagacagaacacggtaacaaggagagctcggcttgctcaaaggagagcgctgcgggggatagaatcttctggtctggctttggaattggactttctaagccactgctgcagtttcagaagtagctgactatgtagaaatagatactccggccccagtggtcatacattttatgccctcaaacctatcttatttatagtctgaccaaaccgtccccagactgctcagtggcaggcaacgagcaggtagactgctggccctttgtcacatgtgaggatggcccagggttcgccagctgggccggggagatttactacacagccgcagaaaagcacggggagaagagtgatgtgtgatgccaagcgcctttcttttctgctttggtcttgaagattcagtaaacttatggtcccagaagctgctccaaagccagagctgtggattcccagaattcattttgttcctgttagtttgtcggaagactggagccaacaagcagcatttgagaggatatcaccattttaggaacacctccttaagagccaccacccacctggcttgggtgctcagagatgctgctcctggggagataaagctgtcaggtgcagggcgccgctcctgaaacagactctggccgacagtctggaggaaggtggacggatggatggatgggagtgcctgccctctgtgggcagctaggcacccttacccggccaggaggcacgtgcggcagcagaactgaatgaagagcttccgttcgcacagccggttggacttcaccatctcgcagaatgtctcgtcagctggggccccgcatcaggaaaggcaaaagagggaaaggtcagtcttcggtgcctgtgaagattgtttcaaggccgggcgcggtgcctcatgcctgtaatcccagcactttgggaggccgaggtgggtggatcacctgaggtcaggagcttgagaccagtctaaccaacatggtgaaaccccgtctctactaataatataaaaattagctgggcatggtggtgggcacctgtaatccaagctactcgggaggctaaagcaggagaaccacctgaacccaggaggcagaggttgcagtgagctgagatcatgccactgcactccagcctgggcaagaagaacaaaactccgtctc

SEQ ID NO: 10242 - protein, 90 aa, Homo sapiens [sequence omitted]

SEQ ID NO: 10243 - DNA, 1643 bp, Homo sapiens
gtggcctgggggcactgggcccctgggtcctccagaccactgacatctctttaaatgactcagctcggccctggttctcgtctcaccagtggcattgtctgtgtgacgagaactgcttgagctgtgcaggctccagcaggaactgtagcaggtgtaagacgggcttcacacagctggggacctcctgcatcaccaaccacacgtgcagcaacgctgacgagacattctgcgagatggtgaagtccaaccggctgtgcgaacggaagctcttcattcagttctgctgccgcacgtgcctcctggccgggtaagggtgcctagctgcccacagagggcaggcactcccatccatccatccgtccaccttcctccagactgtcggccagagtctgtttcaggagcggcgccctgcacctgacagctttatctccccaggagcagcatctctgagcacccaagccaggtgggtggtggctcttaaggaggtgttcctaaaatggtgatatcctctcaaatgctgcttgttggctccagtcttccgacaaactaacaggaacaaaatgaattctgggaatccacagctctggctttggagcagcttctgggaccataagtttactgaatcttcaagaccaaagcagaaaagaaaggcgcttggcatcacacatcactcttctccccgtgcttttctgcggctgtgtagtaaatctccccggcccagctggcgaaccctgggccatcctcacatgtgacaaagggccagcagtctacctgctcgttgcctgccactgagcagtctggggacggtttggtcagactataaataagataggtttgagggcataaaatgtatgaccactggggccggagtatctatttctacatagtcagctacttctgaaactgcagcagtggcttagaaagtccaattccaaagccagaccagaagattctatcccccgcagcgctctcctttgagcaagccgagctctccttgttaccgtgttctgtctgtgtcttcaggagtctcatggcctgaacgaccacctcgacctgatgcagagccttctgaggagaggcaacaggaggcattctgtggccagccaaaaggtaccccgatggccaagcaattcctctgaacaaaatgtaaagccagccatgcattgttaatcatccatcacttcccattttatggaattgcttttaaaatacatttggcctctgcccttcagaagactcgtttttaaggtggaaactcctgtgtctgtgtatattacaagcctacatgacacagttggatttattctgccaaacctgtgtaggcattttataagctacatgttctaatttttaccgatgttaattattttgacaaatatttcatatattttcattgaaatgcacagatctgcttgatcaattcccttgaatagggaagtaacatttgccttaaattttttcgacctcgtctttctccatattgtcctgctcccctgtttgacgacagtgcatttgccttgtcacctgtgagctggagagaacccagatgttgtttattgaatctacaactctgaaagagaaatcaatgaagcaagtacaatgttaaccctaaattaataaaagagttaacatcccatggcaca

SEQ ID NO: 10244 - protein, 63 aa, Homo sapiens
MNSGNPQLWLWSSFWDHKFTESSRPKQKRKALGITHHSSPRAFLRLCSKSPRPSWRTLGHPHM

SEQ ID NO: 10245 - DNA, 3330 bp, Homo sapiens
cagctgctgagtgtgtggcaacctggttagagcaatggaaaaccgaggcccctgccatcctgctgagctgggtgaggttgtatttgaagaagcaagcaagccgtaacctcctggctgtccaccgcagcgcgctcctcaccacagttcttcactgatgaagcagccctcagccgtggcctgggggcactgggcccctgggtcctccagaccactgacatctctttaaatgactcagctcggccctggttctcgtctcaccagtggcattgtctgtaagagaaaccagagggtctgtggggaaagtcataacctgtactggggcatcagggtttggtggctgggccaccagaatgtgcaagggcaggtgtggggagggggcagcatgatgggggcagacccatggggcttcccacaagtgcacaaccccctctggcaagtcctctaaccccatcctttcctctggggcggcctggatgggaatattagaaaggctcgtgggtgtgagtttgcctgtggggtttacacatttacaattacagaccaagggcttgagctctaggctcagcatcctcagacacactaggaataaaacccacctcccacccaggctgaagcgatgctgcacctggggctccagagcagcggagtccgtggtgagaccagaccccatcagagggctgctctgcaaagagccccacgaggaggcctggtgtctgagcgtgggaaggcttcacacagcagggaggggacatctgtataaagcaaagaactgccccccagggaggcccaggcatgagcacaacaaagctccaagccctgcctatggggcctgttccacccttaactggcaacaatggggaggtgggcagctgatgcaagcactgtggagaccgagtcaccgggctctggactcaggacaggcagcagcatagccggggtgcactcacggccccaggatgggaaacgtgctccttcaagcactcggcccgcatcggcaagtgctttctgtagagggcacaatggtcagtcgttcaggcttttggggccacactgcctctgtcacagctactcagctcagccactgctacacaaaagattgtcaatgaatgagtgtgactgtggtccaggataaatgctggatgtggcccttgggctgtagtgcaccaaccgtcccctgaggtcacgtttaccctgcattagaaatagccctggctggtgtccatctctgcgcaggctgggccaggaccgtccgagaggggcaggaattgtggggcatctctcccactccccgagggtaagcaggcatggccacatataggtgacagcagccttctggtcagctcgagtcaggtgtgtcacatccctgggtggagtctggcctggaccccaagcctacagccatcgcagcccggcagccgctggagagagaagactgacacagctctgggagccgtgtggtggggtgggggctgggtgccagggcccaggagggtgtccaggtgagctgcgggaagcctcggaggcctggcccctgatcctgggcttgctcctgccaactggccatggctgtctctgccctcccagggcaatagtgaggtcagacaggagaaaagacatgcagacactcagcccctgtgtcagggaatggtgggcgacacagcctctccacagaggaccgaggctgagggggtgggaaggaggtgcagggaggtgagggttctgggaagggagcccggagtggtggagcctcttccccagacttcagcaggaacggtatcttcccacaggtgtgacgagaactgcttgagctgtgcaggctccagcaggaactgtagcaggtgtaagacgggcttcacacagctggggacctcctgcatcaccaaccacacgtgcagcaacgctgacgagacattctgcgagatggtgaagtccaaccggctgtgcgaacggaagctcttcattcagttctgctgccgcacgtgcctcctggccgggtaagggtgcctagctgcccacagagggcaggcactcccatccatccatccgtccaccttcctccagactgtcggccagagtctgtttcaggagcggcgccctgcacctgacagctttatctccccaggagcagcatctctgagcacccaagccaggtgggtggtggctcttaaggaggtgttcctaaaatggtgatatcctctcaaatgctgcttgttggctccagtcttccgacaaactaacaggaacaaaatgaattctgggaatccacagctctggctttggagcagcttctgggaccataagtttactgaatcttcaagaccaaagcagaaaagaaaggcgcttggcatcacacatcactcttctccccgtgcttttctgcggctgtgtagtaaatctccccggcccagctggcgaaccctgggccatcctcacatgtgacaaagggccagcagtctacctgctcgttgcctgccactgagcagtctggggacggtttggtcagactataaataagataggtttgagggcataaaatgtatgaccactggggccggagtatctatttctacatagtcagctacttctgaaactgcagcagtggcttagaaagtccaattccaaagccagaccagaagattctatcccccgcagcgctctcctttgagcaagccgagctctccttgttaccgtgttctgtctgtgtcttcaggagtctcatggcctgaacgaccacctcgacctgatgcagagccttctgaggagaggcaacaggaggcattctgtggccagccaaaaggtaccccgatggccaagcaattcctctgaacaaaatgtaaagccagccatgcattgttaatcatccatcacttcccattttatggaattgcttttaaaatacatttggcctctgcccttcagaagactcgtttttaaggtggaaactcctgtgtctgtgtatattacaagcctacatgacacagttggatttattctgccaaacctgtgtaggcattttataagctacatgttctaatttttaccgatgttaattattttgacaaatatttcatatattttcattgaaatgcacagatctgcttgatcaattcccttgaatagggaagtaacatttgccttaaattttttcgacctcgtctttctccatattgtcctgctcccctgtttgacgacagtgcatttgccttgtcacctgtgagctggagagaacccagatgttgtttattgaatctacaactctgaaagagaaatcaatgaagcaagtacaatgttaaccctaaattaataaaagagttaacatcccatggcaca

SEQ ID NO: 10246 - protein, 117 aa, Homo sapiens
MVGDTASPQRTEAEGVGRRCREVRVLGREPGVVEPLPQTSAGTVSSHRCDENCLSCAGSSRNCSRCKTGFTQLGTSCITNHTCSNADETFCEMVKSNRLCERKLFIQFCCRTCLLAG

SEQ ID NO: 10247 - DNA, 4515 bp, Homo sapiens
tcgcgggccgaggacgcctctggggcggcaccgcgtcccgagagccccagaagtcggcggggaagttcccccggtggggggcgtttcgggcctcccggacggctctcggccccggagcccggtcgcaggagcgcgggcccgggggcgggaacgcgccgcggccgcctcctcctccccggctcccgcccgcggcggtgttggcggcggcggtggcggcggcggcggcgcttccccggcgcggagcggctttaaaaggcggcactccaccccccggcgcactcgcagctcgggcgccgcgcgagcctgtcgccgctatgcctccgcgcgcgccgcctgcgcccgggccccggccgccgccccgggccgccgccgccaccgacaccgccgcgggcgcggggggcgcggggggcgcggggggcgccggcgggcccgggttccggccgctcgcgccgcgtccctggcgctggctgctgctgctggcgctgcctgccgcctgctccgcccccgccgcgccccgtctacaccaaccactgggcggtgcaagtgctgggcggcccggccgaggcggaccgcgtggcggcggcgcacgggtacctcaacttgggccagattggaaacctggaagattactaccatttttatcacagcaaaacctttaaaagatcaaccttgagtagcagaggccctcacaccttcctcagaatggacccccaggtgaaatggctccagcaacaggaagtgaaacgaagggtgaagagacaggtgcgaagtgacccgcaggccctttacttcaacgaccccatttggtccaacatgtggtacctgcattgtggcgacaagaacagtcgctgccggtcggaaatgaatgtccaggcagcgtggaagaggggctacacaggaaaaaacgtggtggtcaccatccttgatgatggcatagagagaaatcaccctgacctggccccaaattatgattcctacgccagctacgacgtgaacggcaatgattatgacccatctccacgatatgatgccagcaatgaaaataaacacggcactcgttgtgcgggagaagttgctgcttcagcaaacaattcctactgcatcgtgggcatagcgtacaatgccaaaataggaggcatccgcatgctggacggcgatgtcacagatgtggtcgaggcaaagtcgctgggcatcagacccaactacatcgacatttacagtgccagctgggggccggacgacgacggcaagacggtggacgggcccggccgactggctaagcaggctttcgagtatggcattaaaaagggccggcagggcctgggctccattttcgtctgggcatctgggaatggcgggagagagggggactactgctcgtgcgatggctacaccaacagcatctacaccatctccgtcagcagcgccaccgagaatggctacaagccctggtacctggaagagtgtgcctccaccctggccaccacctacagcagtggggccttttatgagcgaaaaatcgtcaccacggatctgcgtcagcgctgtaccgatggccacactgggacctcagtctctgcccccatggtggcgggcatcatcgccttggctctagaagcaaacagccagttaacctggagggacgtccagcacctgctagtgaagacatcccggccggcccacctgaaagcgagcgactggaaagtgaacggcgcgggtcataaagttagccatttctatggatttggtttggtggacgcagaagctctcgttgtggaggcaaagaagtggacagcagtgccatcgcagcacatgtgtgtggccgcctcggacaagagacccaggagcatccccttagtgcaggtgctgcggactacggccctgaccagcgcctgcgcggagcactcggaccagcgggtggtctacttggagcacgtggtggttcgcacctccatctcacacccacgccgaggagacctccagatctacctggtttctccctcgggaaccaagtctcaacttctggcaaagaggttgctggatctttccaatgaagggtttacaaactgggaattcatgactgtccactgctggggagaaaaggctgaagggcagtggaccttggaaatccaagatctgccatcccaggtccgcaacccggagaagcaagggaagttgaaagaatggagcctcatactgtatggcacagcagagcacccgtaccacaccttcagtgcccatcagtcccgctcgcggatgctggagctctcagccccagagctggagccacccaaggctgccctgtcaccctcccaggtggaagttcctgaagatgaggaagattacacaggtgtgtgccatccggagtgtggtgacaaaggctgtgatggccccaatgcagaccagtgcttgaactgcgtccacttcagcctggggagtgtcaagaccagcaggaagtgcgtgagtgtgtgccccttgggctactttggggacacagcagcaagacgctgtcgccggtgccacaaggggtgtgagacctgctccagcagagctgcgacgcagtgcctgtcttgccgccgcgggttctatcaccaccaggagatgaacacctgtgtgaccctctgtcctgcaggattttatgctgatgaaagtcagaaaaattgccttaaatgccacccaagctgtaaaaagtgcgtggatgaacctgagaaatgtactgtctgtaaagaaggattcagccttgcacggggcagctgcattcctgactgtgagccaggcacctactttgactcagagctgatcagatgtggggaatgccatcacacctgcggaacctgcgtggggccaggcagagaagagtgcattcactgtgcgaaaaacttccacttccacgactggaagtgtgtgccagcctgtggtgagggcttctacccagaagagatgccgggcttgccccacaaagtgtgtcgaaggtgtgacgagaactgcttgagctgtgcaggctccagcaggaactgtagcaggtgtaagacgggcttcacacagctggggacctcctgcatcaccaaccacacgtgcagcaacgctgacgagacattctgcgagatggtgaagtccaaccggctgtgcgaacggaagctcttcattcagttctgctgccgcacgtgcctcctggccgggtaagggtgcctagctgcccacagagggcaggcactcccatccatccatccgtccaccttcctccagactgtcggccagagtctgtttcaggagcggcgccctgcacctgacagctttatctccccaggagcagcatctctgagcacccaagccaggtgggtggtggctcttaaggaggtgttcctaaaatggtgatatcctctcaaatgctgcttgttggctccagtcttccgacaaactaacaggaacaaaatgaattctgggaatccacagctctggctttggagcagcttctgggaccataagtttactgaatcttcaagaccaaagcagaaaagaaaggcgcttggcatcacacatcactcttctccccgtgcttttctgcggctgtgtagtaaatctccccggcccagctggcgaaccctgggccatcctcacatgtgacaaagggccagcagtctacctgctcgttgcctgccactgagcagtctggggacggtttggtcagactataaataagataggtttgagggcataaaatgtatgaccactggggccggagtatctatttctacatagtcagctacttctgaaactgcagcagtggcttagaaagtccaattccaaagccagaccagaagattctatcccccgcagcgctctcctttgagcaagccgagctctccttgttaccgtgttctgtctgtgtcttcaggagtctcatggcctgaacgaccacctcgacctgatgcagagccttctgaggagaggcaacaggaggcattctgtggccagccaaaaggtaccccgatggccaagcaattcctctgaacaaaatgtaaagccagccatgcattgttaatcatccatcacttcccattttatggaattgcttttaaaatacatttggcctctgcccttcagaagactcgtttttaaggtggaaactcctgtgtctgtgtatattacaagcctacatgacacagttggatttattctgccaaacctgtgtaggcattttataagctacatgttctaatttttaccgatgttaattattttgacaaatatttcatatattttcattgaaatgcacagatctgcttgatcaattcccttgaatagggaagtaacatttgccttaaattttttcgacctcgtctttctccatattgtcctgctcccctgtttgacgacagtgcatttgccttgtcacctgtgagctggagagaacccagatgttgtttattgaatctacaactctgaaagagaaatcaatgaagcaagtacaatgttaaccctaaattaataaaagagttaacatcccatggcaca

SEQ ID NO: 10248 - protein, 826 aa, Homo sapiens
MDPQVKWLQQQEVKRRVKRQVRSDPQALYFNDPIWSNMWYLHCGDKNSRCRSEMNVQAAWKRGYTGKNVVVTILDDGIERNHPDLAPNYDSYASYDVNGNDYDPSPRYDASNENKHGTRCAGEVAASANNSYCIVGIAYNAKIGGIRMLDGDVTDVVEAKSLGIRPNYIDIYSASWGPDDDGKTVDGPGRLAKQAFEYGIKKGRQGLGSIFVWASGNGGREGDYCSCDGYTNSIYTISVSSATENGYKPWYLEECASTLATTYSSGAFYERKIVTTDLRQRCTDGHTGTSVSAPMVAGIIALALEANSQLTWRDVQHLLVKTSRPAHLKASDWKVNGAGHKVSHFYGFGLVDAEALVVEAKKWTAVPSQHMCVAASDKRPRSIPLVQVLRTTALTSACAEHSDQRVVYLEHVVVRTSISHPRRGDLQIYLVSPSGTKSQLLAKRLLDLSNEGFTNWEFMTVHCWGEKAEGQWTLEIQDLPSQVRNPEKQGKLKEWSLILYGTAEHPYHTFSAHQSRSRMLELSAPELEPPKAALSPSQVEVPEDEEDYTGVCHPECGDKGCDGPNADQCLNCVHFSLGSVKTSRKCVSVCPLGYFGDTAARRCRRCHKGCETCSSRAATQCLSCRRGFYHHQEMNTCVTLCPAGFYADESQKNCLKCHPSCKKCVDEPEKCTVCKEGFSLARGSCIPDCEPGTYFDSELIRCGECHHTCGTCVGPGREECIHCAKNFHFHDWKCVPACGEGFYPEEMPGLPHKVCRRCDENCLSCAGSSRNCSRCKTGFTQLGTSCITNHTCSNADETFCEMVKSNRLCERKLFIQFCCRTCLLAG

SEQ ID NO: 10249 - DNA, 4554 bp, Homo sapiens
tcgcgggccgaggacgcctctggggcggcaccgcgtcccgagagccccagaagtcggcggggaagttcccccggtggggggcgtttcgggcctcccggacggctctcggccccggagcccggtcgcaggagcgcgggcccgggggcgggaacgcgccgcggccgcctcctcctccccggctcccgcccgcggcggtgttggcggcggcggtggcggcggcggcggcgcttccccggcgcggagcggctttaaaaggcggcactccaccccccggcgcactcgcagctcgggcgccgcgcgagcctgtcgccgctatgcctccgcgcgcgccgcctgcgcccgggccccggccgccgccccgggccgccgccgccaccgacaccgccgcgggcgcggggggcgcggggggcgcggggggcgccggcgggcccgggttccggccgctcgcgccgcgtccctggcgctggctgctgctgctggcgctgcctgccgcctgctccgcccccgccgcgccccgtctacaccaaccactgggcggtgcaagtgctgggcggcccggccgaggcggaccgcgtggcggcggcgcacgggtacctcaacttgggccagattggaaacctggaagattactaccatttttatcacagcaaaacctttaaaagatcaaccttgagtagcagaggccctcacaccttcctcagaatggacccccaggtgaaatggctccagcaacaggaagtgaaacgaagggtgaagagacaggtgcgaagtgacccgcaggccctttacttcaacgaccccatttggtccaacatgtggtacctgcattgtggcgacaagaacagtcgctgccggtcggaaatgaatgtccaggcagcgtggaagaggggctacacaggaaaaaacgtggtggtcaccatccttgatgatggcatagagagaaatcaccctgacctggccccaaattatgattcctacgccagctacgacgtgaacggcaatgattatgacccatctccacgatatgatgccagcaatgaaaataaacacggcactcgttgtgcgggagaagttgctgcttcagcaaacaattcctactgcatcgtgggcatagcgtacaatgccaaaataggaggcatccgcatgctggacggcgatgtcacagatgtggtcgaggcaaagtcgctgggcatcagacccaactacatcgacatttacagtgccagctgggggccggacgacgacggcaagacggtggacgggcccggccgactggctaagcaggctttcgagtatggcattaaaaagggccggcagggcctgggctccattttcgtctgggcatctgggaatggcgggagagagggggactactgctcgtgcgatggctacaccaacagcatctacaccatctccgtcagcagcgccaccgagaatggctacaagccctggtacctggaagagtgtgcctccaccctggccaccacctacagcagtggggccttttatgagcgaaaaatcgtcaccacggatctgcgtcagcgctgtaccgatggccacactgggacctcagtctctgcccccatggtggcgggcatcatcgccttggctctagaagcaaacagccagttaacctggagggacgtccagcacctgctagtgaagacatcccggccggcccacctgaaagcgagcgactggaaagtgaacggcgcgggtcataaagttagccatttctatggatttggtttggtggacgcagaagctctcgttgtggaggcaaagaagtggacagcagtgccatcgcagcacatgtgtgtggccgcctcggacaagagacccaggagcatccccttagtgcaggtgctgcggactacggccctgaccagcgcctgcgcggagcactcggaccagcgggtggtctacttggagcacgtggtggttcgcacctccatctcacacccacgccgaggagacctccagatctacctggtttctccctcgggaaccaagtctcaacttctggcaaagaggttgctggatctttccaatgaagggtttacaaactgggaattcatgactgtccactgctggggagaaaaggctgaagggcagtggaccttggaaatccaagatctgccatcccaggtccgcaacccggagaagcaagggaagttgaaagaatggagcctcatactgtatggcacagcagagcacccgtaccacaccttcagtgcccatcagtcccgctcgcggatgctggagctctcagccccagagctggagccacccaaggctgccctgtcaccctcccaggtggaagttcctgaagatgaggaagattacacagctcaatccaccccaggctctgctaatattttacagaccagtgtgtgccatccggagtgtggtgacaaaggctgtgatggccccaatgcagaccagtgcttgaactgcgtccacttcagcctggggagtgtcaagaccagcaggaagtgcgtgagtgtgtgccccttgggctactttggggacacagcagcaagacgctgtcgccggtgccacaaggggtgtgagacctgctccagcagagctgcgacgcagtgcctgtcttgccgccgcgggttctatcaccaccaggagatgaacacctgtgtgaccctctgtcctgcaggattttatgctgatgaaagtcagaaaaattgccttaaatgccacccaagctgtaaaaagtgcgtggatgaacctgagaaatgtactgtctgtaaagaaggattcagccttgcacggggcagctgcattcctgactgtgagccaggcacctactttgactcagagctgatcagatgtggggaatgccatcacacctgcggaacctgcgtggggccaggcagagaagagtgcattcactgtgcgaaaaacttccacttccacgactggaagtgtgtgccagcctgtggtgagggcttctacccagaagagatgccgggcttgccccacaaagtgtgtcgaaggtgtgacgagaactgcttgagctgtgcaggctccagcaggaactgtagcaggtgtaagacgggcttcacacagctggggacctcctgcatcaccaaccacacgtgcagcaacgctgacgagacattctgcgagatggtgaagtccaaccggctgtgcgaacggaagctcttcattcagttctgctgccgcacgtgcctcctggccgggtaagggtgcctagctgcccacagagggcaggcactcccatccatccatccgtccaccttcctccagactgtcggccagagtctgtttcaggagcggcgccctgcacctgacagctttatctccccaggagcagcatctctgagcacccaagccaggtgggtggtggctcttaaggaggtgttcctaaaatggtgatatcctctcaaatgctgcttgttggctccagtcttccgacaaactaacaggaacaaaatgaattctgggaatccacagctctggctttggagcagcttctgggaccataagtttactgaatcttcaagaccaaagcagaaaagaaaggcgcttggcatcacacatcactcttctccccgtgcttttctgcggctgtgtagtaaatctccccggcccagctggcgaaccctgggccatcctcacatgtgacaaagggccagcagtctacctgctcgttgcctgccactgagcagtctggggacggtttggtcagactataaataagataggtttgagggcataaaatgtatgaccactggggccggagtatctatttctacatagtcagctacttctgaaactgcagcagtggcttagaaagtccaattccaaagccagaccagaagattctatcccccgcagcgctctcctttgagcaagccgagctctccttgttaccgtgttctgtctgtgtcttcaggagtctcatggcctgaacgaccacctcgacctgatgcagagccttctgaggagaggcaacaggaggcattctgtggccagccaaaaggtaccccgatggccaagcaattcctctgaacaaaatgtaaagccagccatgcattgttaatcatccatcacttcccattttatggaattgcttttaaaatacatttggcctctgcccttcagaagactcgtttttaaggtggaaactcctgtgtctgtgtatattacaagcctacatgacacagttggatttattctgccaaacctgtgtaggcattttataagctacatgttctaatttttaccgatgttaattattttgacaaatatttcatatattttcattgaaatgcacagatctgcttgatcaattcccttgaatagggaagtaacatttgccttaaattttttcgacctcgtctttctccatattgtcctgctcccctgtttgacgacagtgcatttgccttgtcacctgtgagctggagagaacccagatgttgtttattgaatctacaactctgaaagagaaatcaatgaagcaagtacaatgttaaccctaaattaataaaagagttaacatcccatggcaca

SEQ ID NO: 10250 - protein, 839 aa, Homo sapiens
MDPQVKWLQQQEVKRRVKRQVRSDPQALYFNDPIWSNMWYLHCGDKNSRCRSEMNVQAAWKRGYTGKNVVVTILDDGIERNHPDLAPNYDSYASYDVNGNDYDPSPRYDASNENKHGTRCAGEVAASANNSYCIVGIAYNAKIGGIRMLDGDVTDVVEAKSLGIRPNYIDIYSASWGPDDDGKTVDGPGRLAKQAFEYGIKKGRQGLGSIFVWASGNGGREGDYCSCDGYTNSIYTISVSSATENGYKPWYLEECASTLATTYSSGAFYERKIVTTDLRQRCTDGHTGTSVSAPMVAGIIALALEANSQLTWRDVQHLLVKTSRPAHLKASDWKVNGAGHKVSHFYGFGLVDAEALVVEAKKWTAVPSQHMCVAASDKRPRSIPLVQVLRTTALTSACAEHSDQRVVYLEHVVVRTSISHPRRGDLQIYLVSPSGTKSQLLAKRLLDLSNEGFTNWEFMTVHCWGEKAEGQWTLEIQDLPSQVRNPEKQGKLKEWSLILYGTAEHPYHTFSAHQSRSRMLELSAPELEPPKAALSPSQVEVPEDEEDYTAQSTPGSANILQTSVCHPECGDKGCDGPNADQCLNCVHFSLGSVKTSRKCVSVCPLGYFGDTAARRCRRCHKGCETCSSRAATQCLSCRRGFYHHQEMNTCVTLCPAGFYADESQKNCLKCHPSCKKCVDEPEKCTVCKEGFSLARGSCIPDCEPGTYFDSELIRCGECHHTCGTCVGPGREECIHCAKNFHFHDWKCVPACGEGFYPEEMPGLPHKVCRRCDENCLSCAGSSRNCSRCKTGFTQLGTSCITNHTCSNADETFCEMVKSNRLCERKLFIQFCCRTCLLAG

SEQ ID NO: 10251 - DNA, 3326 bp, Homo sapiens
tcgcgggccgaggacgcctctggggcggcaccgcgtcccgagagccccagaagtcggcggggaagttcccccggtggggggcgtttcgggcctcccggacggctctcggccccggagcccggtcgcaggagcgcgggcccgggggcgggaacgcgccgcggccgcctcctcctccccggctcccgcccgcggcggtgttggcggcggcggtggcggcggcggcggcgcttccccggcgcggagcggctttaaaaggcggcactccaccccccggcgcactcgcagctcgggcgccgcgcgagcctgtcgccgctatgcctccgcgcgcgccgcctgcgcccgggccccggccgccgccccgggccgccgccgccaccgacaccgccgcgggcgcggggggcgcggggggcgcggggggcgccggcgggcccgggttccggccgctcgcgccgcgtccctggcgctggctgctgctgctggcgctgcctgccgcctgctccgcccccgccgcgccccgtctacaccaaccactgggcggtgcaagtgctgggcggcccggccgaggcggaccgcgtggcggcggcgcacgggtacctcaacttgggccagattggaaacctggaagattactaccatttttatcacagcaaaacctttaaaagatcaaccttgagtagcagaggccctcacaccttcctcagaatggacccccaggtgaaatggctccagcaacaggaagtgaaacgaagggtgaagagacaggtgcgaagtgacccgcaggccctttacttcaacgaccccatttggtccaacatgtggtacctgcattgtggcgacaagaacagtcgctgccggtcggaaatgaatgtccaggcagcgtggaagaggggctacacaggaaaaaacgtggtggtcaccatccttgatgatggcatagagagaaatcaccctgacctggccccaaattatgattcctacgccagctacgacgtgaacggcaatgattatgacccatctccacgatatgatgccagcaatgaaaataaacacggcactcgttgtgcgggagaagttgctgcttcagcaaacaattcctactgcatcgtgggcatagcgtacaatgccaaaataggaggcatccgcatgctggacggcgatgtcacagatgtggtcgaggcaaagtcgctgggcatcagacccaactacatcgacatttacagtgccagctgggggccggacgacgacggcaagacggtggacgggcccggccgactggctaagcaggctttcgagtatggcattaaaaagggccggcagggcctgggctccattttcgtctgggcatctgggaatggcgggagagagggggactactgctcgtgcgatggctacaccaacagcatctacaccatctccgtcagcagcgccaccgagaatggctacaagccctggtacctggaagagtgtgcctccaccctggccaccacctacagcagtggggccttttatgagcgaaaaatcgtcaccacggatctgcgtcagcgctgtaccgatggccacactgggacctcagtctctgcccccatggtggcgggcatcatcgccttggctctagaagcaaacagccagttaacctggagggacgtccagcacctgctagtgaagacatcccggccggcccacctgaaagcgagcgactggaaagtgaacggcgcgggtcataaagttagccatttctatggatttggtttggtggacgcagaagctctcgttgtggaggcaaagaagtggacagcagtgccatcgcagcacatgtgtgtggccgcctcggacaagagacccaggagcatccccttagtgcaggtgctgcggactacggccctgaccagcgcctgcgcggagcactcggaccagcgggtggtctacttggagcacgtggtggttcgcacctccatctcacacccacgccgaggagacctccagatctacctggtttctccctcgggaaccaagtctcaacttctggcaaagaggttgctggatctttccaatgaagggtttacaaactgggaattcatgactgtccactgctggggagaaaaggctgaagggcagtggaccttggaaatccaagatctgccatcccaggtccgcaacccggagaagcaagggaagttgaaagaatggagcctcatactgtatggcacagcagagcacccgtaccacaccttcagtgcccatcagtcccgctcgcggatgctggagctctcagccccagagctggagccacccaaggctgccctgtcaccctcccaggtggaagttcctgaagatgaggaagattacacaggtgtgtgccatccggagtgtggtgacaaaggctgtgatggccccaatgcagaccagtgcttgaactgcgtccacttcagcctggggagtgtcaagaccagcaggaagtgcgtgagtgtgtgccccttgggctactttggggacacagcagcaagacgctgtcgccggtgccacaaggggtgtgagacctgctccagcagagctgcgacgcagtgcctgtcttgccgccgcgggttctatcaccaccaggagatgaacacctgtgtgaccctctgtcctgcaggattttatgctgatgaaagtcagaaaaattgccttaaatgccacccaagctgtaaaaagtgcgtggatgaacctgagaaatgtactgtctgtaaagaaggattcagccttgcacggggcagctgcattcctgactgtgagccaggcacctactttgactcagagctgatcagatgtggggaatgccatcacacctgcggaacctgcgtggggccaggcagagaagagtgcattcactgtgcgaaaaacttccacttccacgactggaagtgtgtgccagcctgtggtgagggcttctacccagaagagatgccgggcttgccccacaaagtgtgtcgaaggtacggtcctcctggcggggaacggcaggcagctgtgtccagcaaaggagtgcctggagggcagagtctggcagcatcttccccaggggccggggagggcatgttgcatcaccccactgtggacaggagcccatttacagagctgctgaggggccttcgtccctttgttcactggatgcatatttgttgggtccctgctgtgggcagacaccgtgcagcagcgggataagatgggaagcagaatagcaaggtgctcacaccccattggtggactacgcgggacgtccctgcccatgtcgcgctcagcatgcatcctttgcactgtcgataatcagagaaaccatgttttgggtt

SEQ ID NO: 10252 - protein, 832 aa, Homo sapiens
MDPQVKWLQQQEVKRRVKRQVRSDPQALYFNDPIWSNMWYLHCGDKNSRCRSEMNVQAAWKRGYTGKNVVVTILDDGIERNHPDLAPNYDSYASYDVNGNDYDPSPRYDASNENKHGTRCAGEVAASANNSYCIVGIAYNAKIGGIRMLDGDVTDVVEAKSLGIRPNYIDIYSASWGPDDDGKTVDGPGRLAKQAFEYGIKKGRQGLGSIFVWASGNGGREGDYCSCDGYTNSIYTISVSSATENGYKPWYLEECASTLATTYSSGAFYERKIVTTDLRQRCTDGHTGTSVSAPMVAGIIALALEANSQLTWRDVQHLLVKTSRPAHLKASDWKVNGAGHKVSHFYGFGLVDAEALVVEAKKWTAVPSQHMCVAASDKRPRSIPLVQVLRTTALTSACAEHSDQRVVYLEHVVVRTSISHPRRGDLQIYLVSPSGTKSQLLAKRLLDLSNEGFTNWEFMTVHCWGEKAEGQWTLEIQDLPSQVRNPEKQGKLKEWSLILYGTAEHPYHTFSAHQSRSRMLELSAPELEPPKAALSPSQVEVPEDEEDYTGVCHPECGDKGCDGPNADQCLNCVHFSLGSVKTSRKCVSVCPLGYFGDTAARRCRRCHKGCETCSSRAATQCLSCRRGFYHHQEMNTCVTLCPAGFYADESQKNCLKCHPSCKKCVDEPEKCTVCKEGFSLARGSCIPDCEPGTYFDSELIRCGECHHTCGTCVGPGREECIHCAKNFHFHDWKCVPACGEGFYPEEMPGLPHKVCRRYGPPGGERQAAVSSKGVPGGQSLAASSPGAGEGMLHHPTVDRSPFTELLRGLRPFVHWMHICWVPAVGRHRAAAG

SEQ ID NO: 10253 - DNA, 3365 bp, Homo sapiens
tcgcgggccgaggacgcctctggggcggcaccgcgtcccgagagccccagaagtcggcggggaagttcccccggtggggggcgtttcgggcctcccggacggctctcggccccggagcccggtcgcaggagcgcgggcccgggggcgggaacgcgccgcggccgcctcctcctccccggctcccgcccgcggcggtgttggcggcggcggtggcggcggcggcggcgcttccccggcgcggagcggctttaaaaggcggcactccaccccccggcgcactcgcagctcgggcgccgcgcgagcctgtcgccgctatgcctccgcgcgcgccgcctgcgcccgggccccggccgccgccccgggccgccgccgccaccgacaccgccgcgggcgcggggggcgcggggggcgcggggggcgccggcgggcccgggttccggccgctcgcgccgcgtccctggcgctggctgctgctgctggcgctgcctgccgcctgctccgcccccgccgcgccccgtctacaccaaccactgggcggtgcaagtgctgggcggcccggccgaggcggaccgcgtggcggcggcgcacgggtacctcaacttgggccagattggaaacctggaagattactaccatttttatcacagcaaaacctttaaaagatcaaccttgagtagcagaggccctcacaccttcctcagaatggacccccaggtgaaatggctccagcaacaggaagtgaaacgaagggtgaagagacaggtgcgaagtgacccgcaggccctttacttcaacgaccccatttggtccaacatgtggtacctgcattgtggcgacaagaacagtcgctgccggtcggaaatgaatgtccaggcagcgtggaagaggggctacacaggaaaaaacgtggtggtcaccatccttgatgatggcatagagagaaatcaccctgacctggccccaaattatgattcctacgccagctacgacgtgaacggcaatgattatgacccatctccacgatatgatgccagcaatgaaaataaacacggcactcgttgtgcgggagaagttgctgcttcagcaaacaattcctactgcatcgtgggcatagcgtacaatgccaaaataggaggcatccgcatgctggacggcgatgtcacagatgtggtcgaggcaaagtcgctgggcatcagacccaactacatcgacatttacagtgccagctgggggccggacgacgacggcaagacggtggacgggcccggccgactggctaagcaggctttcgagtatggcattaaaaagggccggcagggcctgggctccattttcgtctgggcatctgggaatggcgggagagagggggactactgctcgtgcgatggctacaccaacagcatctacaccatctccgtcagcagcgccaccgagaatggctacaagccctggtacctggaagagtgtgcctccaccctggccaccacctacagcagtggggccttttatgagcgaaaaatcgtcaccacggatctgcgtcagcgctgtaccgatggccacactgggacctcagtctctgcccccatggtggcgggcatcatcgccttggctctagaagcaaacagccagttaacctggagggacgtccagcacctgctagtgaagacatcccggccggcccacctgaaagcgagcgactggaaagtgaacggcgcgggtcataaagttagccatttctatggatttggtttggtggacgcagaagctctcgttgtggaggcaaagaagtggacagcagtgccatcgcagcacatgtgtgtggccgcctcggacaagagacccaggagcatccccttagtgcaggtgctgcggactacggccctgaccagcgcctgcgcggagcactcggaccagcgggtggtctacttggagcacgtggtggttcgcacctccatctcacacccacgccgaggagacctccagatctacctggtttctccctcgggaaccaagtctcaacttctggcaaagaggttgctggatctttccaatgaagggtttacaaactgggaattcatgactgtccactgctggggagaaaaggctgaagggcagtggaccttggaaatccaagatctgccatcccaggtccgcaacccggagaagcaagggaagttgaaagaatggagcctcatactgtatggcacagcagagcacccgtaccacaccttcagtgcccatcagtcccgctcgcggatgctggagctctcagccccagagctggagccacccaaggctgccctgtcaccctcccaggtggaagttcctgaagatgaggaagattacacagctcaatccaccccaggctctgctaatattttacagaccagtgtgtgccatccggagtgtggtgacaaaggctgtgatggccccaatgcagaccagtgcttgaactgcgtccacttcagcctggggagtgtcaagaccagcaggaagtgcgtgagtgtgtgccccttgggctactttggggacacagcagcaagacgctgtcgccggtgccacaaggggtgtgagacctgctccagcagagctgcgacgcagtgcctgtcttgccgccgcgggttctatcaccaccaggagatgaacacctgtgtgaccctctgtcctgcaggattttatgctgatgaaagtcagaaaaattgccttaaatgccacccaagctgtaaaaagtgcgtggatgaacctgagaaatgtactgtctgtaaagaaggattcagccttgcacggggcagctgcattcctgactgtgagccaggcacctactttgactcagagctgatcagatgtggggaatgccatcacacctgcggaacctgcgtggggccaggcagagaagagtgcattcactgtgcgaaaaacttccacttccacgactggaagtgtgtgccagcctgtggtgagggcttctacccagaagagatgccgggcttgccccacaaagtgtgtcgaaggtacggtcctcctggcggggaacggcaggcagctgtgtccagcaaaggagtgcctggagggcagagtctggcagcatcttccccaggggccggggagggcatgttgcatcaccccactgtggacaggagcccatttacagagctgctgaggggccttcgtccctttgttcactggatgcatatttgttgggtccctgctgtgggcagacaccgtgcagcagcgggataagatgggaagcagaatagcaaggtgctcacaccccattggtggactacgcgggacgtccctgcccatgtcgcgctcagcatgcatcctttgcactgtcgataatcagagaaaccatgttttgggtt

SEQ ID NO: 10254 - protein, 845 aa, Homo sapiens
MDPQVKWLQQQEVKRRVKRQVRSDPQALYFNDPIWSNMWYLHCGDKNSRCRSEMNVQAAWKRGYTGKNVVVTILDDGIERNHPDLAPNYDSYASYDVNGNDYDPSPRYDASNENKHGTRCAGEVAASANNSYCIVGIAYNAKIGGIRMLDGDVTDVVEAKSLGIRPNYIDIYSASWGPDDDGKTVDGPGRLAKQAFEYGIKKGRQGLGSIFVWASGNGGREGDYCSCDGYTNSIYTISVSSATENGYKPWYLEECASTLATTYSSGAFYERKIVTTDLRQRCTDGHTGTSVSAPMVAGIIALALEANSQLTWRDVQHLLVKTSRPAHLKASDWKVNGAGHKVSHFYGFGLVDAEALVVEAKKWTAVPSQHMCVAASDKRPRSIPLVQVLRTTALTSACAEHSDQRVVYLEHVVVRTSISHPRRGDLQIYLVSPSGTKSQLLAKRLLDLSNEGFTNWEFMTVHCWGEKAEGQWTLEIQDLPSQVRNPEKQGKLKEWSLILYGTAEHPYHTFSAHQSRSRMLELSAPELEPPKAALSPSQVEVPEDEEDYTAQSTPGSANILQTSVCHPECGDKGCDGPNADQCLNCVHFSLGSVKTSRKCVSVCPLGYFGDTAARRCRRCHKGCETCSSRAATQCLSCRRGFYHHQEMNTCVTLCPAGFYADESQKNCLKCHPSCKKCVDEPEKCTVCKEGFSLARGSCIPDCEPGTYFDSELIRCGECHHTCGTCVGPGREECIHCAKNFHFHDWKCVPACGEGFYPEEMPGLPHKVCRRYGPPGGERQAAVSSKGVPGGQSLAASSPGAGEGMLHHPTVDRSPFTELLRGLRPFVHWMHICWVPAVGRHRAAAG

SEQ ID NO: 10255 - DNA, 3574 bp, Homo sapiens
tcgcgggccgaggacgcctctggggcggcaccgcgtcccgagagccccagaagtcggcggggaagttcccccggtggggggcgtttcgggcctcccggacggctctcggccccggagcccggtcgcaggagcgcgggcccgggggcgggaacgcgccgcggccgcctcctcctccccggctcccgcccgcggcggtgttggcggcggcggtggcggcggcggcggcgcttccccggcgcggagcggctttaaaaggcggcactccaccccccggcgcactcgcagctcgggcgccgcgcgagcctgtcgccgctatgcctccgcgcgcgccgcctgcgcccgggccccggccgccgccccgggccgccgccgccaccgacaccgccgcgggcgcggggggcgcggggggcgcggggggcgccggcgggcccgggttccggccgctcgcgccgcgtccctggcgctggctgctgctgctggcgctgcctgccgcctgctccgcccccgccgcgccccgtctacaccaaccactgggcggtgcaagtgctgggcggcccggccgaggcggaccgcgtggcggcggcgcacgggtacctcaacttgggccagattggaaacctggaagattactaccatttttatcacagcaaaacctttaaaagatcaaccttgagtagcagaggccctcacaccttcctcagaatggacccccaggtgaaatggctccagcaacaggaagtgaaacgaagggtgaagagacaggtgcgaagtgacccgcaggccctttacttcaacgaccccatttggtccaacatgtggtacctgcattgtggcgacaagaacagtcgctgccggtcggaaatgaatgtccaggcagcgtggaagaggggctacacaggaaaaaacgtggtggtcaccatccttgatgatggcatagagagaaatcaccctgacctggccccaaattatgattcctacgccagctacgacgtgaacggcaatgattatgacccatctccacgatatgatgccagcaatgaaaataaacacggcactcgttgtgcgggagaagttgctgcttcagcaaacaattcctactgcatcgtgggcatagcgtacaatgccaaaataggaggcatccgcatgctggacggcgatgtcacagatgtggtcgaggcaaagtcgctgggcatcagacccaactacatcgacatttacagtgccagctgggggccggacgacgacggcaagacggtggacgggcccggccgactggctaagcaggctttcgagtatggcattaaaaagggccggcagggcctgggctccattttcgtctgggcatctgggaatggcgggagagagggggactactgctcgtgcgatggctacaccaacagcatctacaccatctccgtcagcagcgccaccgagaatggctacaagccctggtacctggaagagtgtgcctccaccctggccaccacctacagcagtggggccttttatgagcgaaaaatcgtcaccacggatctgcgtcagcgctgtaccgatggccacactgggacctcagtctctgcccccatggtggcgggcatcatcgccttggctctagaagcaaacagccagttaacctggagggacgtccagcacctgctagtgaagacatcccggccggcccacctgaaagcgagcgactggaaagtgaacggcgcgggtcataaagttagccatttctatggatttggtttggtggacgcagaagctctcgttgtggaggcaaagaagtggacagcagtgccatcgcagcacatgtgtgtggccgcctcggacaagagacccaggagcatccccttagtgcaggtgctgcggactacggccctgaccagcgcctgcgcggagcactcggaccagcgggtggtctacttggagcacgtggtggttcgcacctccatctcacacccacgccgaggagacctccagatctacctggtttctccctcgggaaccaagtctcaacttctggcaaagaggttgctggatctttccaatgaagggtttacaaactgggaattcatgactgtccactgctggggagaaaaggctgaagggcagtggaccttggaaatccaagatctgccatcccaggtccgcaacccggagaagcaagggaacctggactaaaacacgtgttccggtggcagattgaacaagagctttggtaatctctgtgaaatactgcagagggacagatgaccaaagccaccacatttagaactttggctgcctttggaagtccagagctggatctctcagctcccgcccccagaggctcagcactttggacatggctcacaaacagttgttgattgactgcatgaatgcgtgtgcgtgcaagcatgaaccttgtttaaatcaagagcttacataattttaaccagttctgtcttcagctgtacatactcagtaaaatgtttaatgaaggggaagagattagtctcttctgtgtgaccatgttttccctttattcatcctaaaaagttccatgaattcttgatttcctttcagtggccctttcaacaatgtcttttttcccaagagcataactgttctcattttattgctagccatcttgatctgtgttttattgacatctcttttgagctaatcttcatttctaagataagagttgagattttgcaatctgtgttcgatggctcaatctatcctgtgcttgatgctagaaaggaagacagatttaaagcacatgccttctgtgccggctttcaagtttgtcactaaactctcatttctggaaagtgcaattatagagtatcactcccacttccttggaaacagagctgaagaacttggcacactctccaaacagtcaccatacacactgttgtcaaaaagttccatttttaaccccatttgcattaatattgcagtcaatctctttacctccttttctctttcacggggccgtgacagtgacgcctttccccaaaactctcctcgtttgagaaaaaaagaagtatgtatccccacttatctcggggagaaatgcaaccaactgctgctgtgcacatttatgaatcacagtattgtttagtcggttctgtatctccagtagaaagcataacaaaaagatgacctttgtctcacctcatagctaatttttgcaaataaaatactaaacattgatgaaaatgaaaatgacagatctgaggaagagggagagctctcttgaaacccctttcccagatttgccctcagttttaggaatgaggtacgcttgggcattcctgttgcctgcatggttcggcattctggcagccaggttcgccccagaatagataagtgtgtttgattttcgaacatttgactttattacctatttccagaaacacttcgtgttcaaactacgtctctacaggcatttctacttggtctttttctcccctgacatttcacagagtcctaactgtgctgcatgtataacttgttctttctttttgttacttgcatagcaagcatgtttctatgtcattaaatatcctttgtaagcagc

SEQ ID NO: 10256 - protein, 493 aa, Homo sapiens
MDPQVKWLQQQEVKRRVKRQVRSDPQALYFNDPIWSNMWYLHCGDKNSRCRSEMNVQAAWKRGYTGKNVVVTILDDGIERNHPDLAPNYDSYASYDVNGNDYDPSPRYDASNENKHGTRCAGEVAASANNSYCIVGIAYNAKIGGIRMLDGDVTDVVEAKSLGIRPNYIDIYSASWGPDDDGKTVDGPGRLAKQAFEYGIKKGRQGLGSIFVWASGNGGREGDYCSCDGYTNSIYTISVSSATENGYKPWYLEECASTLATTYSSGAFYERKIVTTDLRQRCTDGHTGTSVSAPMVAGIIALALEANSQLTWRDVQHLLVKTSRPAHLKASDWKVNGAGHKVSHFYGFGLVDAEALVVEAKKWTAVPSQHMCVAASDKRPRSIPLVQVLRTTALTSACAEHSDQRVVYLEHVVVRTSISHPRRGDLQIYLVSPSGTKSQLLAKRLLDLSNEGFTNWEFMTVHCWGEKAEGQWTLEIQDLPSQVRNPEKQGNLD

SEQ ID NO: 10257 - DNA, 3620 bp, Homo sapiens
tcgcgggccgaggacgcctctggggcggcaccgcgtcccgagagccccagaagtcggcggggaagttcccccggtggggggcgtttcgggcctcccggacggctctcggccccggagcccggtcgcaggagcgcgggcccgggggcgggaacgcgccgcggccgcctcctcctccccggctcccgcccgcggcggtgttggcggcggcggtggcggcggcggcggcgcttccccggcgcggagcggctttaaaaggcggcactccaccccccggcgcactcgcagctcgggcgccgcgcgagcctgtcgccgctatgcctccgcgcgcgccgcctgcgcccgggccccggccgccgccccgggccgccgccgccaccgacaccgccgcgggcgcggggggcgcggggggcgcggggggcgccggcgggcccgggttccggccgctcgcgccgcgtccctggcgctggctgctgctgctggcgctgcctgccgcctgctccgcccccgccgcgccccgtctacaccaaccactgggcggtgcaagtgctgggcggcccggccgaggcggaccgcgtggcggcggcgcacgggtacctcaacttgggccagattggaaacctggaagattactaccatttttatcacagcaaaacctttaaaagatcaaccttgagtagcagaggccctcacaccttcctcagaatggacccccaggtgaaatggctccagcaacaggaagtgaaacgaagggtgaagagacaggtgcgaagtgacccgcaggccctttacttcaacgaccccatttggtccaacatgtggtacctgcattgtggcgacaagaacagtcgctgccggtcggaaatgaatgtccaggcagcgtggaagaggggctacacaggaaaaaacgtggtggtcaccatccttgatgatggcatagagagaaatcaccctgacctggccccaaattatgattcctacgccagctacgacgtgaacggcaatgattatgacccatctccacgatatgatgccagcaatgaaaataaacacggcactcgttgtgcgggagaagttgctgcttcagcaaacaattcctactgcatcgtgggcatagcgtacaatgccaaaataggaggcatccgcatgctggacggcgatgtcacagatgtggtcgaggcaaagtcgctgggcatcagacccaactacatcgacatttacagtgccagctgggggccggacgacgacggcaagacggtggacgggcccggccgactggctaagcaggctttcgagtatggcattaaaaagggccggcagggcctgggctccattttcgtctgggcatctgggaatggcgggagagagggggactactgctcgtgcgatggctacaccaacagcatctacaccatctccgtcagcagcgccaccgagaatggctacaagccctggtacctggaagagtgtgcctccaccctggccaccacctacagcagtggggccttttatgagcgaaaaatcgtcaccacggatctgcgtcagcgctgtaccgatggccacactgggacctcagtctctgcccccatggtggcgggcatcatcgccttggctctagaagcaaacagccagttaacctggagggacgtccagcacctgctagtgaagacatcccggccggcccacctgaaagcgagcgactggaaagtgaacggcgcgggtcataaagttagccatttctatggatttggtttggtggacgcagaagctctcgttgtggaggcaaagaagtggacagcagtgccatcgcagcacatgtgtgtggccgcctcggacaagagacccaggagcatccccttagtgcaggtgctgcggactacggccctgaccagcgcctgcgcggagcactcggaccagcgggtggtctacttggagcacgtggtggttcgcacctccatctcacacccacgccgaggagacctccagatctacctggtttctccctcgggaaccaagtctcaacttctggcaaagaggttgctggatctttccaatgaagggtttacaaactgggaattcatgactgtccactgctggggagaaaaggctgaagggcagtggaccttggaaatccaagatctgccatcccaggtccgcaacccggagaagcaaggtgatcttgagactcctgttgcaaatcaactgaccacagaagagagggaacctggactaaaacacgtgttccggtggcagattgaacaagagctttggtaatctctgtgaaatactgcagagggacagatgaccaaagccaccacatttagaactttggctgcctttggaagtccagagctggatctctcagctcccgcccccagaggctcagcactttggacatggctcacaaacagttgttgattgactgcatgaatgcgtgtgcgtgcaagcatgaaccttgtttaaatcaagagcttacataattttaaccagttctgtcttcagctgtacatactcagtaaaatgtttaatgaaggggaagagattagtctcttctgtgtgaccatgttttccctttattcatcctaaaaagttccatgaattcttgatttcctttcagtggccctttcaacaatgtcttttttcccaagagcataactgttctcattttattgctagccatcttgatctgtgttttattgacatctcttttgagctaatcttcatttctaagataagagttgagattttgcaatctgtgttcgatggctcaatctatcctgtgcttgatgctagaaaggaagacagatttaaagcacatgccttctgtgccggctttcaagtttgtcactaaactctcatttctggaaagtgcaattatagagtatcactcccacttccttggaaacagagctgaagaacttggcacactctccaaacagtcaccatacacactgttgtcaaaaagttccatttttaaccccatttgcattaatattgcagtcaatctctttacctccttttctctttcacggggccgtgacagtgacgcctttccccaaaactctcctcgtttgagaaaaaaagaagtatgtatccccacttatctcggggagaaatgcaaccaactgctgctgtgcacatttatgaatcacagtattgtttagtcggttctgtatctccagtagaaagcataacaaaaagatgacctttgtctcacctcatagctaatttttgcaaataaaatactaaacattgatgaaaatgaaaatgacagatctgaggaagagggagagctctcttgaaacccctttcccagatttgccctcagttttaggaatgaggtacgcttgggcattcctgttgcctgcatggttcggcattctggcagccaggttcgccccagaatagataagtgtgtttgattttcgaacatttgactttattacctatttccagaaacacttcgtgttcaaactacgtctctacaggcatttctacttggtctttttctcccctgacatttcacagagtcctaactgtgctgcatgtataacttgttctttctttttgttacttgcatagcaagcatgtttctatgtcattaaatatcctttgtaagcagc

SEQ ID NO: 10258 - protein, 522 aa, Homo sapiens
MDPQVKWLQQQEVKRRVKRQVRSDPQALYFNDPIWSNMWYLHCGDKNSRCRSEMNVQAAWKRGYTGKNVVVTILDDGIERNHPDLAPNYDSYASYDVNGNDYDPSPRYDASNENKHGTRCAGEVAASANNSYCIVGIAYNAKIGGIRMLDGDVTDVVEAKSLGIRPNYIDIYSASWGPDDDGKTVDGPGRLAKQAFEYGIKKGRQGLGSIFVWASGNGGREGDYCSCDGYTNSIYTISVSSATENGYKPWYLEECASTLATTYSSGAFYERKIVTTDLRQRCTDGHTGTSVSAPMVAGIIALALEANSQLTWRDVQHLLVKTSRPAHLKASDWKVNGAGHKVSHFYGFGLVDAEALVVEAKKWTAVPSQHMCVAASDKRPRSIPLVQVLRTTALTSACAEHSDQRVVYLEHVVVRTSISHPRRGDLQIYLVSPSGTKSQLLAKRLLDLSNEGFTNWEFMTVHCWGEKAEGQWTLEIQDLPSQVRNPEKQGDLETPVANQLTTEEREPGLKHVFRWQIEQELW

SEQ ID NO: 10259 - DNA, 2339 bp, Homo sapiens
tcgcgggccgaggacgcctctggggcggcaccgcgtcccgagagccccagaagtcggcggggaagttcccccggtggggggcgtttcgggcctcccggacggctctcggccccggagcccggtcgcaggagcgcgggcccgggggcgggaacgcgccgcggccgcctcctcctccccggctcccgcccgcggcggtgttggcggcggcggtggcggcggcggcggcgcttccccggcgcggagcggctttaaaaggcggcactccaccccccggcgcactcgcagctcgggcgccgcgcgagcctgtcgccgctatgcctccgcgcgcgccgcctgcgcccgggccccggccgccgccccgggccgccgccgccaccgacaccgccgcgggcgcggggggcgcggggggcgcggggggcgccggcgggcccgggttccggccgctcgcgccgcgtccctggcgctggctgctgctgctggcgctgcctgccgcctgctccgcccccgccgcgccccgtctacaccaaccactgggcggtgcaagtgctgggcggcccggccgaggcggaccgcgtggcggcggcgcacgggtacctcaacttgggccagattggaaacctggaagattactaccatttttatcacagcaaaacctttaaaagatcaaccttgagtagcagaggccctcacaccttcctcagaatggacccccaggtgaaatggctccagcaacaggaagtgaaacgaagggtgaagagacaggtgcgaagtgacccgcaggccctttacttcaacgaccccatttggtccaacatgtggtacctgcattgtggcgacaagaacagtcgctgccggtcggaaatgaatgtccaggcagcgtggaagaggggctacacaggaaaaaacgtggtggtcaccatccttgatgatggcatagagagaaatcaccctgacctggccccaaattatgattcctacgccagctacgacgtgaacggcaatgattatgacccatctccacgatatgatgccagcaatgaaaataaacacggcactcgttgtgcgggagaagttgctgcttcagcaaacaattcctactgcatcgtgggcatagcgtacaatgccaaaataggaggcatccgcatgctggacggcgatgtcacagatgtggtcgaggcaaagtcgctgggcatcagacccaactacatcgacatttacagtgccagctgggggccggacgacgacggcaagacggtggacgggcccggccgactggctaagcaggctttcgagtatggcattaaaaagggccggcagggcctgggctccattttcgtctgggcatctgggaatggcgggagagagggggactactgctcgtgcgatggctacaccaacagcatctacaccatctccgtcagcagcgccaccgagaatggctacaagccctggtacctggaagagtgtgcctccaccctggccaccacctacagcagtggggccttttatgagcgaaaaatcgtcaccacggatctgcgtcagcgctgtaccgatggccacactgggacctcagtctctgcccccatggtggcgggcatcatcgccttggctctagaagcaaacagccagttaacctggagggacgtccagcacctgctagtgaagacatcccggccggcccacctgaaagcgagcgactggaaagtgaacggcgcgggtcataaagttagccatttctatggatttggtttggtggacgcagaagctctcgttgtggaggcaaagaagtggacagcagtgccatcgcagcacatgtgtgtggccgcctcggacaagagacccaggagcatccccttagtgcaggtgctgcggactacggccctgaccagcgcctgcgcggagcactcggaccagcgggtggtctacttggagcacgtggtggttcgcacctccatctcacacccacgccgaggagacctccagatctacctggtttctccctcgggaaccaagtctcaacttctggcaaagaggttgctggatctttccaatgaagggtttacaaactgggaattcatgactgtccactgctggggagaaaaggctgaagggcagtggaccttggaaatccaagatctgccatcccaggtccgcaacccggagaagcaaggtgatcttgagactcctgttgcaaatcaactgaccacagaagagaggttcgtttccacactctcgattctgttccattggtctgtatatctatcttggagtcagtaccatattgttttgatcactgtagctttgtagtaagttttgaaataagaaagtgcgagtcctcc

SEQ ID NO: 10260 - protein, 534 aa, Homo sapiens
MDPQVKWLQQQEVKRRVKRQVRSDPQALYFNDPIWSNMWYLHCGDKNSRCRSEMNVQAAWKRGYTGKNVVVTILDDGIERNHPDLAPNYDSYASYDVNGNDYDPSPRYDASNENKHGTRCAGEVAASANNSYCIVGIAYNAKIGGIRMLDGDVTDVVEAKSLGIRPNYIDIYSASWGPDDDGKTVDGPGRLAKQAFEYGIKKGRQGLGSIFVWASGNGGREGDYCSCDGYTNSIYTISVSSATENGYKPWYLEECASTLATTYSSGAFYERKIVTTDLRQRCTDGHTGTSVSAPMVAGIIALALEANSQLTWRDVQHLLVKTSRPAHLKASDWKVNGAGHKVSHFYGFGLVDAEALVVEAKKWTAVPSQHMCVAASDKRPRSIPLVQVLRTTALTSACAEHSDQRVVYLEHVVVRTSISHPRRGDLQIYLVSPSGTKSQLLAKRLLDLSNEGFTNWEFMTVHCWGEKAEGQWTLEIQDLPSQVRNPEKQGDLETPVANQLTTEERFVSTLSILFHWSVYLSWSQYHIVLITVAL

SEQ ID NO: 10261 - DNA, 2300 bp, Homo sapiens
tcgcgggccgaggacgcctctggggcggcaccgcgtcccgagagccccagaagtcggcggggaagttcccccggtggggggcgtttcgggcctcccggacggctctcggccccggagcccggtcgcaggagcgcgggcccgggggcgggaacgcgccgcggccgcctcctcctccccggctcccgcccgcggcggtgttggcggcggcggtggcggcggcggcggcgcttccccggcgcggagcggctttaaaaggcggcactccaccccccggcgcactcgcagctcgggcgccgcgcgagcctgtcgccgctatgcctccgcgcgcgccgcctgcgcccgggccccggccgccgccccgggccgccgccgccaccgacaccgccgcgggcgcggggggcgcggggggcgcggggggcgccggcgggcccgggttccggccgctcgcgccgcgtccctggcgctggctgctgctgctggcgctgcctgccgcctgctccgcccccgccgcgccccgtctacaccaaccactgggcggtgcaagtgctgggcggcccggccgaggcggaccgcgtggcggcggcgcacgggtacctcaacttgggccagattggaaacctggaagattactaccatttttatcacagcaaaacctttaaaagatcaaccttgagtagcagaggccctcacaccttcctcagaatggacccccaggtgaaatggctccagcaacaggaagtgaaacgaagggtgaagagacaggtgcgaagtgacccgcaggccctttacttcaacgaccccatttggtccaacatgtggtacctgcattgtggcgacaagaacagtcgctgccggtcggaaatgaatgtccaggcagcgtggaagaggggctacacaggaaaaaacgtggtggtcaccatccttgatgatggcatagagagaaatcaccctgacctggccccaaattatgattcctacgccagctacgacgtgaacggcaatgattatgacccatctccacgatatgatgccagcaatgaaaataaacacggcactcgttgtgcgggagaagttgctgcttcagcaaacaattcctactgcatcgtgggcatagcgtacaatgccaaaataggaggcatccgcatgctggacggcgatgtcacagatgtggtcgaggcaaagtcgctgggcatcagacccaactacatcgacatttacagtgccagctgggggccggacgacgacggcaagacggtggacgggcccggccgactggctaagcaggctttcgagtatggcattaaaaagggccggcagggcctgggctccattttcgtctgggcatctgggaatggcgggagagagggggactactgctcgtgcgatggctacaccaacagcatctacaccatctccgtcagcagcgccaccgagaatggctacaagccctggtacctggaagagtgtgcctccaccctggccaccacctacagcagtggggccttttatgagcgaaaaatcgtcaccacggatctgcgtcagcgctgtaccgatggccacactgggacctcagtctctgcccccatggtggcgggcatcatcgccttggctctagaagcaaacagccagttaacctggagggacgtccagcacctgctagtgaagacatcccggccggcccacctgaaagcgagcgactggaaagtgaacggcgcgggtcataaaggtgcggcagtggcgttctggtggaccattgggtggccctggaatgtgtaggaaggggtgtcatgaattccttaaaaggactctccaaatagcattagttgttattattaattgtgtgtcacaagaatttaaaacgcatgtgcagctatttaagaaaagtatcccggaagctcacagtgacattacggaagaaccctcaggtcacaagagtctggggtctcctatactctataactttggccacaccgagacaccacctataccaatatttactcatagttctctttaagccaggagcaatgacgtgtgcctatagtcgcagctactagggaagttgaggcaggaggattgcttgagcccaggaatttgagtctagcctggacaacacagcaggactccatctcttaaaaaaaaaattacttcccccactacttttttttgacataaaaaaatgtattttaaaaggaaactgtactacatctagttaatcataggtttgatatgtagttacgtattttttctaatgtgcattaaaacaaatccataattattaaaataaatgttgtttgtgtgcc

SEQ ID NO: 10262 - protein, 357 aa, Homo sapiens
MDPQVKWLQQQEVKRRVKRQVRSDPQALYFNDPIWSNMWYLHCGDKNSRCRSEMNVQAAWKRGYTGKNVVVTILDDGIERNHPDLAPNYDSYASYDVNGNDYDPSPRYDASNENKHGTRCAGEVAASANNSYCIVGIAYNAKIGGIRMLDGDVTDVVEAKSLGIRPNYIDIYSASWGPDDDGKTVDGPGRLAKQAFEYGIKKGRQGLGSIFVWASGNGGREGDYCSCDGYTNSIYTISVSSATENGYKPWYLEECASTLATTYSSGAFYERKIVTTDLRQRCTDGHTGTSVSAPMVAGIIALALEANSQLTWRDVQHLLVKTSRPAHLKASDWKVNGAGHKGAAVAFWWTIGWPWNV

SEQ ID NO: 10263 - DNA, 1879 bp, Homo sapiens
tggggcgtcagctggacaaaagccgacccgacttcatttgtctgcctcgaccccgaccccggctggtagacagcactcctgatgcacgggacgagggagcggcacgagcaaaggccctgaaacaggagggagcgcggggtacctgagtgagattcatcgtagatgcctggatgaagagaggggccttgcgcttctatttgccttgttacatagtgtttcttggaaaggctgtccttccctactccaagcccctcccctcactccccacccaggatctgggcactggaggcgccagacatcttatgccctgtccaaggctagcagggccatccatcagtgctggtgagctgagctcagctgacaagccagcctggcacggagcgctgcccctcctgctggtcccagatccgttctgtccggaggagaatttcttatccccaggagatgcctggcctcgttaggagcctcctcacccgcccgcccgcaccaaccctctgactccctccacctcaccgcctgggaacaacaggaagagagcaggacagcagcagaaaggagtgctgcttatgtggctcttctcagaatcaggaggctcccaggccaggaatgtgaaaccattatgcagatgaagaagatgaagcccgagaggttatgaaacagacccaagtgggctcgctcttcagtctcggcataaggaatccggaacctgggcccgtgtccggaactgctgtgcccaggcagcttgcctggaaatcaggaaagtatgtgatggtgatgggagtggttcaggcctgcagccctgagccctgcctgcaggctgtgaagatgacagacctttctgataatcccatccatgaaagtatgtgggaactggaggtagaagatttacacaggaatattccttagagtatgttggaactgtcgttaaaaacaaccaaaatcccgaaactatttagaagcttataatgatgtggatttcatggacacttttcaatgcgtatttttcaaatgcttctcagagagccttgctttggttgaccaaggagtccggatgtaggaatgtttaaatcctcggatacttcagtgacacagcctctgctgccccttgctttgcctgtgtttgctgatgaaaagcagatgcttgtgtttcattttccttcctggtttgtgtgtgttaattctctctctctctctcagacacagaagtctcatgttgcattttccaaattttatgagtgatgatactttttccattactgctgcgtccctgttttacaatgcaaaatttaagtacggtcgttgcccatggtgattaaagtgtggttatgggcaggaagacagactgtgtaaaaaaggaatgacatcctggctcctcatcttcttcatcagcaactaccataaccagtttgcgagtcaaatggcatttcctaacggcaggcatggcggcccctgaaagacaacagctccctttctgcttcggacaccactcaaacatttagacgcagctctatcccttttcctagctagagaaggtgatgccttcttccattactcagagatgttgagacgttttcagaatttcttgttgaaatgaaaaacatcaagataaaggacgcctttcaggcattagctaaacttccacttcataactttcggcgagacatggtgagcctcctggtgtagagttcttttgtctttgtatggaatgactttttgctgtgatggttttgaatgttgggtttctgctgtctgcttagtacccatgcctgaattttttgagattgtaaatatcaaaggagttagattgtgttctgacatggttgtagactttcacctggattattgatattctacctctaataaatttttaataggctgt

SEQ ID NO: 10264 - protein, 96 aa, Homo sapiens
MKRGALRFYLPCYIVFLGKAVLPYSKPLPSLPTQDLGTGGARHLMPCPRLAGPSISAGELSSADKPAWHGALPLLLVPDPFCPEENFLSPGDAWPR

SEQ ID NO: 10265 - DNA, 451 bp, Homo sapiens
gaatactctggggaattttttttttggaaatacaggttttatgaaaacacacacatacacgcacacaaattttgaactgtatttaatgaaatgcctgccaaagtatgcaaaggggcagtggatggatgtctcttacttactttggatgcaacttactttgaaatgcaacaagaatgctgggattacaggcatgagccattgcacccggcccccagtggcttttcaacaagggccaacaaggtcattccatgggaaaataatcatttaataaataatgctagaacaataagaaaaagaagaaagttcaacctctctgtctatgtatagaatggaccaaaggccgaaatataagagctaaaactgtaaaactcgtaaaagaaaacagaagggtaaatgttcacaaccttgggtttggtgatggatctttagagatgacagcaaaagcacaagc

SEQ ID NO: 10266 - protein, 78 aa, Homo sapiens
MPAKVCKGAVDGCLLLTLDATYFEMQQECWDYRHEPLHPAPSGFSTRANKVIPWENNHLINNARTIRKRRKFNLSVYV

SEQ ID NO: 10267 - DNA, 692 bp, Homo sapiens
aaataaggtggatggatgggtggatagagggaaggacaggtggctagagctgagataaggcaactagagtcaactgttcattgtggaatccgcatggtgggtgattgatgttcactgcacagttctttcaagaacacaacatctggggacaactgtaggttccagggctgcagcacagccttcctgcattggaatgtctgggggtgggaccctagaatgattctggggcccagccctcccctactcagtgacaagcaaacttctgctctctcactcacagagtatcaccaggtcatgtgaaagtcgatgcatcttggcctctggtgcccctttttctccacttcacgcaggcccagggctgggctcaagggagcatgggtagaatagggtaaagtcacacctcagtgcctgatgactgacactctctagccctctgcaccagtagtgatttctgctgtccacggcacactgccatggcgtgaacagaatgtttgtgccctctcctcccaaattcatatgttccactgtatgtggttaactataatttattgtatagtctcaaaaaactagaatactctggattgctgggattacaggcatgagccattgcacccggcccccagtggcttttcaacaagggccaacaaggtcattccatgggaaaataatcatttaataaataatgctagaac

SEQ ID NO: 10268 - protein, 39 aa, Homo sapiens
NTLDCWDYRHEPLHPAPSGFSTRANKVIPWENNHLINNA

SEQ ID NO: 10269 - DNA, 715 bp, Homo sapiens
gaggtaaagaacttcctctttcaacgcatctcaaaatttggcgtggatgcagatcacctacagagtatgattattcatctttacattgccttgttttgagatgatgaaactgaggttcaagccaatgacaagcctgaagccacatggctagtgagtggcagagtcagaactcaaacccaaatccacctgaccccaaacttcatgtatcttgaactacaggctccatctcactgttcacactctcacccacctccacccatcaaaggtgcctctagacctttgcttgtgttgtttgttctctgcctgacatgcctccccctcagtcgctctcagttgaaacctggcttagtcatcaagtgcctgctcagcagcaagacctcttctcttcacagagcctttgttgagccccaccactggaattaacctcttccttccagaccagtttggtggtgcccctaatccacagtttcccaacctcagccctactgacactggggctggataatctttgtcgtgggggctgtcgtgtgcactgcaggatatggagcagtacccctgctttccacccacgagatgccatggcaccctcctcaagttgcaacaaccaaaatatgtcttcagacattgccactgtcccctagggtactaaatcacctctatggagaaccactgtcctaagctacaatactcactgccctctgttttgagccataaa

SEQ ID NO: 10270 - protein, 73 aa, Homo sapiens
MYLELQAPSHCSHSHPPPPIKGASRPLLVLFVLCLTCLPLSRSQLKPGLVIKCLLSSKTSSLHRAFVEPHHWN

SEQ ID NO: 10271 - DNA, 1458 bp, Homo sapiens
cgggaaagcggaggcggggcggaagggtgcggcgaggcggaatggcggcggctgcggactcgttctcaggcggccccgcgggggtgcggcttccgaggtcgccgccactcaaggtgctggcggagcagctgcggcgcgacgcggagggcggcccgggcgcgtggcggctgtcacgggcggcggcgggccgcgggccgctggacctggcggccgtgtggatgcagggcagggtagtgatggcggaccgcggcgaggctcggctgagggacccgagcggggacttctcggtccgcggcctggagcgggtgccgcgcgggcggccctgtctagtcccaggaaagtatgtgatggtgatgggagtggttcaggcctgcagccctgagccctgcctgcaggctgtgaagatgacagacctttctgataatcccatccatgaaagtatgtgggaactggaggtagaagatttacacaggaatattccttagagtatgttggaactgtcgttaaaaacaaccaaaatcccgaaactatttagaagcttataatgatgtggatttcatggacacttttcaatgcgtatttttcaaatgcttctcagagagccttgctttggttgaccaaggagtccggatgtaggaatgtttaaatcctcggatacttcagtgacacagcctctgctgccccttgctttgcctgtgtttgctgatgaaaagcagatgcttgtgtttcattttccttcctggtttgtgtgtgttaattctctctctctctctcagacacagaagtctcatgttgcattttccaaattttatgagtgatgatactttttccattactgctgcgtccctgttttacaatgcaaaatttaagtacggtcgttgcccatggtgattaaagtgtggttatgggcaggaagacagactgtgtaaaaaaggaatgacatcctggctcctcatcttcttcatcagcaactaccataaccagtttgcgagtcaaatggcatttcctaacggcaggcatggcggcccctgaaagacaacagctccctttctgcttcggacaccactcaaacatttagacgcagctctatcccttttcctagctagagaaggtgatgccttcttccattactcagagatgttgagacgttttcagaatttcttgttgaaatgaaaaacatcaagataaaggacgcctttcaggcattagctaaacttccacttcataactttcggcgagacatggtgagcctcctggtgtagagttcttttgtctttgtatggaatgactttttgctgtgatggttttgaatgttgggtttctgctgtctgcttagtacccatgcctgaattttttgagattgtaaatatcaaaggagttagattgtgttctgacatggttgtagactttcacctggattattgatattctacctctaataaatttttaataggctgt

SEQ ID NO: 10272 - protein, 147 aa, Homo sapiens; identical to SEQ ID NO: 1653

SEQ ID NO: 10273 - DNA, 1093 bp, Homo sapiens
ccccaccccgcggttgccatgaccattccaatggctccagcccatctcctgccagcttcctcctcttcgaaaccatccccaccccactgctgcagtcaacattgtcaaatccacctcctgcctccagaactcagttgatccaagcgcgatctagcaccttaggtttatggaaacaaactcctggatgttccagaggaagaggcggtggaggaacagcactacagcagcagtgcagtgagcagagttcaaggccatcttgaagcaggcaggtccttccagacagccaatgaggctcatcaggatagagccctcctaccttccaccactgccccaggctccccaaaggcacgcggctctatccccttcaagcctttgcacaggctgctccatggagctgcacaatctcctgccactgcacacagacagagggtgcccaagtgtcccagttttaacactgaaagtcccacgtcccaggaccctctcagtcccaggcaacccaggagggttggtccttacagataactccaatgcatccttcagggctgcctcttccaggaagccttccctgagccctcaaacctagatcagctgtccctcctctgcgccacctcactcttgcctgcaatgttactttgtgttttagtggcccgcttacctccctgcctccctgatggcagtgactcaattttgtcaagctggactcagtattaattaacaagaagaaatgacatggcccctgccagctggcattcaggccagtgggtatgtcagacaggttcaccaatgcccatgggttcaaacacttatttactagatgccaggcttatgccagggctgagaccagataggagactgccccagcctgcctgcaaggtgctttgcctgcaaaccaacacaccaagcagcatgggttacttgctgggccaaggctaaggccaagggttggcaaactttttctgtaaagggcgagacaaatattttgggcttttcccgccatagggtctctgtcccagataaaattctagctggggtgggacagcggcccgagacattctgtaaattaccaatgtattccaataaaacttaacttatg

SEQ ID NO: 10274 - protein, 98 aa, Homo sapiens
MRLIRIEPSYLPPLPQAPQRHAALSPSSLCTGCSMELHNLLPLHTDRGCPSVPVLTLKVPRPRTLSVPGNPGGLVLTDNSNASFRAASSRKPSLSPQT

SEQ ID NO: 10275 - DNA, 2048 bp, Homo sapiens
agcttcgtggctccaaggctcagcgggttggcctactgggccgtgtctccacctcgacttctcaaagcctggtccggttggagggaagcgtggacaacagagaggagaaagtgaggctgtctgtgttccgggccccaagctgtctgcaggcctctgtggcccatgaggaggggggcagagaggagagtgtggtgctgcgggcatgtgcccatgggcggacagccgaggcggaggtcctgttccgggatggcaggcagccctcccagccgctgggacgcctgaccctgcaggctgccaaccagagtctcctgctggccgcgcgcggctgccaggggggcctgctgggccatgtggaggattgcagcagttggctcccaggtgcaagcccggctggaagagaaggttcaaggcttgggtgcctctgtgagaaggttccagcaattggtgcagccggcaggcaccctggacggcgtggcaggcctccttctgcagctgtcccaggcggggcgggaggccatgcagggcccctggccacactgaaggatgcctacctggaggtgacactgcggcccctggaggaggtgtggcgggagcgagcagaggaggccatgcggcggctgcaggcctgggtgcccgggatgccaggcaaagggggtccaaggcccatcagggcggccctgggggccatgaaaggagccctggagctggccgcccaacagatgctgtcttgggctgaggccacgttctcacgggcactgaagaggctctgcaaaccactgctggacctgtacagcctgtcggccaggaaccgctcagtggtggtgatgctgccactgttgcctgcgggggacgagcccctggacgtggcccgggtgaccagctacctcatggaggagaagctgctgcggccgctccgagagctgtctggggccaacgtgctggctgagtactactggctcagacgccgcctgctggcgggcccctgggaataccatgccctggtggctggggcccagcacgtggtgaccttcgacggccgggtatgggacctcagcacccagtgcggcagcatcctcctggcccaggactttgctcacaacacattctcgctgacgctgagtcggacaggctcggggctcacagccctgttcgtggaacttaaccacaagaccctcatcctctaccccagtctgcagacctcctgcccagccccctctggcccacaggcctacaggctgtacaactcctccctgccgggggacagttgtccggacctcaagctgcatcctgccacgacaaggaaggacgtctccaggattgagctggccagcgaggacggggtgtctgtctcctgtgacgtgcccaccggcctctgcagcctgactctgggcctctggcagcacggcatatccgctggccttctgggcaccaatgacaatgaagcaggcaatgagctgatgttgccggatggctctatggcccgcagcctggaggagctcagcctggcctggcaggtgggtggtgactgcagggccactgagaagcctcagcaggagcaggcctgcccgggacagctccccgcctgctgggccttcttcgagggcccccactccagcttgagggactgcttccgggtggtagaccctacaccattcctcagcctgtgtgtgcaggtcccctgtggcacccaggagctccagcctgcctgcaacctggcggccgcctacatccacctgtgtgcccgtggattcgtacccctggcccctcctccacagtgtgggaactccaatgaggaagagaaagtgcggaccatcgacttccgtgtctctgaaaacaactttgtaaaaaagcttggggcatgcatggaccccttggtcctggtactcagggctccagggtccccaccagaggaagccttcaccagttcacaaccagtgccacgggcagctctgacccctcctgtggcccagctatctctgggccaggaagctgtagatctgtggctgccaagcctggttgatgacgagacccaccggagagctttctaa

SEQ ID NO: 10276 - protein, 479 aa, Homo sapiens
MRRLQAWVPGMPGKGGPRPIRAALGAMKGALELAAQQMLSWAEATFSRALKRLCKPLLDLYSLSARNRSVVVMLPLLPAGDEPLDVARVTSYLMEEKLLRPLRELSGANVLAEYYWLRRRLLAGPWEYHALVAGAQHVVTFDGRVWDLSTQCGSILLAQDFAHNTFSLTLSRTGSGLTALFVELNHKTLILYPSLQTSCPAPSGPQAYRLYNSSLPGDSCPDLKLHPATTRKDVSRIELASEDGVSVSCDVPTGLCSLTLGLWQHGISAGLLGTNDNEAGNELMLPDGSMARSLEELSLAWQVGGDCRATEKPQQEQACPGQLPACWAFFEGPHSSLRDCFRVVDPTPFLSLCVQVPCGTQELQPACNLAAAYIHLCARGFVPLAPPPQCGNSNEEEKVRTIDFRVSENNFVKKLGACMDPLVLVLRAPGSPPEEAFTSSQPVPRAALTPPVAQLSLGQEAVDLWLPSLVDDETHRRAF

SEQ ID NO: 10277 - DNA, 456 bp, Homo sapiens
ccacactgaaggatgcctacctggaggtgacactgcggcccctggaggaggtgtggcgggagcgagcagaggaggccatgcggcggctgcaggcctgggtgcccgggatgccaggcaaagggggtccaaggcccatcagggcggccctgggggccatgaaaggagccctggagctggtgagtgagcaaggatggggcgtagttggcaggtgaggatgactgagccagctctcactgtcccctccctctccaggccgcccaacagatgctgtcttgggctgaggccacgttctcacgggcactgaagaggctctgcaaaccactgctggacctgtacagcctgtcggccaggaaccgctcagtggtggtgatgctgccactgttgcctgcgggggacgagcccctggacgtggcccgggtgaccagctacctcatggaggagaagctgctgcggccg

SEQ ID NO: 10278 - protein, 63 aa, Homo sapiens
MLSWAEATFSRALKRLCKPLLDLYSLSARNRSVVVMLPLLPAGDEPLDVARVTSYLMEEKLLR

SEQ ID NO: 10279 - DNA, 1045 bp, Homo sapiens
gtgagctggcagtggcgtcagttgagtcccctgaacccccttgggcctggagctgctgacctcagctcacgtgccctaccctttgtgtgtgtcctcacccacccagtggagctcacccacccgctgcccctccccctgccgcgacactgcagcctccgcctgtcctcagagcatttgggaggcagccaccgggatggcctggttgtcggctgggatggcagggaccaggtgctggtctcctcctccctgtggctggggaagagtgagctggccgcccgcctggccctggctcacccattcaacctcccttggcggcaagccgaggccagtggccttgctgagagcaggggtggcaggcagagccggcaggtgcagctcacctggaacagaggacaacctgcgacgctgcagctcacctgggctgacgggtccttagcacacagcaccgcctgggacggctgcctggccgcctccccggggcagctccaggaaacctggggcctgaacagcctccaggcctgcggggccttcacgcagaccccagctgtgttcgttgaacagctcaacgtgtcctggggccagcaccgcatgcgcagaacttgacctacgagaggcattggccatctcagccagacaagatcatcatggaggccacgctggagcacgtcctcggggcctcttgtacccgtcagagcttctggggagaagtacagactgactatgcacgctggctgcggcactccctccacctggggctctgtgacctgcccagggccctcttggtcgtcggggagcacaccctgggccagggtggactcctgctgcgttcccgctgccacctgggccttgcaccagacccagaccacggcctgcatctcagcctgaccctccaaaaccacagcaggcctcgttcagctgacttctccggggcactggaggtcagtggccaggatggggctgacagtccctgggaaagatatcccggcatccctgcggttcctccctggccagcaggcccccaactgcctgggcggccccgccatct

SEQ ID NO: 10280 - protein, 132 aa, Homo sapiens
MEATLEHVLGASCTRQSFWGEVQTDYARWLRHSLHLGLCDLPRALLVVGEHTLGQGGLLLRSRCHLGLAPDPDHGLHLSLTLQNHSRPRSADFSGALEVSGQDGADSPWERYPGIPAVPPWPAGPQLPGRPR

SEQ ID NO: 10281 - DNA, 3225 bp, Homo sapiens
atgcactccagtgataaagctccttggcaggcatttttaacttctcagtcaacacaggctaagaacagagaggtcgaggccactttgaaagtccaccggaaagttgtcctgcacttgaagggtttgcatcatgacagatctcagcatggggaaatccggcacagcctggccctggacttggcccattcctaccagctgagcttcccccaggccctgagcttggatgggggcatcatctttagacagagtccccaaggaacattcaactttggcatggatgcacgagctgccgtcaatcacaacgtcacatcccaggcctcggtccagctgaacggatctgactccgactttgcatttttcttccaactcaggcatcctcacggaccaacatttcctccaaacttccaggtgcaggcagctgccgggcgctacagagtgcgcagcctcaacgggtctctatctgtgcaaatgtctggccgggagctggttctgctggaggtcgacgccagccaggacactcggaggagcagccggggctggggtgtgagtgtccttctccaccaggctgtcctcagtgcccccagggctgttcggctgcagctgtctgcaaagatcaccccagcaaggatttggctgttttccaaggcactgctggaccagaacacagcacagttgctcctcaaggcatctgaggaatggaggggaggccggatcctgactttccagagccaaacccggcacacggtggctggctgggcagcgatgccccgcctcctgacactcacaggaaggctgaagcagaaggagacacttcaagagggcaccctcagtgtcactgctgactcagctgtgctgggcttcctcctgcgggaccagcatgagaaggcagggaacggcaccagcgtgcgcagcgtgacctgtgtccttgcccagaacagcagccaggccttgcctggagagctccagctgaagggccggctgcaggcccagacgaggaacctgagggcccaggccagcatccgggcccatgcagccagcctggctctgggtggcgcctgctcctggggcccccggcacggacagcttgcgggtggcccgacacacaatatcagcacgctgagtgatgcaggactcccctccgaggcagggatgctcctgtctctcacccacgtggcttccaactgctcagcacgcctggcgctgtggaacgcgggggctcagctagacggtgccattggcctggaggacgtgacccccgagtcctcgggcctccagctccatgccagcctccgtcacacccacaccatgcccagcctcaagcactggggcctccccttctccttagatggccacgggcacttccagagtgtgggacgtagtctggcggccgggctgacggtgatcttggatggcgagcagctccgcgcagccctggagaggaaggcagagggtggccgccaggggctggtgctggggctgcaccatggcctctcggggctgcagggtaccctgccctcccagctggagccccccacatccctggtgacatgcacctggactcccagttcccaggggcatcagctcaacctgatggtcatcgagtggtcccatctgcaaacacaggtctctgtggacattcacaatggcagctccggcttcgagcattctggacgcatcctgatggggcccacattcctcaactactctgtgagctgctattaccatgatgggcacctggagctctccggccggagctggcacaacagtgaggctttgttgtgggcagggttcccaggcgaggcctgccttagtgctgagctgcagatacacgagacccagacccaggccagggtggccctccatggtggggacagtggagtcagcatggacctggcagccctggtggctcggccacgacgtggcccactgcagctggtggccagtgccagccacacagtgcctgctctccagaggctgggcctgcccttcaccaaccagctcgtgttccaaggactctgggaggcagaagagatgagctcctcactgcagctgacctgcgattctcaggccaccttggtccttgacgtccgtggccagaaccaggcagtcaggcagggcactgatgagttctcagtctcagaaactaagtgcatccaaggccccaaacacttattaataactattactgcccttaggcctgggggcctgctacactactccaagggtgaggttcagagcatgttcgccttgggcgtggaggagcgtcattttcacatcagcacccggcaggtagctgctaaggccggtctcaacaatttcatcaaactggaacagacctttctgcaggcagaagcatgggtcgggttcccccatgacgccgtcattctcttccagctcagcgctcttcccagggagctgttcctgcagaccgcatacgagcgagctcatgggacccgtgtcctgcgccaggtggtgctgtgggatggccaggaggtggccctcaccgggagcctttctgggcctttccccaagcccaccaggaacctcagcctgcaggtggagctcacccacccgctgcccctccccctgccgcgacactgcagcctccgcctgtcctcagagcatttgggaggcagccaccgggatggcctggttgtcggctgggatggcagggaccaggtgctggtctcctcctccctgtggctggggaagagtgagctggccgcccgcctggccctggctcacccattcaacctcccttggcggcaagccgaggccagtggccttgctgagagcaggggtggcaggcagagccggcaggtgcagctcacctggaacagaggacaacctgcgacgctgcagctcacctgggctgacgggtccttagcacacagcaccgcctgggacggctgcctggccgcctccccggggcagctccaggaaacctggggcctgaacagcctccaggcctgcggggccttcacgcagaccccagctgtgttcgttgaacagctcaacgtgtcctggggccagcaccgcatgcgcagaacttgacctacgagaggcattggccatctcagccagacaagatcatcatggaggccacgctggagcacgtcctcggggcctcttgtacccgtcagagcttctggggagaagtacagactgactatgcacgctggctgcggcactccctccacctggggctctgtgacctgcccaggg

SEQ ID NO: 10282 - protein, 1017 aa, Homo sapiens
MHSSDKAPWQAFLTSQSTQAKNREVEATLKVHRKVVLHLKGLHHDRSQHGEIRHSLALDLAHSYQLSFPQALSLDGGIIFRQSPQGTFNFGMDARAAVNHNVTSQASVQLNGSDSDFAFFFQLRHPHGPTFPPNFQVQAAAGRYRVRSLNGSLSVQMSGRELVLLEVDASQDTRRSSRGWGVSVLLHQAVLSAPRAVRLQLSAKITPARIWLFSKALLDQNTAQLLLKASEEWRGGRILTFQSQTRHTVAGWAAMPRLLTLTGRLKQKETLQEGTLSVTADSAVLGFLLRDQHEKAGNGTSVRSVTCVLAQNSSQALPGELQLKGRLQAQTRNLRAQASIRAHAASLALGGACSWGPRHGQLAGGPTHNISTLSDAGLPSEAGMLLSLTHVASNCSARLALWNAGAQLDGAIGLEDVTPESSGLQLHASLRHTHTMPSLKHWGLPFSLDGHGHFQSVGRSLAAGLTVILDGEQLRAALERKAEGGRQGLVLGLHHGLSGLQGTLPSQLEPPTSLVTCTWTPSSQGHQLNLMVIEWSHLQTQVSVDIHNGSSGFEHSGRILMGPTFLNYSVSCYYHDGHLELSGRSWHNSEALLWAGFPGEACLSAELQIHETQTQARVALHGGDSGVSMDLAALVARPRRGPLQLVASASHTVPALQRLGLPFTNQLVFQGLWEAEEMSSSLQLTCDSQATLVLDVRGQNQAVRQGTDEFSVSETKCIQGPKHLLITITALRPGGLLHYSKGEVQSMFALGVEERHFHISTRQVAAKAGLNNFIKLEQTFLQAEAWVGFPHDAVILFQLSALPRELFLQTAYERAHGTRVLRQVVLWDGQEVALTGSLSGPFPKPTRNLSLQVELTHPLPLPLPRHCSLRLSSEHLGGSHRDGLVVGWDGRDQVLVSSSLWLGKSELAARLALAHPFNLPWRQAEASGLAESRGGRQSRQVQLTWNRGQPATLQLTWADGSLAHSTAWDGCLAASPGQLQETWGLNSLQACGAFTQTPAVFVEQLNVSWGQHRMRRT

SEQ ID NO: 10283 - DNA, 3552 bp, Homo sapiens
gaggaggtgtttgcccaggtgcggcgcacccaggcaggcgagctctccacccaggtgggttcttttgtgtggagtcacatcctgcagctgctggagacgcacgaccccctgaaacgggccctccgggacaccctccccgaggacatcctcagccaggagttccacccagaaatgtggaaacactcgtcctattctgatgtcaccttccgatcagcttgggctccggctggaaaatgctgaggaaattgctcacaggctgtttggcaggaagtcattctggggtcaggaagacgggagagagcctgagccagaggaacccccagggccagaaccagggcctgcaccacagccagccagccccgagtgtccaggagacagagacagaaggatgagatacctacagcagaaggtgacccggaggcgtggggcccggcaggctctgcgatgcgagctgagcgtgaagttgctggggcaggagctgagctttgtgaactgcggggccacggggagtcacgtgaaccactggccccttaacttggccgagctcgccatcaagctcatgaaggggcaggaggtgcagatgaaccggaggctgagcctggccgcacaggaactggtctttcccaccgtgtctggccttcctgcccggctgaccctaaatgcctcggctgccatcagcatccgggtccgaggaaccactgacttccagcagcgctcggatttctctgtgaatggttatgtcaagcccagtgccctgctccagatctcagctcagatgggcacagcgggcatcctggggcaggccgggctgaggtgggtgaccagcgtccgcagcgccgccagcctggatggcgggatccaggtgcagaagggccgggtccttaaggtgcatctgaacacgcctgaggaggccgtggagctgctcagcttcagctctcagctgtacctcatcaccagggatggcgtgaggagcctcagacatgtccctggcccttctgaggtccagtcctgtactggtgaggaagtgtcctacacctggggctggcgactgtgcactggagtgacctggccggtgcctggccagccctacctgctctcattgcctgtgttcgcggccgtgacgctgcagaaacgggacccggggctccgacagtacctgctggaagctgcctataccctgcagccccagaagggcagctggttcccccaagaagccacagcccacgtcttcatgggcacgcccgggtcagaagtgctgagggacgtcggggtggacatgagctacagcttgccccagaacaagttccggctcaagcttctccatcccaagaagaaaatcgagctggacggaaagatggaggctcttgggagtgcccacacgggtcacttggagctggtgctggatgacagggacgtctactacatcaagcttggcagctgggcgccgtggctcacgcctgtaatcccaacacttggggaggccaaggaggatggatcacttgaggccaggagtttgagaccagcctggccaacatgggctggagtgacctgcagccagccatgggtggcgaggctgagcggttccaggcgcagctggaggtgaaactggtgacggggggcagccccgtcgtcttcaccgggaacctcacacggcaggtgggcagcaagctggccttctccgcatcgctgagccatctgctgagtgaccaggccaacgtgacagcactgctggagaggaaggaggagaatggacggagggtggccgccctgggtgccgagctgtttgtgccagggctggtggggcttcgtgcccttggcctgctgcagcaacggggccagctctggaccaactccctgaggatccagtacagcctcctgggtcaggcaaagcaggcggcacacgagtgcagcaccagccagaagctgcgggcagacagtggctcagacggtgcctacaggctggagctgcgccacgagctccactgcacacagatcctagccttcagccacaaggtccagctctggcatgaggaggactcgggccacctgcactcacagctggaggtgagctacgggaagcactgggacaagaacagcaacaagaggcatctccgtgtcagccagaccttcaagaatgactcggggcccgccctgagcaatcacttcatggagtttgtgctgcaggtgcctgagaggcaggtggattgccgcgtgcagctttaccacttgagcctccgcctgccctatgtggagagcagcagtcacctgaaggtgcagtacaatgggcggccgctgtttgtggcaggcgggcagtggaaggacacatctcgggccaccctgtggaagtgggaaggagccttgaacctggatagtccatggctgatggtctctgcagctcacaggctatactggccacaccgagctgtgttccaggctgtcctggagctaacgctgggcaaggcctggaccctaaaggacctggtggtcagcgtgggctgcaggagtcagggccccaacagggaaggcaagatccaggtttacaccgcagctaccacctacctccgggtttccacagtgacagtcttggcacagagcctcttccacagctggagcgaactcgagtcagcctggaacgcagcagtgcagggcgagatccatgctgagaacagccgggaccgtaagatcctgaactgctggttgaaaggcccccagcaggagctgaacctaacagcggcctacaggcacctggagtggccccggaagacccaggtgtcgctcacggctgtgcggattggtgcccagggccagcctcggggcctgcagttggaaggagagctggaggagctgaggcaagacaggacattgtaccggaaacggggggccttgctccttaggcacccgttgcacctgcccatcccgcagagcctcctcctgcaggagaccttcacagctgataggcgacaccagcgctattccctggagactagggttgtcctgaatggccgagaggaaaccctgcagaccatggtcctgggctgccaggccggacacccctacgtctgtgcaggtctgatgcatccatacgatggcaaagtcatccccaggaacacagaggggtgcctggttacttggaatcagcacacgagtctcactctgttgtctaggctggagtctggagtgcaatgacttgatctcagctcaccgcaacctccacgtcccaggctgggcgagatggctcacgcctgtaatactagcactttgggaggccgaggcaggcggatcatttgaggtcaggagttcgagaccagcctgaccaacatggtgaaacccccatctctactaaatacaaaaaaaattagccaggcatggtggcgggctcctgtaatcccagttactcaggaggctgaggcaggagaatcgcttgaacctgggaggtggaggttgcagtgagccgagatcacgccactgcactccagcctgggtgacagagcgaggctgtctctaaaataaaataaaatataaaatagaataaaataagctgtttaatgacat

SEQ ID NO: 10284 - protein, 550 aa, Homo sapiens
MGWSDLQPAMGGEAERFQAQLEVKLVTGGSPVVFTGNLTRQVGSKLAFSASLSHLLSDQANVTALLERKEENGRRVAALGAELFVPGLVGLRALGLLQQRGQLWTNSLRIQYSLLGQAKQAAHECSTSQKLRADSGSDGAYRLELRHELHCTQILAFSHKVQLWHEEDSGHLHSQLEVSYGKHWDKNSNKRHLRVSQTFKNDSGPALSNHFMEFVLQVPERQVDCRVQLYHLSLRLPYVESSSHLKVQYNGRPLFVAGGQWKDTSRATLWKWEGALNLDSPWLMVSAAHRLYWPHRAVFQAVLELTLGKAWTLKDLVVSVGCRSQGPNREGKIQVYTAATTYLRVSTVTVLAQSLFHSWSELESAWNAAVQGEIHAENSRDRKILNCWLKGPQQELNLTAAYRHLEWPRKTQVSLTAVRIGAQGQPRGLQLEGELEELRQDRTLYRKRGALLLRHPLHLPIPQSLLLQETFTADRRHQRYSLETRVVLNGREETLQTMVLGCQAGHPYVCAGLMHPYDGKVIPRNTEGCLVTWNQHTSLTLLSRLESGVQ

SEQ ID NO: 10285 - DNA, 401 bp, Homo sapiens
agtgcaatcttggctcgctgctgcctcaacttcccgggcacattctacgccaggggtggcatgatcccattggcatcttgggggggtgggcattctccagtttgtgctgcaggtgcctgagaggcaggtggattgccgcgtgcagctttaccacttgagcctccgcctgccctatgtggagagcagcagtcacctgaaggtgcagtacaatgggcggccgctgtttgtggcaggcgggcagtggaaggacacatctcgggccaccctgtggaagtgggaaggagccttgaacctggatagtccatggctgatggtctctgcagctcacaggctatactggccacaccgagctgtgttccaggctgtcctggagctaacgctgggcaaggcctggaccctaa

SEQ ID NO: 10286 - protein, 31 aa, Homo sapiens
MADGLCSSQAILATPSCVPGCPGANAGQGLD

SEQ ID NO: 10287 - DNA, 2277 bp, Homo sapiens
gggactacaggcatgcgccaccacacccagctaatttttgtatttttaacagagacagggtttcaccatcttggccaggctggtcccaaattcctcacctcaagtgatcctcccgcctcagcctcccaacatttgtatactttttgaagtcacacatcttcctgaaaagtggatagaagttttcaaccttcttcgcaggatggagggcagacacagaacttcaacacagtgacaggggcttcaaacgactaagttccgtccaggtacccttggagatgtgtgctgctgcgtggaagatgactgagcatgagacacgcagtgcccgaccgcgtggagcctacgtcctagagaggaggcacaggaacaccagacacgagaacgggaactgagtcaccagcggggaagacagaccttatccaagtagcttcactaagaaacagaactgattaaaagggaagaaatgtggttgtcttacggcaagtcacaaaagaatatgatgtgctctggggtaaccaaggcaggcttccctgaggaagtgacccctgaactgagacctaaagactgattcagagttaatgcatcatacagccccagatggagaatcagcatgtgcaaacgtccagaagaaacctacagcaagaccagcacagcccaacagccccagagaggagccccacgtcctttagggtgagcccagggctgacctaaggagatccacaacatggctgagaaagacggggctgttgtctagggcccacctggggctgcagggtataggcagcttccagcaggtactgtcggagccccgggtcccgtttctgcagcgtcacggccgcgaacacaggcaatgagagcaggtagggctggccaggcaccggccaggtcactccagtgcacagtcgccagccccaggtgtaggacactgcagagagaggtaagcaggcagcactggtcagtggagactcagagggctctgggcatgggtgcccgcagctgccacatcagcaaagaaacctcttctctaatttcttctgaggaaaggcaccatgtagacaggactcctgtgaggcagtggtgtgtagaccagggtttctctgcctcagcactgctgacatttgggatcagatcatcttatttgggggctgtcctgtgcattatgggatgtttcgctgaatcctggatccccatccactagatgccagtaacccctaccaacaaccaaatatttctgcacatattaccaaatgtctcctggggggtcaaaactgccccagctgagaacccctggtagactttttctttttttttttttttccagacagagtctcactttgtcacccgggctggagtacagtggcacaatctcggctcactgcaacctctgcctcccaggttcaagtgattctcctgcctcagcctcccgggtagctgggattacaggcacgtggcaccacgcctggctaatttttgtatttttagtaaagatggggttttaccatattggccaggctgatcttgaactcctgacctcaggtgatctgcctgcctcagcctcccaaagcgctgtgattacaggcgtgagctaccgtgcccagcccctggtagactttttaaaaagagtgtcaggcaatactgtgtagaacacaggctctgcagcaagaatgcctggttcaaattctagcttggccacttcccagctgtgtgaccttggacaaattacttaacctctctgggtctcaatgtttctttttcattattattattgttactactccccagactcactgtaaaggcctcagtctttctcatcttaaactgctaatgataatagttcctgcctcatggcgtagctgtgaggattaacaggtcagtaagtgttgagagcagcaccaggcctacagtaatgtctttggtagtaactcttatcccgattataaaaatatatttgttagctggatatggtcgctcacacctgtaatcccagaactgtgggaggccaaggcgggtggatcacctgaggtcaagagtacaagactagcctggccaacataggaaaagcctgtctctactaaaattaaaaaaaattagccaggcgtggtggcaggcacctgtaatctcaacgactcaggagaatcgcttaaacccgggaagcagaggttgcagagagccgagattgcgccactgcactctagcctgggtgacagagggacacgctatctcaaaataaataaataaataaataaataaaataaaaatgtacttgttgcaggaaattag

SEQ ID NO: 10288 - protein, 37 aa, Homo sapiens
MCAAAWKMTEHETRSARPRGAYVLERRHRNTRHENGN

SEQ ID NO: 10289 - DNA, 776 bp, Homo sapiens
ctgcacgtttaagaagcggcgactgaaccaaagcacctgcaccaactacgacacgccgctctggctcaacaccggcaagccccccgcccgcaaggacgaccccttgcacgaccccaccaaggacaagaccaacctgatcgtctacatcatctgcggggtggtggccgtcatggtgctcgtgggcatcttcaccaagctggggctggagaaagcgcaccggccccaaagggagcacatgtccaggctctatgacaatctgctgtttatggaggcacagatttctttccaagaggacgaacctgcccctggagagtggagtgtcggacttcaaacctggacagtctgagtgcacggatccttggccgctaggctgcactgcgtttgagtgcaaacctgcaggaattccagacttctcagatcacagagaagtacgcgatgccctgcaaacaacagctcatgcatcggggccagttcaagaagctaccgtaagatgaagtctaggaatgctttctatatcggccccggcaggcccagacgtcttggtggaggcgttggtgagaaatgaccttggggacagaagcacatatgtgaagctctctacacttgaagccagtagggaacacatgtcattattttgtccaccttcaaacagaattggaaatccaagtggcaaatggcagataagggtcctgtgtgtttttaaaacatgcttcagaagaactggcaccccttggaaagaaatagcaacaaataatgataaatgcacctcctcctct

SEQ ID NO: 10290 - protein, 58 aa, Homo sapiens
MVLVGIFTKLGLEKAHRPQREHMSRLYDNLLFMEAQISFQEDEPAPGEWSVGLQTWTV

SEQ ID NO: 10291 - DNA, 424 bp, Homo sapiens
ggtctgggatccaaaacccagattgcaggatccttgttatacaagaggagttacattgctttctctgaaacagaaaggaagaaagaaaatttagacacaaatcatcttaaaggcattagcagaagaatgaggttagtctctccaacccaagagatcttggtttccttagggaaaaatcagaaaatggttgagtcaaccaaggataaataggaacagacatttccaccattatcttggattctacctctgctctttccgcaatccaccaagccccgtaaacttgccagaagttacattgtgtctgcagttataatgtttaaaacatgctctcacttgaccccaggattctcattagctgggttaccctctccaacctcatcagcagacaagaagcttggcaaaaacaaattaaacttttaaaatt

SEQ ID NO: 10292 - protein, 35 aa, Homo sapiens
MFKTCSHLTPGFSLAGLPSPTSSADKKLGKNKLNF

SEQ ID NO: 10293 - DNA, 4749 bp, Homo sapiens
cattcgaggtttcgggccggtgagtgtcactcccggcgctgagagcatattgctgcttttgccccgccgctgccgcgggcgctcgaccggaagcttcctttcagtttcaggggtccagtcccaggctgtgggtgttgagaagagaagacagagaagctgggccaggagaggccgggagccccaggggctgctccgacttctggagggccgaccccgaggcctcggaccgggaggttccgcgcgccgcggcgttccgtgttgtggcgttgccccgccgaggatgccagcccccatcagattgcgggagctgatccggaccatccggacagcccgaacccaagctgaagaacgagaaatgatccagaaagaatgtgctgcaatccggtcatcttttagagaagaagacaatacataccgatgtcggaatgtggcaaaattactgtatatgcacatgctgggctaccctgctcactttggacagttggagtgcctcaagcttattgcctctcaaaaatttacagacaaaccattgtcccagcatttaacacggggaccatcacacaagtcattaaagttctgaaccctcagaagcaacagctgcgaatgcggatcaagcttacatataatcacaagggctcagcaatgcaagatctagcagaggtgaacaactttccccctcagtcctggcaatgagggtttggcaccattctcattctttatcccactcaatcaaaggaactctgggaaggaggttgtgattgctggcaagtcccccccaactgtaccacgggcatgaggagctgaagagaactgctgaggaggattttcctaaagttactgctgaccttgaagcattgttaaagactaatgtcctctcctccactgttgaggctggctgcttctggaggctactttgcactcttcctcttctcctttttccgcacttctccacccctcccacatttacagccagaatcaacattccctgggcccctgaggaaataagcagctggtctggaggagaggactgcaatccatggcgaaaaaacactcactttgtctctgcagcaaagagttgccccttctttctactgttgtttctctgtggactgggcaaggtggggtatttattcctcactagctgggttaccatcttcaggcacttttaacatctggcattcggaatggaaatgtaataatggacattagggagccctgcctttttctactggttcccccaatgtttgaaagaggcattaggctcctggtagccttttctgtgcattgctgtatacacacagacacacacatgtatgtttgttaccaagaactggtcagaccttgcgagtttatttgtaaacactggacagatggagttaaaaagagcttttgttgagatttggcatgaaggatatggtgctctatttgtaatagaaacttccaaggctcttccagctcccctttctcgccattctttagctgtagtcatgaatagtctccatgattttcaaaattgattccctttaaagtgcaaaatggtcaccttctaaaagatatattcatagttattaatgaccctattcccaccacaaattttaaagtgctcctaagcccataacttgcctgtttgaactatggtaatgggtggaagaggagttcaccagtttcaaagatcagactctgtatcaaaagtacctttgcccttaggaagagtgagtattggagtcatcttatctattactccaaacctccctttttatttcttgagcctggcttggaccttggcattccgtttgaattccttctaactggaacatttgtgttgtatctgtaacactggcactgaaataaagaccacacggttaaagaaatctttccatattgtactttatggtgttggagtgaagccttgtagcttccatacccctatgtcagaggaggtcttacggacaccatagggtaggaatagcctttcctcagtctgagaaattggtctcttttaaaagacgaatctcatgaatattcacatcaaagacttgagctttttaaactagtgagagtgccaagtgctttttagaaaggacccatatgttatcaaactttgaaattgagttgctggaatgaagtagaggtgactctctctgtggtacacattgaatgtactatgtatgttcaagtattcaggcgccatgtcttatatactgaagaaagaaaaagtgaggcccaccttgctcttacaatgtttgcaattgttactgtattgaatacagtataatgactactatggcttcaatcttaaacctggaaacaaatatccctttttttccccttcatttcaccaagcctttacttaaaatcttcagtgtcttgtcaaatctagctctgtatcagatgctggaatattcctaacatttgacaaactggagttgaactaaaggctccacgggaaagtttctggtcttactagtgtgtatgagcaagatctgctaaaacttactccactgggtaaatggttgactgagtcaagaacaggataatatctcctgcatagttttcagtaatgtaagtgtggactagtgcatatttcagacaactgctctgcctgtgcaatgaaaaatagcctttaagggtttctttgcagactgatttcattggatggatacttaatgctgtgaaacatgataggattaacataatgttggtggatttcttgaatagaatttgtcttaacattcctctttgtgtagaggctttattttctctcttatatttgtagctaaccagctcaggtttttttatttgaactgggttgaatctctgaagaaatctgttcaagaccatgctataagacactgtcagctaatggagctgggaagggtctactctgctgacagagcatttccttgggtgatcatagtttcgaggtagagtttatgatcattcatagctttgtctagaaggagtaaaatatcatggccttaacacaaagggtgctgcgtagaatatgaattgattttggaatcagaacacaagcaccatactgaaggactagcagccaaataactgcctaggatactgatggttgtgaagactgtttcaaatgattggatctttgaaagcttcagcgtgccttagtttctaggatcagaattagttttcctctcacttggccttgcagctaaatggagaaatgtttcaatttctttgaatacttgcacatttcaataattcctttcccgagtataaccactcaagggggagcaaatttggatggatttacgacttcacaggcattgtgaggaaagagcattttccaaggctgttttgataaccctggggtgataagcagtgagccctcacacacttactttgacaatttcacatgcacttgtacttcattatttccctcttcaagagtcgtttctattctagtttctgccccatcccggggaatcctaaaggagaattaattcatctaagtaatctcaaaaaactgtaggaagggtgctctccctgagaagcttctcccacagtgctttggtgctgttaccttgaggtggtttggacagtcacggaagttttaggctgtgcatagtgatcatctgttaattttaaggtctttatcatttaaagaaacattcctcagtgtaacatttgggaggggattctttcctcttgctagtttaaaggtgtgatttgtactccttgtttgtcccattcatatatgaaaatagacttttaaaactgtccaacactaatggtttatataacatgcttcccattttttttatgtcgtagaaattggaagttagggagtactgctttcaaggttcaacttcattatcttctgcattggaaaatatttgggccatgagaactaggggaaaggagtttgaatgtgtctatttttttctagtgaatgtattttaaccacagtgtcctaaactgagaaaactagagaggaaaaagtgggtgttcatgaactttgtagttgggagagtggttttacatgtctgtgtattcatgactttgggagtgggtaggatcattggagagagaattgcacagaaagtcctgaagtttaaaacacttttgaccagctttggctcgggagagtggggctgcttgtagaactggaagtgaataactttttcaagcaatatcagtgagtgggtcccatcgacagggttccaggacctggaacactttaacagaaggaaatgccgaagcagcttgcacagttgctttacagacttccaagaggctgattctggcttcaagatggagccttggagttggtttttttttttttttttttcttccctcaaagaacctgcggttgcgctttgtgtgttttgtttttgttttccatttgggggccccatgggaaagagcttctgaactctttcctttatgaactcccactgtgttcctataaaggcccttttctttcttagtgttgtaagttacattttcattatgccccatcacatcttctttactgtaaaaatattaaaaagctgtttccaagtgggacagctaatgaagctctaattattgcagacatatttttgagatgtaaaaaaaaaaatttaaagttaaatgataagtcttagaggcgagtgaggaataaaatggatgtaaacatttacatgggatgcattagaattctgctgtgtgtactgtcttttggttgaaacaaattatgaacagtgactaataataaaaagtcaatacccaatgatttaa

SEQ ID NO: 10294 - protein, 99 aa, Homo sapiens
MPAPIRLRELIRTIRTARTQAEEREMIQKECAAIRSSFREEDNTYRCRNVAKLLYMHMLGYPAHFGQLECLKLIASQKFTDKPLSQHLTRGPSHKSLKF

SEQ ID NO: 10295 - DNA, 7394 bp, Homo sapiens
agcagtcgcctcctccttggcaaatagtcctcggcagggtccgagttcttggataattcgagagaaaaggcacgataagttgcagtacgaggacacggaaacgaccaggagaggaggacagggagcgaagtttcctcaatagtgtgtgaagttagttaaaaactccctccttcctcaggatccctccgcctgcggtagcggtggtgaggccgagggagccgccattttggatgttcggttcctgctgccactgctgccgccgcccccggagctgctggtttcattcgaggtttcgggccgtttcaggggtccagtcccaggctgtgggtgttgagaagagaagacagagaagctgggccaggagaggccgggagccccaggggctgctccgacttctggagggccgaccccgaggcctcggaccgggaggttccgcgcgccgcggcgttccgtgttgtggcgttgccccgccgctcctggccctgcggacgtcagcgtctaataattctcccggtcttcctgattgcctgaaagagtcgggacggttcggttgattgtgtttcccggttaggactcggtgtaggagatccatcgaaccactcgctcagggtaatgtttatgaagcagattatgtttatgaagcagattaaatggcttttgggaggcaagagctgtcaaatgttttctcatatgtggattccctccctgtgctgaatacttagctttttggtgcttactgacacttgtgtggtatttttttttctcccctattatatatccctgagcacggaaatctgtccatggagaaaaatattaatctgaggaactgtcaaacactgaacacctatgtaatgctcactcatttaaggatgccagcccccatcagattgcgggagctgatccggaccatccggacagcccgaacccaagctgaagaacgagaaatgatccagaaagaatgtgctgcaatccggtcatcttttagagaagaagacaatacataccgatgtcggaatgtggcaaaattactgtatatgcacatgctgggctaccctgctcactttggacagttggagtgcctcaagcttattgcctctcaaaaatttacagacaaacgcattggctatttaggggcaatgctgctgttagatgaaagacaagatgtccatcttctcatgaccaactgtatcaagaatgatcttaatcatagcacgcaattcgtacaggggttagcactttgtaccctcggctgcatgggctcctcagagatgtgcagagatcttgcaggagaggtagagaagctcctgaaaacctccaactcttacttaagaaaaaaggcagcactgtgtgctgttcatgtcatcaggaaagttcctgaacttatggagatgtttttaccagcaacaaaaaatttattgaatgagaagaaccatggtgtcctccacacatctgtagtcctcctcacagaaatgtgtgagcgaagcccagacatgcttgcgcatttcagaaagcttgtgccccaattagttcgtattttaaagaacctcatcatgtccggatattcaccagaacatgatgtttctggtatcagtgacccctttttgcaggtacgaattttgcggttattaagaattttaggacgaaatgatgatgattcaagtgaagctatgaatgatatattagcacaggttgccactaatactgagactagtaaaaatgtaggaaatgctattctttatgaaacggttttgactatcatggatattaagtcagagagtggattgcgagtcctagccataaatatcctgggtcgtttcttattgaacaatgacaagaatattagatatgtggctctgacatctttgttgaagactgtacagacagatcataatgcagtacagaggcacagaagcacaattgtggactgtcttaaagatttggatgtctcaataaaacggcgtgcaatggaattgagttttgccctggtaaatgggaataatatccgaggcatgatgaaagaattactttattttctggattcgtgtgagccagaatttaaagcagactgtgcatctggaatctttcttgctgcagaaaagtatgcaccttccaaacgatggcatatagacacaattatgcgtgttttgacaacggcaggaagttatgttcgtgatgatgcagtccccaatttaatccagttaataactaatagtgtggagatgcatgcctatactgtccagcgcctgtacaaagcaattcttggtgattattctcaacaacctttggtacaagtggctgcatggtgtataggtgaatatggtgatcttcttgtatctggccagtgtgaagaggaagagcctattcaggtaacagaggatgaagtgttggatattttagaaagtgtcctaatctctaatatgtccacctctgtgacacgaggttatgccctcactgccattatgaagctttccactcgattcacttgtactgtaaaccgaattaagaaagtggtttccatctacggaagcagcattgatgtggaactccagcagagggcagtagaatataatgcacttttcaagaaatatgaccacatgaggtctgccctacttgagagaatgcctgtcatggaaaaagtgaccacaaatggccctactgagattgtgcagacaaatggagagacagaaccagctccactagagaccaaaccgccaccctctgggccacagcccaccagccaggccaatgatttattggatttgttgggaggaaatgacataacacctgttattccaactgcgcctacaagcaaaccatcttctgctggtggagaacttcttgatttgctgggagacatcaaccttacaggtgctccagctgctgctcctgcccctgcctcagtcccacagatatcccagccccccttcttgttggatgggctttcatcacagcctctcttcaatgatattgctgcaggcatcccctccatcacagcatacagtaagaatggcttgaagatagaattcacctttgaacggtcaaataccaaccccagtgtaacagtgataacgatacaggcctccaacagcacagagctagatatgacggactttgttttccaagctgcagtaccaaagacattccagctgcagctcttgtctcctagcagcagcattgtcccagcatttaacacggggaccatcacacaagtcattaaagttctgaaccctcagaagcaacagctgcgaatgcggatcaagcttacatataatcacaagggctcagcaatgcaagatctagcagaggtgaacaactttccccctcagtcctggcaatgagggtttggcaccattctcattctttatcccactcaatcaaaggaactctgggaaggaggttgtgattgctggcaagtcccccccaactgtaccacgggcatgaggagctgaagagaactgctgaggaggattttcctaaagttactgctgaccttgaagcattgttaaagactaatgtcctctcctccactgttgaggctggctgcttctggaggctactttgcactcttcctcttctcctttttccgcacttctccacccctcccacatttacagccagaatcaacattccctgggcccctgaggaaataagcagctggtctggaggagaggactgcaatccatggcgaaaaaacactcactttgtctctgcagcaaagagttgccccttctttctactgttgtttctctgtggactgggcaaggtggggtatttattcctcactagctgggttaccatcttcaggcacttttaacatctggcattcggaatggaaatgtaataatggacattagggagccctgcctttttctactggttcccccaatgtttgaaagaggcattaggctcctggtagccttttctgtgcattgctgtatacacacagacacacacatgtatgtttgttaccaagaactggtcagaccttgcgagtttatttgtaaacactggacagatggagttaaaaagagcttttgttgagatttggcatgaaggatatggtgctctatttgtaatagaaacttccaaggctcttccagctcccctttctcgccattctttagctgtagtcatgaatagtctccatgattttcaaaattgattccctttaaagtgcaaaatggtcaccttctaaaagatatattcatagttattaatgaccctattcccaccacaaattttaaagtgctcctaagcccataacttgcctgtttgaactatggtaatgggtggaagaggagttcaccagtttcaaagatcagactctgtatcaaaagtacctttgcccttaggaagagtgagtattggagtcatcttatctattactccaaacctccctttttatttcttgagcctggcttggaccttggcattccgtttgaattccttctaactggaacatttgtgttgtatctgtaacactggcactgaaataaagaccacacggttaaagaaatctttccatattgtactttatggtgttggagtgaagccttgtagcttccatacccctatgtcagaggaggtcttacggacaccatagggtaggaatagcctttcctcagtctgagaaattggtctcttttaaaagacgaatctcatgaatattcacatcaaagacttgagctttttaaactagtgagagtgccaagtgctttttagaaaggacccatatgttatcaaactttgaaattgagttgctggaatgaagtagaggtgactctctctgtggtacacattgaatgtactatgtatgttcaagtattcaggcgccatgtcttatatactgaagaaagaaaaagtgaggcccaccttgctcttacaatgtttgcaattgttactgtattgaatacagtataatgactactatggcttcaatcttaaacctggaaacaaatatccctttttttccccttcatttcaccaagcctttacttaaaatcttcagtgtcttgtcaaatctagctctgtatcagatgctggaatattcctaacatttgacaaactggagttgaactaaaggctccacgggaaagtttctggtcttactagtgtgtatgagcaagatctgctaaaacttactccactgggtaaatggttgactgagtcaagaacaggataatatctcctgcatagttttcagtaatgtaagtgtggactagtgcatatttcagacaactgctctgcctgtgcaatgaaaaatagcctttaagggtttctttgcagactgatttcattggatggatacttaatgctgtgaaacatgataggattaacataatgttggtggatttcttgaatagaatttgtcttaacattcctctttgtgtagaggctttattttctctcttatatttgtagctaaccagctcaggtttttttatttgaactgggttgaatctctgaagaaatctgttcaagaccatgctataagacactgtcagctaatggagctgggaagggtctactctgctgacagagcatttccttgggtgatcatagtttcgaggtagagtttatgatcattcatagctttgtctagaaggagtaaaatatcatggccttaacacaaagggtgctgcgtagaatatgaattgattttggaatcagaacacaagcaccatactgaaggactagcagccaaataactgcctaggatactgatggttgtgaagactgtttcaaatgattggatctttgaaagcttcagcgtgccttagtttctaggatcagaattagttttcctctcacttggccttgcagctaaatggagaaatgtttcaatttctttgaatacttgcacatttcaataattcctttcccgagtataaccactcaagggggagcaaatttggatggatttacgacttcacaggcattgtgaggaaagagcattttccaaggctgttttgataaccctggggtgataagcagtgagccctcacacacttactttgacaatttcacatgcacttgtacttcattatttccctcttcaagagtcgtttctattctagtttctgccccatcccggggaatcctaaaggagaattaattcatctaagtaatctcaaaaaactgtaggaagggtgctctccctgagaagcttctcccacagtgctttggtgctgttaccttgaggtggtttggacagtcacggaagttttaggctgtgcatagtgatcatctgttaattttaaggtctttatcatttaaagaaacattcctcagtgtaacatttgggaggggattctttcctcttgctagtttaaaggtgtgatttgtactccttgtttgtcccattcatatatgaaaatagacttttaaaactgtccaacactaatggtttatataacatgcttcccattttttttatgtcgtagaaattggaagttagggagtactgctttcaaggttcaacttcattatcttctgcattggaaaatatttgggccatgagaactaggggaaaggagtttgaatgtgtctatttttttctagtgaatgtattttaaccacagtgtcctaaactgagaaaactagagaggaaaaagtgggtgttcatgaactttgtagttgggagagtggttttacatgtctgtgtattcatgactttgggagtgggtaggatcattggagagagaattgcacagaaagtcctgaagtttaaaacacttttgaccagctttggctcgggagagtggggctgcttgtagaactggaagtgaataactttttcaagcaatatcagtgagtgggtcccatcgacagggttccaggacctggaacactttaacagaaggaaatgccgaagcagcttgcacagttgctttacagacttccaagaggctgattctggcttcaagatggagccttggagttggtttttttttttttttttttcttccctcaaagaacctgcggttgcgctttgtgtgttttgtttttgttttccatttgggggccccatgggaaagagcttctgaactctttcctttatgaactcccactgtgttcctataaaggcccttttctttcttagtgttgtaagttacattttcattatgccccatcacatcttctttactgtaaaaatattaaaaagctgtttccaagtgggacagctaatgaagctctaattattgcagacatatttttgagatgtaaaaaaaaaaatttaaagttaaatgataagtcttagaggcgagtgaggaataaaatggatgtaaacatttacatgggatgcattagaattctgctgtgtgtactgtcttttggttgaaacaaattatgaacagtgactaataataaaaagtcaatacccaatgatttaa

SEQ ID NO: 10296 - protein, 845 aa, Homo sapiens
MEKNINLRNCQTLNTYVMLTHLRMPAPIRLRELIRTIRTARTQAEEREMIQKECAAIRSSFREEDNTYRCRNVAKLLYMHMLGYPAHFGQLECLKLIASQKFTDKRIGYLGAMLLLDERQDVHLLMTNCIKNDLNHSTQFVQGLALCTLGCMGSSEMCRDLAGEVEKLLKTSNSYLRKKAALCAVHVIRKVPELMEMFLPATKNLLNEKNHGVLHTSVVLLTEMCERSPDMLAHFRKLVPQLVRILKNLIMSGYSPEHDVSGISDPFLQVRILRLLRILGRNDDDSSEAMNDILAQVATNTETSKNVGNAILYETVLTIMDIKSESGLRVLAINILGRFLLNNDKNIRYVALTSLLKTVQTDHNAVQRHRSTIVDCLKDLDVSIKRRAMELSFALVNGNNIRGMMKELLYFLDSCEPEFKADCASGIFLAAEKYAPSKRWHIDTIMRVLTTAGSYVRDDAVPNLIQLITNSVEMHAYTVQRLYKAILGDYSQQPLVQVAAWCIGEYGDLLVSGQCEEEEPIQVTEDEVLDILESVLISNMSTSVTRGYALTAIMKLSTRFTCTVNRIKKVVSIYGSSIDVELQQRAVEYNALFKKYDHMRSALLERMPVMEKVTTNGPTEIVQTNGETEPAPLETKPPPSGPQPTSQANDLLDLLGGNDITPVIPTAPTSKPSSAGGELLDLLGDINLTGAPAAAPAPASVPQISQPPFLLDGLSSQPLFNDIAAGIPSITAYSKNGLKIEFTFERSNTNPSVTVITIQASNSTELDMTDFVFQAAVPKTFQLQLLSPSSSIVPAFNTGTITQVIKVLNPQKQQLRMRIKLTYNHKGSAMQDLAEVNNFPPQSWQ

SEQ ID NO: 10297 - DNA, 6872 bp, Homo sapiens
agtgacagccccgatccttgctacgtttgcgtcgctctgccaggagcagtcgcctcctccttggcaaatagtcctcggcagggtccgagttcttggataattcgagagaaaaggcacgataagttgcagtacgaggacacggaaacgaccaggagaggaggacagggagcgaagtttcctcaatagtgtgtgaagttagttaaaaactccctccttcctcaggatccctccgcctgcggtagcggtggtgaggccgagggagccgccattttggatgttcggttcctgctgccactgctgccgccgcccccggagctgctggtttcattcgaggtttcgggccgaggatgccagcccccatcagattgcgggagctgatccggaccatccggacagcccgaacccaagctgaagaacgagaaatgatccagaaagaatgtgctgcaatccggtcatcttttagagaagaagacaatacataccgatgtcggaatgtggcaaaattactgtatatgcacatgctgggctaccctgctcactttggacagttggagtgcctcaagcttattgcctctcaaaaatttacagacaaacgcattggctatttaggggcaatgctgctgttagatgaaagacaagatgtccatcttctcatgaccaactgtatcaagaatgatcttaatcatagcacgcaattcgtacaggggttagcactttgtaccctcggctgcatgggctcctcagagatgtgcagagatcttgcaggagaggtagagaagctcctgaaaacctccaactcttacttaagaaaaaaggcagcactgtgtgctgttcatgtcatcaggaaagttcctgaacttatggagatgtttttaccagcaacaaaaaatttattgaatgagaagaaccatggtgtcctccacacatctgtagtcctcctcacagaaatgtgtgagcgaagcccagacatgcttgcgcatttcagaaagcttgtgccccaattagttcgtattttaaagaacctcatcatgtccggatattcaccagaacatgatgtttctggtatcagtgacccctttttgcaggtacgaattttgcggttattaagaattttaggacgaaatgatgatgattcaagtgaagctatgaatgatatattagcacaggttgccactaatactgagactagtaaaaatgtaggaaatgctattctttatgaaacggttttgactatcatggatattaagtcagagagtggattgcgagtcctagccataaatatcctgggtcgtttcttattgaacaatgacaagaatattagatatgtggctctgacatctttgttgaagactgtacagacagatcataatgcagtacagaggcacagaagcacaattgtggactgtcttaaagatttggatgtctcaataaaacggcgtgcaatggaattgagttttgccctggtaaatgggaataatatccgaggcatgatgaaagaattactttattttctggattcgtgtgagccagaatttaaagcagactgtgcatctggaatctttcttgctgcagaaaagtatgcaccttccaaacgatggcatatagacacaattatgcgtgttttgacaacggcaggaagttatgttcgtgatgatgcagtccccaatttaatccagttaataactaatagtgtggagatgcatgcctatactgtccagcgcctgtacaaagcaattcttggtgattattctcaacaacctttggtacaagtggctgcatggtgtataggtgaatatggtgatcttcttgtatctggccagtgtgaagaggaagagcctattcaggtaacagaggatgaagtgttggatattttagaaagtgtcctaatctctaatatgtccacctctgtgacacgaggttatgccctcactgccattatgaagctttccactcgattcacttgtactgtaaaccgaattaagaaagtggtttccatctacggaagcagcattgatgtggaactccagcagagggcagtagaatataatgcacttttcaagaaatatgaccacatgaggtctgccctacttgagagaatgcctgtcatggaaaaagtgaccacaaatggccctactgagattgtgcagacaaatggagagacagaaccagctccactagagaccaaaccgccaccctctgggccacagcccaccagccaggccaatgatttattggatttgttgggaggaaatgacataacacctgttattccaactgcgcctacaagcaaaccatcttctgctggtggagaacttcttgatttgctgggagacatcaaccttacaggtgctccagctgctgctcctgcccctgcctcagtcccacagatatcccagccccccttcttgttggatgggctttcatcacagcctctcttcaatgatattgctgcaggcatcccctccatcacagcatacagtaagaatggcttgaagatagaattcacctttgaacggtcaaataccaaccccagtgtaacagtgataacgatacaggcctccaacagcacagagctagatatgacggactttgttttccaagctgcagtaccaaagacattccagctgcagctcttgtctcctagcagcagcattgtcccagcatttaacacggggaccatcacacaagtcattaaagttctgaaccctcagaagcaacagctgcgaatgcggatcaagcttacatataatcacaagggctcagcaatgcaagatctagcagaggtgaacaactttccccctcagtcctggcaatgagggtttggcaccattctcattctttatcccactcaatcaaaggaactctgggaaggaggttgtgattgctggcaagtcccccccaactgtaccacgggcatgaggagctgaagagaactgctgaggaggattttcctaaagttactgctgaccttgaagcattgttaaagactaatgtcctctcctccactgttgaggctggctgcttctggaggctactttgcactcttcctcttctcctttttccgcacttctccacccctcccacatttacagccagaatcaacattccctgggcccctgaggaaataagcagctggtctggaggagaggactgcaatccatggcgaaaaaacactcactttgtctctgcagcaaagagttgccccttctttctactgttgtttctctgtggactgggcaaggtggggtatttattcctcactagctgggttaccatcttcaggcacttttaacatctggcattcggaatggaaatgtaataatggacattagggagccctgcctttttctactggttcccccaatgtttgaaagaggcattaggctcctggtagccttttctgtgcattgctgtatacacacagacacacacatgtatgtttgttaccaagaactggtcagaccttgcgagtttatttgtaaacactggacagatggagttaaaaagagcttttgttgagatttggcatgaaggatatggtgctctatttgtaatagaaacttccaaggctcttccagctcccctttctcgccattctttagctgtagtcatgaatagtctccatgattttcaaaattgattccctttaaagtgcaaaatggtcaccttctaaaagatatattcatagttattaatgaccctattcccaccacaaattttaaagtgctcctaagcccataacttgcctgtttgaactatggtaatgggtggaagaggagttcaccagtttcaaagatcagactctgtatcaaaagtacctttgcccttaggaagagtgagtattggagtcatcttatctattactccaaacctccctttttatttcttgagcctggcttggaccttggcattccgtttgaattccttctaactggaacatttgtgttgtatctgtaacactggcactgaaataaagaccacacggttaaagaaatctttccatattgtactttatggtgttggagtgaagccttgtagcttccatacccctatgtcagaggaggtcttacggacaccatagggtaggaatagcctttcctcagtctgagaaattggtctcttttaaaagacgaatctcatgaatattcacatcaaagacttgagctttttaaactagtgagagtgccaagtgctttttagaaaggacccatatgttatcaaactttgaaattgagttgctggaatgaagtagaggtgactctctctgtggtacacattgaatgtactatgtatgttcaagtattcaggcgccatgtcttatatactgaagaaagaaaaagtgaggcccaccttgctcttacaatgtttgcaattgttactgtattgaatacagtataatgactactatggcttcaatcttaaacctggaaacaaatatccctttttttccccttcatttcaccaagcctttacttaaaatcttcagtgtcttgtcaaatctagctctgtatcagatgctggaatattcctaacatttgacaaactggagttgaactaaaggctccacgggaaagtttctggtcttactagtgtgtatgagcaagatctgctaaaacttactccactgggtaaatggttgactgagtcaagaacaggataatatctcctgcatagttttcagtaatgtaagtgtggactagtgcatatttcagacaactgctctgcctgtgcaatgaaaaatagcctttaagggtttctttgcagactgatttcattggatggatacttaatgctgtgaaacatgataggattaacataatgttggtggatttcttgaatagaatttgtcttaacattcctctttgtgtagaggctttattttctctcttatatttgtagctaaccagctcaggtttttttatttgaactgggttgaatctctgaagaaatctgttcaagaccatgctataagacactgtcagctaatggagctgggaagggtctactctgctgacagagcatttccttgggtgatcatagtttcgaggtagagtttatgatcattcatagctttgtctagaaggagtaaaatatcatggccttaacacaaagggtgctgcgtagaatatgaattgattttggaatcagaacacaagcaccatactgaaggactagcagccaaataactgcctaggatactgatggttgtgaagactgtttcaaatgattggatctttgaaagcttcagcgtgccttagtttctaggatcagaattagttttcctctcacttggccttgcagctaaatggagaaatgtttcaatttctttgaatacttgcacatttcaataattcctttcccgagtataaccactcaagggggagcaaatttggatggatttacgacttcacaggcattgtgaggaaagagcattttccaaggctgttttgataaccctggggtgataagcagtgagccctcacacacttactttgacaatttcacatgcacttgtacttcattatttccctcttcaagagtcgtttctattctagtttctgccccatcccggggaatcctaaaggagaattaattcatctaagtaatctcaaaaaactgtaggaagggtgctctccctgagaagcttctcccacagtgctttggtgctgttaccttgaggtggtttggacagtcacggaagttttaggctgtgcatagtgatcatctgttaattttaaggtctttatcatttaaagaaacattcctcagtgtaacatttgggaggggattctttcctcttgctagtttaaaggtgtgatttgtactccttgtttgtcccattcatatatgaaaatagacttttaaaactgtccaacactaatggtttatataacatgcttcccattttttttatgtcgtagaaattggaagttagggagtactgctttcaaggttcaacttcattatcttctgcattggaaaatatttgggccatgagaactaggggaaaggagtttgaatgtgtctatttttttctagtgaatgtattttaaccacagtgtcctaaactgagaaaactagagaggaaaaagtgggtgttcatgaactttgtagttgggagagtggttttacatgtctgtgtattcatgactttgggagtgggtaggatcattggagagagaattgcacagaaagtcctgaagtttaaaacacttttgaccagctttggctcgggagagtggggctgcttgtagaactggaagtgaataactttttcaagcaatatcagtgagtgggtcccatcgacagggttccaggacctggaacactttaacagaaggaaatgccgaagcagcttgcacagttgctttacagacttccaagaggctgattctggcttcaagatggagccttggagttggtttttttttttttttttttcttccctcaaagaacctgcggttgcgctttgtgtgttttgtttttgttttccatttgggggccccatgggaaagagcttctgaactctttcctttatgaactcccactgtgttcctataaaggcccttttctttcttagtgttgtaagttacattttcattatgccccatcacatcttctttactgtaaaaatattaaaaagctgtttccaagtgggacagctaatgaagctctaattattgcagacatatttttgagatgtaaaaaaaaaaatttaaagttaaatgataagtcttagaggcgagtgaggaataaaatggatgtaaacatttacatgggatgcattagaattctgctgtgtgtactgtcttttggttgaaacaaattatgaacagtgactaataataaaaagtcaatacccaatgatttaa

SEQ ID NO: 10298 - protein, 822 aa, Homo sapiens; identical to SEQ ID NO: 1668

SEQ ID NO: 10299 - DNA, 2735 bp, Homo sapiens
cattcgaggtttcgggccggtgagtgtcactcccggcgctgagagcatattgctgcttttgccccgccgctgccgcgggcgctcgaccggaagcttcctttcagtttcaggggtccagtcccaggctgtgggtgttgagaagagaagacagagaagctgggccaggagaggccgggagccccaggggctgctccgacttctggagggccgaccccgaggcctcggaccgggaggttccgcgcgccgcggcgttccgtgttgtggcgttgccccgccgaggatgccagcccccatcagattgcgggagctgatccggaccatccggacagcccgaacccaagctgaagaacgagaaatgatccagaaagaatgtgctgcaatccggtcatcttttagagaagaagacaatacataccgatgtcggaatgtggcaaaattactgtatatgcacatgctgggctaccctgctcactttggacagttggagtgcctcaagcttattgcctctcaaaaatttacagacaaaccattgtcccagcatttaacacggggaccatcacacaagtcattaaagttctgaaccctcagaagcaacagctgcgaatgcggatcaagcttacatataatcacaagggctcagcaatgcaagatctagcagaggtgaacaactttccccctcagtcctggcaatgagggtttggcaccattctcattctttatcccactcaatcaaaggaactctgggaaggaggttgtgattgctggcaagtcccccccaactgtaccacgggcatgaggagctgaagagaactgctgaggaggattttcctaaagttactgctgaccttgaagcattgttaaagactaatgtcctctcctccactgttgaggctggctgcttctggaggctactttgcactcttcctcttctcctttttccgcacttctccacccctcccacatttacagccagaatcaacattccctgggcccctgaggaaataagcagctggtctggaggagaggactgcaatccatggcgaaaaaacactcactttgtctctgcagcaaagagttgccccttctttctactgttgtttctctgtggactgggcaaggtggggtatttattcctcactagctgggttaccatcttcaggcacttttaacatctggcattcggaatggaaatgtaataatggacattagggagccctgcctttttctactggttcccccaatgtttgaaagaggcattaggctcctggtagccttttctgtgcattgctgtatacacacagacacacacatgtatgtttgttaccaagaactggtcagaccttgcgagtttatttgtaaacactggacagatggagttaaaaagagcttttgttgagatttggcatgaaggatatggtgctctatttgtaatagaaacttccaaggctcttccagctcccctttctcgccattctttagctgtagtcatgaatagtctccatgattttcaaaattgattccctttaaagtgcaaaatggtcaccttctaaaagatatattcatagttattaatgaccctattcccaccacaaattttaaagtgctcctaagcccataacttgcctgtttgaactatggtaatgggtggaagaggagttcaccagtttcaaagatcagactctgtatcaaaagtacctttgcccttaggaagagtgagtattggagtcatcttatctattactccaaacctccctttttatttcttgagcctggcttggaccttggcattccgtttgaattccttctaactggaacatttgtgttgtatctgtaacactggcactgaaataaagaccacacggttaaagaaatctttccatattgtactttatggtgttggagtgaagccttgtagcttccatacccctatgtcagaggaggtcttacggacaccatagggtaggaatagcctttcctcagtctgagaaattggtctcttttaaaagacgaatctcatgaatattcacatcaaagacttgagctttttaaactagtgagagtgccaagtgctttttagaaaggacccatatgttatcaaactttgaaattgagttgctggaatgaagtagaggtgactctctctgtggtacacattgaatgtactatgtatgttcaagtattcaggcgccatgtcttatatactgaagaaagaaaaagtgaggcccaccttgctcttacaatgtttgcaattgttactgtattgaatacagtataatgactactatggcttcaatcttaaacctggaaacaaatatccctttttttccccttcatttcaccaagcctttacttaaaatcttcagtgtcttgtcaaatctagctctgtatcagatgctggaatattcctaacatttgacaaactggagttgaactaaaggctccacgggaaagtttctggtcttactagtgtgtatgagcaagatctgctaaaacttactccactgggtaaatggttgactgagtcaagaacaggataatatctcctgcatagttttcagtaatgtaagtgtggactagtgcatatttcagacaactgctctgcctgtgcaatgaaaaatagcctttaagggtttctttgcagactgatttcattggatggatacttaatgctgtgaaacatgataggattaacataatgttggtggatttcttgaatagaatttgtcttaacattc

SEQ ID NO: 10300 - protein, 99 aa, Homo sapiens; identical to SEQ ID NO: 10294

SEQ ID NO: 10301 - DNA, 5380 bp, Homo sapiens
agcagtcgcctcctccttggcaaatagtcctcggcagggtccgagttcttggataattcgagagaaaaggcacgataagttgcagtacgaggacacggaaacgaccaggagaggaggacagggagcgaagtttcctcaatagtgtgtgaagttagttaaaaactccctccttcctcaggatccctccgcctgcggtagcggtggtgaggccgagggagccgccattttggatgttcggttcctgctgccactgctgccgccgcccccggagctgctggtttcattcgaggtttcgggccgtttcaggggtccagtcccaggctgtgggtgttgagaagagaagacagagaagctgggccaggagaggccgggagccccaggggctgctccgacttctggagggccgaccccgaggcctcggaccgggaggttccgcgcgccgcggcgttccgtgttgtggcgttgccccgccgctcctggccctgcggacgtcagcgtctaataattctcccggtcttcctgattgcctgaaagagtcgggacggttcggttgattgtgtttcccggttaggactcggtgtaggagatccatcgaaccactcgctcagggtaatgtttatgaagcagattatgtttatgaagcagattaaatggcttttgggaggcaagagctgtcaaatgttttctcatatgtggattccctccctgtgctgaatacttagctttttggtgcttactgacacttgtgtggtatttttttttctcccctattatatatccctgagcacggaaatctgtccatggagaaaaatattaatctgaggaactgtcaaacactgaacacctatgtaatgctcactcatttaaggatgccagcccccatcagattgcgggagctgatccggaccatccggacagcccgaacccaagctgaagaacgagaaatgatccagaaagaatgtgctgcaatccggtcatcttttagagaagaagacaatacataccgatgtcggaatgtggcaaaattactgtatatgcacatgctgggctaccctgctcactttggacagttggagtgcctcaagcttattgcctctcaaaaatttacagacaaacgcattggctatttaggggcaatgctgctgttagatgaaagacaagatgtccatcttctcatgaccaactgtatcaagaatgatcttaatcatagcacgcaattcgtacaggggttagcactttgtaccctcggctgcatgggctcctcagagatgtgcagagatcttgcaggagaggtagagaagctcctgaaaacctccaactcttacttaagaaaaaaggcagcactgtgtgctgttcatgtcatcaggaaagttcctgaacttatggagatgtttttaccagcaacaaaaaatttattgaatgagaagaaccatggtgtcctccacacatctgtagtcctcctcacagaaatgtgtgagcgaagcccagacatgcttgcgcatttcagaaagcttgtgccccaattagttcgtattttaaagaacctcatcatgtccggatattcaccagaacatgatgtttctggtatcagtgacccctttttgcaggtacgaattttgcggttattaagaattttaggacgaaatgatgatgattcaagtgaagctatgaatgatatattagcacaggttgccactaatactgagactagtaaaaatgtaggaaatgctattctttatgaaacggttttgactatcatggatattaagtcagagagtggattgcgagtcctagccataaatatcctgggtcgtttcttattgaacaatgacaagaatattagatatgtggctctgacatctttgttgaagactgtacagacagatcataatgcagtacagaggcacagaagcacaattgtggactgtcttaaagatttggatgtctcaataaaacggcgtgcaatggaattgagttttgccctggtaaatgggaataatatccgaggcatgatgaaagaattactttattttctggattcgtgtgagccagaatttaaagcagactgtgcatctggaatctttcttgctgcagaaaagtatgcaccttccaaacgatggcatatagacacaattatgcgtgttttgacaacggcaggaagttatgttcgtgatgatgcagtccccaatttaatccagttaataactaatagtgtggagatgcatgcctatactgtccagcgcctgtacaaagcaattcttggtgattattctcaacaacctttggtacaagtggctgcatggtgtataggtgaatatggtgatcttcttgtatctggccagtgtgaagaggaagagcctattcaggtaacagaggatgaagtgttggatattttagaaagtgtcctaatctctaatatgtccacctctgtgacacgaggttatgccctcactgccattatgaagctttccactcgattcacttgtactgtaaaccgaattaagaaagtggtttccatctacggaagcagcattgatgtggaactccagcagagggcagtagaatataatgcacttttcaagaaatatgaccacatgaggtctgccctacttgagagaatgcctgtcatggaaaaagtgaccacaaatggccctactgagattgtgcagacaaatggagagacagaaccagctccactagagaccaaaccgccaccctctgggccacagcccaccagccaggccaatgatttattggatttgttgggaggaaatgacataacacctgttattccaactgcgcctacaagcaaaccatcttctgctggtggagaacttcttgatttgctgggagacatcaaccttacaggtgctccagctgctgctcctgcccctgcctcagtcccacagatatcccagccccccttcttgttggatgggctttcatcacagcctctcttcaatgatattgctgcaggcatcccctccatcacagcatacagtaagaatggcttgaagatagaattcacctttgaacggtcaaataccaaccccagtgtaacagtgataacgatacaggcctccaacagcacagagctagatatgacggactttgttttccaagctgcagtaccaaagacattccagctgcagctcttgtctcctagcagcagcattgtcccagcatttaacacggggaccatcacacaagtcattaaagttctgaaccctcagaagcaacagctgcgaatgcggatcaagcttacatataatcacaagggctcagcaatgcaagatctagcagaggtgaacaactttccccctcagtcctggcaatgagggtttggcaccattctcattctttatcccactcaatcaaaggaactctgggaaggaggttgtgattgctggcaagtcccccccaactgtaccacgggcatgaggagctgaagagaactgctgaggaggattttcctaaagttactgctgaccttgaagcattgttaaagactaatgtcctctcctccactgttgaggctggctgcttctggaggctactttgcactcttcctcttctcctttttccgcacttctccacccctcccacatttacagccagaatcaacattccctgggcccctgaggaaataagcagctggtctggaggagaggactgcaatccatggcgaaaaaacactcactttgtctctgcagcaaagagttgccccttctttctactgttgtttctctgtggactgggcaaggtggggtatttattcctcactagctgggttaccatcttcaggcacttttaacatctggcattcggaatggaaatgtaataatggacattagggagccctgcctttttctactggttcccccaatgtttgaaagaggcattaggctcctggtagccttttctgtgcattgctgtatacacacagacacacacatgtatgtttgttaccaagaactggtcagaccttgcgagtttatttgtaaacactggacagatggagttaaaaagagcttttgttgagatttggcatgaaggatatggtgctctatttgtaatagaaacttccaaggctcttccagctcccctttctcgccattctttagctgtagtcatgaatagtctccatgattttcaaaattgattccctttaaagtgcaaaatggtcaccttctaaaagatatattcatagttattaatgaccctattcccaccacaaattttaaagtgctcctaagcccataacttgcctgtttgaactatggtaatgggtggaagaggagttcaccagtttcaaagatcagactctgtatcaaaagtacctttgcccttaggaagagtgagtattggagtcatcttatctattactccaaacctccctttttatttcttgagcctggcttggaccttggcattccgtttgaattccttctaactggaacatttgtgttgtatctgtaacactggcactgaaataaagaccacacggttaaagaaatctttccatattgtactttatggtgttggagtgaagccttgtagcttccatacccctatgtcagaggaggtcttacggacaccatagggtaggaatagcctttcctcagtctgagaaattggtctcttttaaaagacgaatctcatgaatattcacatcaaagacttgagctttttaaactagtgagagtgccaagtgctttttagaaaggacccatatgttatcaaactttgaaattgagttgctggaatgaagtagaggtgactctctctgtggtacacattgaatgtactatgtatgttcaagtattcaggcgccatgtcttatatactgaagaaagaaaaagtgaggcccaccttgctcttacaatgtttgcaattgttactgtattgaatacagtataatgactactatggcttcaatcttaaacctggaaacaaatatccctttttttccccttcatttcaccaagcctttacttaaaatcttcagtgtcttgtcaaatctagctctgtatcagatgctggaatattcctaacatttgacaaactggagttgaactaaaggctccacgggaaagtttctggtcttactagtgtgtatgagcaagatctgctaaaacttactccactgggtaaatggttgactgagtcaagaacaggataatatctcctgcatagttttcagtaatgtaagtgtggactagtgcatatttcagacaactgctctgcctgtgcaatgaaaaatagcctttaagggtttctttgcagactgatttcattggatggatacttaatgctgtgaaacatgataggattaacataatgttggtggatttcttgaatagaatttgtcttaacattc

SEQ ID NO: 10302 - protein, 845 aa, Homo sapiens; identical to SEQ ID NO: 10296

SEQ ID NO: 10303 - DNA, 4858 bp, Homo sapiens
agtgacagccccgatccttgctacgtttgcgtcgctctgccaggagcagtcgcctcctccttggcaaatagtcctcggcagggtccgagttcttggataattcgagagaaaaggcacgataagttgcagtacgaggacacggaaacgaccaggagaggaggacagggagcgaagtttcctcaatagtgtgtgaagttagttaaaaactccctccttcctcaggatccctccgcctgcggtagcggtggtgaggccgagggagccgccattttggatgttcggttcctgctgccactgctgccgccgcccccggagctgctggtttcattcgaggtttcgggccgaggatgccagcccccatcagattgcgggagctgatccggaccatccggacagcccgaacccaagctgaagaacgagaaatgatccagaaagaatgtgctgcaatccggtcatcttttagagaagaagacaatacataccgatgtcggaatgtggcaaaattactgtatatgcacatgctgggctaccctgctcactttggacagttggagtgcctcaagcttattgcctctcaaaaatttacagacaaacgcattggctatttaggggcaatgctgctgttagatgaaagacaagatgtccatcttctcatgaccaactgtatcaagaatgatcttaatcatagcacgcaattcgtacaggggttagcactttgtaccctcggctgcatgggctcctcagagatgtgcagagatcttgcaggagaggtagagaagctcctgaaaacctccaactcttacttaagaaaaaaggcagcactgtgtgctgttcatgtcatcaggaaagttcctgaacttatggagatgtttttaccagcaacaaaaaatttattgaatgagaagaaccatggtgtcctccacacatctgtagtcctcctcacagaaatgtgtgagcgaagcccagacatgcttgcgcatttcagaaagcttgtgccccaattagttcgtattttaaagaacctcatcatgtccggatattcaccagaacatgatgtttctggtatcagtgacccctttttgcaggtacgaattttgcggttattaagaattttaggacgaaatgatgatgattcaagtgaagctatgaatgatatattagcacaggttgccactaatactgagactagtaaaaatgtaggaaatgctattctttatgaaacggttttgactatcatggatattaagtcagagagtggattgcgagtcctagccataaatatcctgggtcgtttcttattgaacaatgacaagaatattagatatgtggctctgacatctttgttgaagactgtacagacagatcataatgcagtacagaggcacagaagcacaattgtggactgtcttaaagatttggatgtctcaataaaacggcgtgcaatggaattgagttttgccctggtaaatgggaataatatccgaggcatgatgaaagaattactttattttctggattcgtgtgagccagaatttaaagcagactgtgcatctggaatctttcttgctgcagaaaagtatgcaccttccaaacgatggcatatagacacaattatgcgtgttttgacaacggcaggaagttatgttcgtgatgatgcagtccccaatttaatccagttaataactaatagtgtggagatgcatgcctatactgtccagcgcctgtacaaagcaattcttggtgattattctcaacaacctttggtacaagtggctgcatggtgtataggtgaatatggtgatcttcttgtatctggccagtgtgaagaggaagagcctattcaggtaacagaggatgaagtgttggatattttagaaagtgtcctaatctctaatatgtccacctctgtgacacgaggttatgccctcactgccattatgaagctttccactcgattcacttgtactgtaaaccgaattaagaaagtggtttccatctacggaagcagcattgatgtggaactccagcagagggcagtagaatataatgcacttttcaagaaatatgaccacatgaggtctgccctacttgagagaatgcctgtcatggaaaaagtgaccacaaatggccctactgagattgtgcagacaaatggagagacagaaccagctccactagagaccaaaccgccaccctctgggccacagcccaccagccaggccaatgatttattggatttgttgggaggaaatgacataacacctgttattccaactgcgcctacaagcaaaccatcttctgctggtggagaacttcttgatttgctgggagacatcaaccttacaggtgctccagctgctgctcctgcccctgcctcagtcccacagatatcccagccccccttcttgttggatgggctttcatcacagcctctcttcaatgatattgctgcaggcatcccctccatcacagcatacagtaagaatggcttgaagatagaattcacctttgaacggtcaaataccaaccccagtgtaacagtgataacgatacaggcctccaacagcacagagctagatatgacggactttgttttccaagctgcagtaccaaagacattccagctgcagctcttgtctcctagcagcagcattgtcccagcatttaacacggggaccatcacacaagtcattaaagttctgaaccctcagaagcaacagctgcgaatgcggatcaagcttacatataatcacaagggctcagcaatgcaagatctagcagaggtgaacaactttccccctcagtcctggcaatgagggtttggcaccattctcattctttatcccactcaatcaaaggaactctgggaaggaggttgtgattgctggcaagtcccccccaactgtaccacgggcatgaggagctgaagagaactgctgaggaggattttcctaaagttactgctgaccttgaagcattgttaaagactaatgtcctctcctccactgttgaggctggctgcttctggaggctactttgcactcttcctcttctcctttttccgcacttctccacccctcccacatttacagccagaatcaacattccctgggcccctgaggaaataagcagctggtctggaggagaggactgcaatccatggcgaaaaaacactcactttgtctctgcagcaaagagttgccccttctttctactgttgtttctctgtggactgggcaaggtggggtatttattcctcactagctgggttaccatcttcaggcacttttaacatctggcattcggaatggaaatgtaataatggacattagggagccctgcctttttctactggttcccccaatgtttgaaagaggcattaggctcctggtagccttttctgtgcattgctgtatacacacagacacacacatgtatgtttgttaccaagaactggtcagaccttgcgagtttatttgtaaacactggacagatggagttaaaaagagcttttgttgagatttggcatgaaggatatggtgctctatttgtaatagaaacttccaaggctcttccagctcccctttctcgccattctttagctgtagtcatgaatagtctccatgattttcaaaattgattccctttaaagtgcaaaatggtcaccttctaaaagatatattcatagttattaatgaccctattcccaccacaaattttaaagtgctcctaagcccataacttgcctgtttgaactatggtaatgggtggaagaggagttcaccagtttcaaagatcagactctgtatcaaaagtacctttgcccttaggaagagtgagtattggagtcatcttatctattactccaaacctccctttttatttcttgagcctggcttggaccttggcattccgtttgaattccttctaactggaacatttgtgttgtatctgtaacactggcactgaaataaagaccacacggttaaagaaatctttccatattgtactttatggtgttggagtgaagccttgtagcttccatacccctatgtcagaggaggtcttacggacaccatagggtaggaatagcctttcctcagtctgagaaattggtctcttttaaaagacgaatctcatgaatattcacatcaaagacttgagctttttaaactagtgagagtgccaagtgctttttagaaaggacccatatgttatcaaactttgaaattgagttgctggaatgaagtagaggtgactctctctgtggtacacattgaatgtactatgtatgttcaagtattcaggcgccatgtcttatatactgaagaaagaaaaagtgaggcccaccttgctcttacaatgtttgcaattgttactgtattgaatacagtataatgactactatggcttcaatcttaaacctggaaacaaatatccctttttttccccttcatttcaccaagcctttacttaaaatcttcagtgtcttgtcaaatctagctctgtatcagatgctggaatattcctaacatttgacaaactggagttgaactaaaggctccacgggaaagtttctggtcttactagtgtgtatgagcaagatctgctaaaacttactccactgggtaaatggttgactgagtcaagaacaggataatatctcctgcatagttttcagtaatgtaagtgtggactagtgcatatttcagacaactgctctgcctgtgcaatgaaaaatagcctttaagggtttctttgcagactgatttcattggatggatacttaatgctgtgaaacatgataggattaacataatgttggtggatttcttgaatagaatttgtcttaacattc

SEQ ID NO: 10304 - protein, 822 aa, Homo sapiens; identical to SEQ ID NO: 1668

SEQ ID NO: 10305 - DNA, 1875 bp, Homo sapiens
cattcgaggtttcgggccggtgagtgtcactcccggcgctgagagcatattgctgcttttgccccgccgctgccgcgggcgctcgaccggaagcttcctttcagtttcaggggtccagtcccaggctgtgggtgttgagaagagaagacagagaagctgggccaggagaggccgggagccccaggggctgctccgacttctggagggccgaccccgaggcctcggaccgggaggttccgcgcgccgcggcgttccgtgttgtggcgttgccccgccgaggatgccagcccccatcagattgcgggagctgatccggaccatccggacagcccgaacccaagctgaagaacgagaaatgatccagaaagaatgtgctgcaatccggtcatcttttagagaagaagacaatacataccgatgtcggaatgtggcaaaattactgtatatgcacatgctgggctaccctgctcactttggacagttggagtgcctcaagcttattgcctctcaaaaatttacagacaaaccattgtcccagcatttaacacggggaccatcacacaagtcattaaagttctgaaccctcagaagcaacagctgcgaatgcggatcaagcttacatataatcacaagggctcagcaatgcaagatctagcagaggtgaacaactttccccctcagtcctggcaatgagggtttggcaccattctcattctttatcccactcaatcaaaggaactctgggaaggaggttgtgattgctggcaagtcccccccaactgtaccacgggcatgaggagctgaagagaactgctgaggaggattttcctaaagttactgctgaccttgaagcattgttaaagactaatgtcctctcctccactgttgaggctggctgcttctggaggctactttgcactcttcctcttctcctttttccgcacttctccacccctcccacatttacagccagaatcaacattccctgggcccctgaggaaataagcagctggtctggaggagaggactgcaatccatggcgaaaaaacactcactttgtctctgcagcaaagagttgccccttctttctactgttgtttctctgtggactgggcaaggtggggtatttattcctcactagctgggttaccatcttcaggcacttttaacatctggcattcggaatggaaatgtaataatggacattagggagccctgcctttttctactggttcccccaatgtttgaaagaggcattaggctcctggtagccttttctgtgcattgctgtatacacacagacacacacatgtatgtttgttaccaagaactggtcagaccttgcgagtttatttgtaaacactggacagatggagttaaaaagagcttttgttgagatttggcatgaaggatatggtgctctatttgtaatagaaacttccaaggctcttccagctcccctttctcgccattctttagctgtagtcatgaatagtctccatgattttcaaaattgattccctttaaagtgcaaaatggtcaccttctaaaagatatattcatagttattaatgaccctattcccaccacaaattttaaagtgctcctaagcccataacttgcctgtttgaactatggtaatgggtggaagaggagttcaccagtttcaaagatcagactctgtatcaaaagtacctttgcccttaggaagagtgagtattggagtcatcttatctattactccaaacctccctttttatttcttgagcctggcttggaccttggcattccgtttgaattccttctaactggaacatttgtgttgtatctgtaacactggcactgaaataaagaccacacggttaaagaaatctt

SEQ ID NO: 10306 - protein, 99 aa, Homo sapiens; identical to SEQ ID NO: 10294

SEQ ID NO: 10307 - DNA, 4520 bp, Homo sapiens
agcagtcgcctcctccttggcaaatagtcctcggcagggtccgagttcttggataattcgagagaaaaggcacgataagttgcagtacgaggacacggaaacgaccaggagaggaggacagggagcgaagtttcctcaatagtgtgtgaagttagttaaaaactccctccttcctcaggatccctccgcctgcggtagcggtggtgaggccgagggagccgccattttggatgttcggttcctgctgccactgctgccgccgcccccggagctgctggtttcattcgaggtttcgggccgtttcaggggtccagtcccaggctgtgggtgttgagaagagaagacagagaagctgggccaggagaggccgggagccccaggggctgctccgacttctggagggccgaccccgaggcctcggaccgggaggttccgcgcgccgcggcgttccgtgttgtggcgttgccccgccgctcctggccctgcggacgtcagcgtctaataattctcccggtcttcctgattgcctgaaagagtcgggacggttcggttgattgtgtttcccggttaggactcggtgtaggagatccatcgaaccactcgctcagggtaatgtttatgaagcagattatgtttatgaagcagattaaatggcttttgggaggcaagagctgtcaaatgttttctcatatgtggattccctccctgtgctgaatacttagctttttggtgcttactgacacttgtgtggtatttttttttctcccctattatatatccctgagcacggaaatctgtccatggagaaaaatattaatctgaggaactgtcaaacactgaacacctatgtaatgctcactcatttaaggatgccagcccccatcagattgcgggagctgatccggaccatccggacagcccgaacccaagctgaagaacgagaaatgatccagaaagaatgtgctgcaatccggtcatcttttagagaagaagacaatacataccgatgtcggaatgtggcaaaattactgtatatgcacatgctgggctaccctgctcactttggacagttggagtgcctcaagcttattgcctctcaaaaatttacagacaaacgcattggctatttaggggcaatgctgctgttagatgaaagacaagatgtccatcttctcatgaccaactgtatcaagaatgatcttaatcatagcacgcaattcgtacaggggttagcactttgtaccctcggctgcatgggctcctcagagatgtgcagagatcttgcaggagaggtagagaagctcctgaaaacctccaactcttacttaagaaaaaaggcagcactgtgtgctgttcatgtcatcaggaaagttcctgaacttatggagatgtttttaccagcaacaaaaaatttattgaatgagaagaaccatggtgtcctccacacatctgtagtcctcctcacagaaatgtgtgagcgaagcccagacatgcttgcgcatttcagaaagcttgtgccccaattagttcgtattttaaagaacctcatcatgtccggatattcaccagaacatgatgtttctggtatcagtgacccctttttgcaggtacgaattttgcggttattaagaattttaggacgaaatgatgatgattcaagtgaagctatgaatgatatattagcacaggttgccactaatactgagactagtaaaaatgtaggaaatgctattctttatgaaacggttttgactatcatggatattaagtcagagagtggattgcgagtcctagccataaatatcctgggtcgtttcttattgaacaatgacaagaatattagatatgtggctctgacatctttgttgaagactgtacagacagatcataatgcagtacagaggcacagaagcacaattgtggactgtcttaaagatttggatgtctcaataaaacggcgtgcaatggaattgagttttgccctggtaaatgggaataatatccgaggcatgatgaaagaattactttattttctggattcgtgtgagccagaatttaaagcagactgtgcatctggaatctttcttgctgcagaaaagtatgcaccttccaaacgatggcatatagacacaattatgcgtgttttgacaacggcaggaagttatgttcgtgatgatgcagtccccaatttaatccagttaataactaatagtgtggagatgcatgcctatactgtccagcgcctgtacaaagcaattcttggtgattattctcaacaacctttggtacaagtggctgcatggtgtataggtgaatatggtgatcttcttgtatctggccagtgtgaagaggaagagcctattcaggtaacagaggatgaagtgttggatattttagaaagtgtcctaatctctaatatgtccacctctgtgacacgaggttatgccctcactgccattatgaagctttccactcgattcacttgtactgtaaaccgaattaagaaagtggtttccatctacggaagcagcattgatgtggaactccagcagagggcagtagaatataatgcacttttcaagaaatatgaccacatgaggtctgccctacttgagagaatgcctgtcatggaaaaagtgaccacaaatggccctactgagattgtgcagacaaatggagagacagaaccagctccactagagaccaaaccgccaccctctgggccacagcccaccagccaggccaatgatttattggatttgttgggaggaaatgacataacacctgttattccaactgcgcctacaagcaaaccatcttctgctggtggagaacttcttgatttgctgggagacatcaaccttacaggtgctccagctgctgctcctgcccctgcctcagtcccacagatatcccagccccccttcttgttggatgggctttcatcacagcctctcttcaatgatattgctgcaggcatcccctccatcacagcatacagtaagaatggcttgaagatagaattcacctttgaacggtcaaataccaaccccagtgtaacagtgataacgatacaggcctccaacagcacagagctagatatgacggactttgttttccaagctgcagtaccaaagacattccagctgcagctcttgtctcctagcagcagcattgtcccagcatttaacacggggaccatcacacaagtcattaaagttctgaaccctcagaagcaacagctgcgaatgcggatcaagcttacatataatcacaagggctcagcaatgcaagatctagcagaggtgaacaactttccccctcagtcctggcaatgagggtttggcaccattctcattctttatcccactcaatcaaaggaactctgggaaggaggttgtgattgctggcaagtcccccccaactgtaccacgggcatgaggagctgaagagaactgctgaggaggattttcctaaagttactgctgaccttgaagcattgttaaagactaatgtcctctcctccactgttgaggctggctgcttctggaggctactttgcactcttcctcttctcctttttccgcacttctccacccctcccacatttacagccagaatcaacattccctgggcccctgaggaaataagcagctggtctggaggagaggactgcaatccatggcgaaaaaacactcactttgtctctgcagcaaagagttgccccttctttctactgttgtttctctgtggactgggcaaggtggggtatttattcctcactagctgggttaccatcttcaggcacttttaacatctggcattcggaatggaaatgtaataatggacattagggagccctgcctttttctactggttcccccaatgtttgaaagaggcattaggctcctggtagccttttctgtgcattgctgtatacacacagacacacacatgtatgtttgttaccaagaactggtcagaccttgcgagtttatttgtaaacactggacagatggagttaaaaagagcttttgttgagatttggcatgaaggatatggtgctctatttgtaatagaaacttccaaggctcttccagctcccctttctcgccattctttagctgtagtcatgaatagtctccatgattttcaaaattgattccctttaaagtgcaaaatggtcaccttctaaaagatatattcatagttattaatgaccctattcccaccacaaattttaaagtgctcctaagcccataacttgcctgtttgaactatggtaatgggtggaagaggagttcaccagtttcaaagatcagactctgtatcaaaagtacctttgcccttaggaagagtgagtattggagtcatcttatctattactccaaacctccctttttatttcttgagcctggcttggaccttggcattccgtttgaattccttctaactggaacatttgtgttgtatctgtaacactggcactgaaataaagaccacacggttaaagaaatctt

SEQ ID NO: 10308 - protein, 845 aa, Homo sapiens; identical to SEQ ID NO: 10296

SEQ ID NO: 10309 - DNA, 394 bp, Homo sapiens
ggctgcttgagataataaaaatgtgtttttggattctcagctatgttctgtatagtttcattactgtgttccggactttttaaaaaaaggttggagtttattattgttatttgttttgtttgtttgctttttctgttttttgagacaggatcttgtgccatcgcccaggctggagtgcagtggcctgatctcagctcactgcagcctcactcctaggctcaggtcatcctcccacctcagcctcccaagtagctgggaccacaggtgcatgcctgtaataccacctacttgggaggctgaggcaggagaagtgcttgaacccaggaggtggaggttgcagtgagccgagattgcgccattgcactccagcctgggcaacgagcgaaactccacc

SEQ ID NO: 10310 - protein, 57 aa, Homo sapiens
MFCIVSLLCSGLFKKRLEFIIVICFVCLLFLFFETGSCAIAQAGVQWPDLSSLQPHS

SEQ ID NO: 10311 - DNA, 626 bp, Homo sapiens
gaggccgagggagccgccattttggatgttcggttcctgctgccactgctgccgccgcccccggagctgctggtttcattcgaggtttcgggccgctcctggccctgcggacgtcagcgtctaataattctcccggtcttcctgattgcctgaaagagtcgggacggttcggttgattgtgtttcccggttaggactcggtgtaggagatccatcgaaccactcgctcagggtaatgtttatgaagcagattatgtttatgaagcagattaaatggcttttgggaggcaagagctgtcaaatgttttctcatatgtggattccctccctgtgctgaatacttagctttttggtgcttactgacacttgtgtggtatttttttttctcccctattatatatccctgagcacggaaatctgtccatggagaaaaatattaatctgaggtaggtagaaaggagagttgggctgctttacagtgattagttaacagaagggaggagttagtgctttcttagtgaccttaactttgaagtgtttgtacagtaatgatctttgctgactgattctaaaaaatacttgtaatgatttcatgtattgggtttttctggggatagctgaatttta

SEQ ID NO: 10312 - protein, 32 aa, Homo sapiens
MFGSCCHCCRRPRSCWFHSRFRAAPGPADVSV

SEQ ID NO: 10313 - DNA, 780 bp, Homo sapiens
gcacaaagtgtggaaggtgagaggtggcaaggttggcagaaggagataggaggggactcggtaggaaattaggtggcacagcatagggaaggctataaggagacccaatgaactgcagcgaggtggatgggagctgagcatagtggagtggaggatagtggatgcctggatgttgaattagtgaagacgctacattaaacgttgggggcaagggactcatattcaccacagatgggagtccagttggtgaaaaggtggcaggcggcacagccaccttatacagcatgccatactggtccactgtcagaccggtgatggcctcagctccatcaccccccaggctgactctggctcctgcctggctctgcccagccaccacaacccctcgggaccattcagaagcatcactggagggtgtgtggttagtggagcagctggtagttctccccatatcctcgctggtcacggggaggtctcgtttctttggtggaaggcattcctgactcctttcatgaacaggtttcatattgctttgtggtgttcctggagcctggaaggagtcgacttgctccctggggcatcagaaggggcttctctgtagcttccctgtacccctctctgcttctggctggggcgcccacatctgagtttccagtggtgcttctgagcagctgtagtaagtgtcctcccggctggctcgggagccagcccatttcacagcgcttcccaggatccactcactcgtcccggagccgccgcaaccgcggccgccgccatccc

SEQ ID NO: 10314 - protein, 72 aa, Homo sapiens
MPYWSTVRPVMASAPSPPRLTLAPAWLCPATTTPRDHSEASLEGVWLVEQLVVLPISSLVTGRSRFFGGRHS

SEQ ID NO: 10315 - DNA, 431 bp, Homo sapiens
cgatgccagggcaggctcaggcattctgggctcatgcttgaagaagcagagggaccatctcggctgattagacacgccccagacccaaccccaggggtcaggtgaacagccaggcggctaagtgaccagctttcttgtcctctcctttttggcagatacagatcacttggattcagtcgagtttgctttgctccgtgggaactgcaccagagctggaggtgggaacgcactctcttttcatcaagctgagatttcactcgttttttttcttgccaaagtctgtggtgtgccctagacgctgcaacctaatacctgagtttccagtggtgcttctgagcagctgtagtaagtgtcctcccggctggctcgggagccagcccatttcacagcgcttcccaggatccactcactcgtcccggagccgccgcaac

SEQ ID NO: 10316 - protein, 101 aa, Homo sapiens
PAFLSSPFWQIQITWIQSSLLCSVGTAPELEVGTHSLFIKLRFHSFFFLPKSVVCPRRCNLIPEFPVVLLSSCSKCPPGWLGSQPISQRFPGSTHSSRSRR

SEQ ID NO: 10317 - DNA, 445 bp, Homo sapiens
atagctccttctccactgtaggtctgctccaggcaccactccatgaaattctggttccattcctctaaacatgcctgtttttttccccgtatctgtatgattcataagaaagttctctttcccttttctcttattgtcacctttcacaaatgcttttgtccattgttataaagcaactttttggtctgaacacttcagtgcacatgaactttgctgcctatttcttccaaccaggttccagttctttggatctgaaaagagctttctatattacattctgttctgtttttccactgtgacatcccagatattttcctgaaacaaggaattcaaagtgccggtattacctgagtttccagtggtgcttctgagcagctgtagtaagtgtcctcccggctggctcgggagccagcccatttcacagcgcttcccaggatccactcac

SEQ ID NO: 10318 - protein, 49 aa, Homo sapiens
MLLSIVIKQLFGLNTSVHMNFAAYFFQPGSSSLDLKRAFYITFCSVFPL

SEQ ID NO: 10319 - DNA, 7593 bp, Homo sapiens
atgaaacctgttcatgaaaggagtcaggaatgccttccaccaaagaaacgagacctccccgtgaccagcgaggatatggggagaactaccagctgctccactaaccacacaccctccagtgatgcttctgaatggtcccgaggggttgtggtggctgggcagagccaggcaggagccagagtcagcctggggggtgatggagctgaggccatcaccggtctgacagtggaccagtatggcatgctgtataaggtggctgtgccgcctgccaccttttcaccaactggactcccatctgtggtgaatatgagtcccttgcccccaacgtttaatgtagcgtcttcactaattcaacatccaggcatccactatcctccactccactatgctcagctcccatccacctcgctgcagttcattgggtctccttatagccttccctatgctgtgccacctaatttcctaccgagtcccctcctatctccttctgccaaccttgccacctctcaccttccacactttgtgccatatgcctcacttctggctgaaggagccactcctcccccacaggctccctccccggcccactcatttaacaaagctccctctgccacctccccatctgggcaattgccacatcattcaagtactcagccgctggaccttgctccaggtcggatgcccatttattatcagatgtccaggctacctgctgggtatactttgcatgaaacccctccagcaggtgccagcccagttcttacccctcaggagagccagtctgctctggaagcagctgctgcaaatggaggacagagaccacgagagcgaaatttagtaagacgggaaagtgaagcccttgactcccccaacagcaagggtgaaggccagggactggtgccagtggtagaatgtgtggtggatggacagttgttttcaggttctcagactccacgggtagaggtagcagcaccagcacaccgggggaccccggacactgaccttgaggtccagcgggtggttggcgctttagcttctcaggactatcgtgtggtggcagctcagaggaaggaggaacccagccccctcaacctatcccatcatacccccgaccatcagggtgaggggcgagggtcagccaggaaccctgcagagctggcagagaaaagtcaggcccgtgggttctaccctcagtcccatcaggaaccagtaaaacatagacctttacccaaagcaatggttgtagccaatggcaacctggtgcccactggaactgactcaggcctgctgcctgtgggctcggagatcctggtagcatcaagtctggacgtgcaggccagagccaccttcccagacaaggagccaacgccgccccccattacctcctctcacttgccttcccatttcatgaaaggcgccatcatccagctggctacgggagagctgaagcgggtggaggacctccagacccaggattttgtgcgcagtgccgaagtgagcggggggctgaagattgactctagcacggtcgtggacattcaggagagccaatggcctggatttgtcatgctgcattttgtggttggtgagcagcagagcaaagtgagcatcgaagtgccccccgagcaccccttctttgtatatggccagggttggtcctcttgcagccctgggcggacgacacaactcttctctctgccctgccatcggctacaggtgggagatgtctgcatctctatcagtttacagagcttgaacagtaactcagtttctcaggccagctgtgctcccccaagccagctgggtcccccccgagaaaggcctgagaggacggtcttgggatccagagagctatgtgacagtgaggggaagagccagccggcaggagagggctcccgtgtggtagagccttcccagcctgagtccggtgctcaggcctgctggccagccccgagcttccaaagatacagcatgcaaggggaggaggcacgggctgcgctgctccgtccctctttcattccacaggaggtaaagctgtccattgaagggcgttccaatgcgggaaaatgaacctcttccccagaccaggactggggctttaccccagagcctcgcctcgccgccgtgagcaggcagaggatttgcacacgccgagcagggaatggctttcttggcagtgagatttgggggaaaggggaggcatgaagtcagcctcccaaggcaggatctgttgttcattaccccatggcatcctttcaggacaaccccagagggtgttgtgatggggagcagcaggcctggggcaaggaaggaagggggtgcacacaggagaagaaacattccaaaatcagggcctccctgttctttcctccccatccctagctcctgcaagagaaagtccaggctttgggagcagatggcagagggagggagtaaagaaagagccaaaaatgatgatccacagcttatagtagcagttaaactgtcagaagttttttttcttttttgtggtagaagggcaggaggccccaaggttggaaataagagggttcccacccagaacccttcttgtgagagatgcgcactttaaagggtgattttgttccagatgtctatggctgggtgtgtgggggaggagcactctcatctgcaggactctgcttgatcctctgcttcatagcccttccccatctctcctcaccattctgcctacaaggcttctagcagcacgggggcccggagggagagccccttcagggttcagagtgaagtactaccttgccagggactcagtcaggggactttgggagaaagacttgatagccaggctgactgggttctaggcaggccctctggaaaggtagctcacctaacaaagctcctccatctcagcatgccagacccactttgaaatctcacagaatcttgctggtaatggtgactttagaactagtagaccctttttcccaggcactgaccccccacctttgtctgtgttgtgcccaagtgcctgcgccacccccaccctcctgctgcgctgaccgctgcatggtgtcgtgacctgggcctcatttgtagctgcactgcctttccttgtctgcaaagttggttttgtccactctgaccaagacctctagtttttggtgggtagggggtctctctggtttccccttcagctataatctctatttttaaaatctcaaaatcatgtcccctccacttccactgccaaacagcttggtgaagaaacaagaagggaactatgccctgggccagggcgaatgcgtggctgggcagtgcccatcatggcattttcacatgtcccatatgcccctcctgtcttattccactgcttctcccagcattctggtgcctccaagccatcccctcccaccaccagctctaagattctaggatagtcttgataacatttcagtacctgaatagatgtcattttgtgttggtatattcctctgcaaaaagtattttcaatcttggttgcattggcaccccccctaccccccaccaatgtcttaatcccacattttcttcacaacttttagcatcagctcagaccgtggggttccactgggtattgggaattaggctcccccactagctttcaggtgggtaagtttttttgtttgttttttgggggtctttagactcttgaaggcaactcagggtattgtccacgcagctctctggttagacttctcccaggctatgatcctggcatgtcctttataaggtatacttggattggccgagacctggcctggcatcaggagtccaaacctctgaggtctgatctctgctctgtcaaggactttcggcaagtctcgtgacctctggctctttcacttcctccccacctgccaaatggggataaataatcttacctacctcctggggggaggggaagttctgagaatggagtcattcttagtgttcaggtgctaaaggttgttctcctgggggaacagagtgactgaaactggcttgtttgctacaagccctaccctccactctttcattccttgaaagcagtttgcctggtcagtcagcttttgggggtccatcaaaggaggttgctgacctgaccgtgagtgcttcagtatctggtttgtgtcagaaccagacgccaactttgtactgcatttgggatcatatctttccccttctctgtcccccattctctgaatgctgctttctctggcttgtttcctacagtgggggcctgtggggttgagtcttgaggaatcccctcaaatgagaaggccttgggagaaggcctcatctctggctgtttcatgagcaactcattcctagagttcattgtttgcatgggtttctcacaagcgtccttcctcataggaaggctcatcaactgaatttagtgacatgtacacagtagatgctcaagcagtgtctgcaaggacacaagctgagctttctccttatggggcaaacctatgtctaaccagatacagaccaattagtttagatcaaatcaccttccacttgggctacttgtgactttccaacctggtaacttccactgaattctggaaagagaaattcttgaggaccctggcaagttgggccctgacctttctgttgctgtctcttgctggtgaagcaataccagcagttcctgtaataccacaatatcgttccatgcatatataacatattaatacttgattttgctgagctgcaaaggtatctgtcataaaatatggtccccaggaaaagaatctctgtgctctaaatctcggtcagagctgtggcctcccccttgcctttaacctctagtttagtcttttcctccaggcatgaaaaatatgactaacctgtggtgtgtccattcttccttataggaatttcctgagtttgcaggagacatgagagcagtttttagcgagtattttagtgggaagttgccaactttttaagaatgagcagttgacaagggccagagcctgtcccttgtcagcagtaggacatttccagctcttaggaatagaaaggaggactgctgactgtctggcgctgtataaaaatgtgtataccaatttgggaataggggaacccagtcatggatggataataagccaagtcttgaatcattcctatcaagattagtatacatgaggaagaggtggcatggggggaaggggctctgggagttcagagctgagtacttgtacctgagggagggcccccagccaatctgggctggtccttctatattcttggtcccagttggtcataacaccaagggctttgccctgcgctgctttgccactgctgctgtccgctcactgtcctgcctgctgtcctctacagctccctatccttccatgtctttggccatgtagattaagtgtaggcgtccggttcattcttacctgtgttaggccatgttattttatagcgaagtcatgttcgatagggatggtatgaaatgctgctggtgggctggtaaatccaaagggataaggcttcagtgctgttgggagccctctggctccaaatgtctgactatcttgagggagaaacaagcaggtttctactagtggtgtcttctgttgtattaacttctttcctttgtggtatcttgtatcctgttttaaaaactaaatgaagggaaccacattagggcccatgccagcatcccagtgaagttcgtccagctccagttaggtggattctggagttcggagagggtttaaagtttggctgaaatagcacctcaagtggggtttagttttatttttacctgcgggcatcatgggcgatttagggggaagcacaggatggtggtgtggtttaaacctgcagcaagcaggcatgttgaagagttgagtgatcacgctggagatgaagggttggacatggattgactgggaaaaggcctgggtccattggagtaaagataacctagtcgattgaattggccatgggaagttaggtcacagtcttataaacaaagtaaataggacagagactaagttttagggagacatcttggcctcctaggctaagtttactaaaccacactgaagctatagtaccttccagatgggcaaaagtgtacactacagttgaggagctgaaccttattaggttggatgtcgatcaggaacctgtttgccctttgctgggaagccttcactctccagctttcctggggtagggaaggtctcccacattatgcaataataaaataagcatctgggtctttgcagctgtcagttgctctttcaactctaggatccatctttggaccagaagcctggtctgtgcctaggatgacactggccccagagatgctagagtcgactgcactctctccttagctgcagaccatgcacagtgcctggggcggaaggaggagaggtgttgcggtttgccctgctgcctccccagcaggaacaatagtcataaatgcacttttcacactaaaggtttctttattagttctccagttaaacctagatccctccctggtagattgcgaactcaaagttttgtgatcccaaagccattccactgcaaatgcccagcagtgaagatggcctcaaattgggttcttgcctgcagtgtgtgtggcagcagcccatgtgcctttacctgttgtcaaacttgcaagcatttatttgtctttatgactgtcatggggactgaggttcttcagagaaagagtgtgagctgatgacacagtggttttacacccaccccctgggcagggagtttgcacgtagttgtgagctgtgagtggttagtgcattgctggtattgctgaaggcagggttgatccctcacttgactgatacttgcattcaagagaatctagattgtgttgggggagggactgactgtactcatggctaacttaaagtattaaaataaggctgtcccctacaaccttcttagtcacacaggatccctgtagccaaaacagtatatgatccagctgcagagagcagactgctctcagcttgcacagcaccttaggcgagggaagaatatacggatagggaatggggtggagaaaggatgggaatgttgtcatccaggtggctttagggtcctaaggagtggagaaggatggcactggggaggtctggatggatctgtgtaggagttccctgtagataaattactgatcccccatctactatccccagtatgtaatggctgaattaatatgtaatcaactgcattgtatctaaagccttagaactagtcaggtgctccctccacccaataccatttcttaccctctaatcctacctgatctttaacaaagcattaataattctaaggataatctctattttgttgtgcttttttgtaactgttttaaataaatcaatttgtactgtatatttgtacttttgtgagatcctttttgctgttttaccattttaagtctctgtacttggctacacacagattgtatttttattgttaatgctcttcttatggatacctgcatttaacttgtggactatgtaaacacaatatctatcaatatctatatatctatatatctatctatataaactactagcttttcctttt

SEQ ID NO: 10320 - protein, 689 aa, Homo sapiens
MKPVHERSQECLPPKKRDLPVTSEDMGRTTSCSTNHTPSSDASEWSRGVVVAGQSQAGARVSLGGDGAEAITGLTVDQYGMLYKVAVPPATFSPTGLPSVVNMSPLPPTFNVASSLIQHPGIHYPPLHYAQLPSTSLQFIGSPYSLPYAVPPNFLPSPLLSPSANLATSHLPHFVPYASLLAEGATPPPQAPSPAHSFNKAPSATSPSGQLPHHSSTQPLDLAPGRMPIYYQMSRLPAGYTLHETPPAGASPVLTPQESQSALEAAAANGGQRPRERNLVRRESEALDSPNSKGEGQGLVPVVECVVDGQLFSGSQTPRVEVAAPAHRGTPDTDLEVQRVVGALASQDYRVVAAQRKEEPSPLNLSHHTPDHQGEGRGSARNPAELAEKSQARGFYPQSHQEPVKHRPLPKAMVVANGNLVPTGTDSGLLPVGSEILVASSLDVQARATFPDKEPTPPPITSSHLPSHFMKGAIIQLATGELKRVEDLQTQDFVRSAEVSGGLKIDSSTVVDIQESQWPGFVMLHFVVGEQQSKVSIEVPPEHPFFVYGQGWSSCSPGRTTQLFSLPCHRLQVGDVCISISLQSLNSNSVSQASCAPPSQLGPPRERPERTVLGSRELCDSEGKSQPAGEGSRVVEPSQPESGAQACWPAPSFQRYSMQGEEARAALLRPSFIPQEVKLSIEGRSNAGK

SEQ ID NO: 10321 - DNA, 1570 bp, Homo sapiens
ggggaaaatgacatgtgctaacaataaccttttttattgcaggttagcatcttgcaaggaggtagtaacatatccagtcgtgaaactgggaaagaccagagctcttgcatcagggaaacatgtcccgtcggaaacagacaaatccaaataaagttcactgtgacagtgagggtgatgaagaggagacgacacaagatgaagtctcttcccacacatcagaggaagatggaggggtggtcaaagtggagaaagagttagaaaatacagaacagcctgttggtgggaacgaagtggtagagcacgaggtcacagggaatttgaattctgaccccttgcttgaactctgccagtgtcccctctgccagctagactgcgggagccgggagcagttgattgctcacgtgtaccagcacactgcagcagtggtgagcgccaagagctacatgtgtcctgtctgtggccgggcccttagctccccggggtcattgggtcgccacctcttaatccactcggaggaccagcgatctaactgtgctgtgtgtggagcccggttcaccagccatgccacttttaacagtgagaaacttcctgaagtactaaatatggaatccctacccacagtccacaatgagggtccctccagtgctgaggggaaggatattgcctttagtcctccagtgtaccctgctggaattctgcttgtgtgcaacaactgtgctgcctaccgtaaactgctggaagcccagactcccagtgtacgcaagtgggctctacgtcgacagaatgagcctttggaagtacggctgcagcggctggaacgagagcgcacggccaagaagagccggcgggacaatgagacccccgaggagcgggaggtgaggcgcatgagggaccgtgaagccaagcgcttgcagcgcatgcaggagacagacgagcagcgggcacgccggctgcagcgggatcgggaggccatgaggctgaagcgggccaatgaaaccccggaaaagcggcaggcccggctcatccgagagcgagaggccaagcggctcaagaggaggctggagaaaatggacatgatgttgcgagctcagtttggccaggacccttctgccatggcagccttagcagctgaaatgaacttcttccagctgcctgtaagtggggtggagttggacagccagcttctgggcaagatggcctttgaagagcagaacagcagctctctgcactgaaccacaccctcctgcctgccctccttcccacctacctacccacccacccacacccacagccacgaggaccagtgctgctgccacccacgaggccctgtccttgctgccagaggcaggcctgggtttattgcaggtggacctgagcagcccttgcatatgggaacaggatgatggggtcaggagggacctggctcaaggcagctctggacaagggagcaggcagtccagagaactggcctccccagcccactgccacaggctgtgcttctaggactgtggggcccctgtgtggcccatgaagttgtgaagtcaaataaattaattttatctttactgcc

SEQ ID NO: 10322 - protein, 370 aa, Homo sapiens; identical to SEQ ID NO: 1674

SEQ ID NO: 10323 - DNA, 2197 bp, Homo sapiens
tgtagttaatcaggaaccttcaggcttacgtatatatcccctcctatatggggtggggagcagatgcatgtcttggcagcatttttcgtttggggaacttttctctttattcctcccactgttctctttgctacccagaggctagattgagaagagcctctaaagttattaactttgaccacctctctggaatgtgtgaggagggccaggtggtattccacactggggtgttgaattagtactcatcaatgtggatggcatctgtctcttctggtgagagcccatcttcaacattagaagtttgatttgcttagtgccatgtcattcacagtgcagcatagcattgcgcctgtatcaccagatagaggctttatttcccatgctgttctcatttacagatgcctatttgagacattttctgtctcgcagggatgtgatgcctttgctacctctaggcaagataacatcatgaaaaatccgctggtgtagactgcagggcttgacttccagtgggcatgtgacatgttagcatcttgcaaggaggtagtaacatatccagtcgtgaaactgggaaagaccagagctcttgcatcagggaaacatgtcccgtcggaaacagacaaatccaaataaagttcactgggatcaagtatttgctgggctagaagagcaagcccgccaggcgatgatgaaaactgattttcctggagaccttggcagtcagcgacaagctatccaacaactaagagatcaggactccagtagcagtgagttctgcaccttctggtgacagtgagggtgatgaagaggagacgacacaagatgaagtctcttcccacacatcagaggaagatggaggggtggtcaaagtggagaaagagttagaaaatacagaacagcctgttggtgggaacgaagtggtagagcacgaggtcacagggaatttgaattctgaccccttgcttgaactctgccagtgtcccctctgccagctagactgcgggagccgggagcagttgattgctcacgtgtaccagcacactgcagcagtggtgagcgccaagagctacatgtgtcctgtctgtggccgggcccttagctccccggggtcattgggtcgccacctcttaatccactcggaggaccagcgatctaactgtgctgtgtgtggagcccggttcaccagccatgccacttttaacagtgagaaacttcctgaagtactaaatatggaatccctacccacagtccacaatgagggtccctccagtgctgaggggaaggatattgcctttagtcctccagtgtaccctgctggaattctgcttgtgtgcaacaactgtgctgcctaccgtaaactgctggaagcccagactcccagtgtacgcaagtgggctctacgtcgacagaatgagcctttggaagtacggctgcagcggctggaacgagagcgcacggccaagaagagccggcgggacaatgagacccccgaggagcgggaggtgaggcgcatgagggaccgtgaagccaagcgcttgcagcgcatgcaggagacagacgagcagcgggcacgccggctgcagcgggatcgggaggccatgaggctgaagcgggccaatgaaaccccggaaaagcggcaggcccggctcatccgagagcgagaggccaagcggctcaagaggaggctggagaaaatggacatgatgttgcgagctcagtttggccaggacccttctgccatggcagccttagcagctgaaatgaacttcttccagctgcctgtaagtggggtggagttggacagccagcttctgggcaagatggcctttgaagagcagaacagcagctctctgcactgaaccacaccctcctgcctgccctccttcccacctacctacccacccacccacacccacagccacgaggaccagtgctgctgccacccacgaggccctgtccttgctgccagaggcaggcctgggtttattgcaggtggacctgagcagcccttgcatatgggaacaggatgatggggtcaggagggacctggctcaaggcagctctggacaagggagcaggcagtccagagaactggcctccccagcccactgccacaggctgtgcttctaggactgtggggcccctgtgtggcccatgaagttgtgaagtcaaataaattaattttatctttactgcc

SEQ ID NO: 10324 - protein, 262 aa, Homo sapiens
MCPVCGRALSSPGSLGRHLLIHSEDQRSNCAVCGARFTSHATFNSEKLPEVLNMESLPTVHNEGPSSAEGKDIAFSPPVYPAGILLVCNNCAAYRKLLEAQTPSVRKWALRRQNEPLEVRLQRLERERTAKKSRRDNETPEEREVRRMRDREAKRLQRMQETDEQRARRLQRDREAMRLKRANETPEKRQARLIREREAKRLKRRLEKMDMMLRAQFGQDPSAMAALAAEMNFFQLPVSGVELDSQLLGKMAFEEQNSSSLH

SEQ ID NO: 10325 - DNA, 1488 bp, Homo sapiens
gtgttgtctaagggtttgtctgagccgcctcggaagacctccggctcttgtcaggctcttgtctgatacagatcacttggattcagtcgagtttgctttgctccgtgggaactgcaccagagctggaggttagcatcttgcaaggaggtagtaacatatccagtcgtgaaactgggaaagaccagagctcttgcatcagggaaacatgtcccgtcggaaacagacaaatccaaataaagttcactgggatcaagtatttgctgggctagaagagcaagcccgccaggcgatgatgaaaactgattttcctggagaccttggcagtcagcgacaagctatccaacaactaagagatcaggactccagtagcagtgagttctgcaccttctggtcacagggaatttgaattctgaccccttgcttgaactctgccagtgtcccctctgccagctagactgcgggagccgggagcagttgattgctcacgtgtaccagtgagaaacttcctgaagtactaaatatggaatccctacccacagtccacaatgagggtccctccagtgctgaggggaaggatattgcctttagtcctccagtgtaccctgctggaattctgcttgtgtgcaacaactgtgctgcctaccgtaaactgctggaagcccagactcccagtgtacgcaagtgggctctacgtcgacagaatgagcctttggaagtacggctgcagcggctggaacgagagcgcacggccaagaagagccggcgggacaatgagacccccgaggagcgggaggtgaggcgcatgagggaccgtgaagccaagcgcttgcagcgcatgcaggagacagacgagcagcgggcacgccggctgcagcgggatcgggaggccatgaggctgaagcgggccaatgaaaccccggaaaagcggcaggcccggctcatccgagagcgagaggccaagcggctcaagaggaggctggagaaaatggacatgatgttgcgagctcagtttggccaggacccttctgccatggcagccttagcagctgaaatgaacttcttccagctgcctgtaagtggggtggagttggacagccagcttctgggcaagatggcctttgaagagcagaacagcagctctctgcactgaaccacaccctcctgcctgccctccttcccacctacctacccacccacccacacccacagccacgaggaccagtgctgctgccacccacgaggccctgtccttgctgccagaggcaggcctgggtttattgcaggtggacctgagcagcccttgcatatgggaacaggatgatggggtcaggagggacctggctcaaggcagctctggacaagggagcaggcagtccagagaactggcctccccagcccactgccacaggctgtgcttctaggactgtggggcccctgtgtggcccatgaagttgtgaagtcaaataaattaattttatctttactgcc

SEQ ID NO: 10326 - protein, 66 aa, Homo sapiens
MSRRKQTNPNKVHWDQVFAGLEEQARQAMMKTDFPGDLGSQRQAIQQLRDQDSSSSEFCTFWSQGI

SEQ ID NO: 10327 - DNA, 1827 bp, Homo sapiens
ctaaatttagatttcggagattgtgttgtctaagggtttgtctgagccgcctcggaagacctccggctcttgtcaggctcttgtctggtaattcctgggaatttacctgggctcatgcttgaagaagcagagggaccatctcggctgattagacacgccccagacccaaccccaggggtcaggtgaacagccaggcggctaagtgaccagctttcttgtcctctcctttttggcagatacagatcacttggattcagtcgagtttgctttgctccgtgggaactgcaccagagctggaggttagcatcttgcaaggaggtagtaacatatccagtcgtgaaactgggaaagaccagagctcttgcatcagggaaacatgtcccgtcggaaacagacaaatccaaataaagttcactgtgacagtgagggtgatgaagaggagacgacacaagatgaagtctcttcccacacatcagaggaagatggaggggtggtcaaagtggagaaagagttagaaaatacagaacagcctgttggtgggaacgaagtggtagagcacgaggtcacagggaatttgaattctgaccccttgcttgaactctgccagtgtcccctctgccagctagactgcgggagccgggagcagttgattgctcacgtgtaccagcacactgcagcagtggtgagcgccaagagctacatgtgtcctgtctgtggccgggcccttagctccccggggtcattgggtcgccacctcttaatccactcggaggaccagcgatctaactgtgctgtgtgtggagcccggttcaccagccatgccacttttaacagtgagaaacttcctgaagtactaaatatggaatccctacccacagtccacaatgagggtccctccagtgctgaggggaaggatattgcctttagtcctccagtgtaccctgctggaattctgcttgtgtgcaacaactgtgctgcctaccgtaaactgctggaagcccagactcccagtgtacgcaagtgggctctacgtcgacagaatgagcctttggaagtacggctgcagcggctggaacgagagcgcacggccaagaagagccggcgggacaatgagacccccgaggagcgggaggtgaggcgcatgagggaccgtgaagccaagcgcttgcagcgcatgcaggagacagacgagcagcgggcacgccggctgcagcgggatcgggaggccatgaggctgaagcgggccaatgaaaccccggaaaagcggcaggcccggctcatccgagagcgagaggccaagcggctcaagaggaggctggagaaaatggacatgatgttgcgagctcagtttggccaggacccttctgccatggcagccttagcagctgaaatgaacttcttccagctgcctgtaagtggggtggagttggacagccagcttctgggcaagatggcctttgaagagcagaacagcagctctctgcactgaaccacaccctcctgcctgccctccttcccacctacctacccacccacccacacccacagccacgaggaccagtgctgctgccacccacgaggccctgtccttgctgccagaggcaggcctgggtttattgcaggtggacctgagcagcccttgcatatgggaacaggatgatggggtcaggagggacctggctcaaggcagctctggacaagggagcaggcagtccagagaactggcctccccagcccactgccacaggctgtgcttctaggactgtggggcccctgtgtggcccatgaagttgtgaagtcaaataaattaattttatctttactgcc

SEQ ID NO: 10328 - protein, 370 aa, Homo sapiens; identical to SEQ ID NO: 1674

SEQ ID NO: 10329 - DNA, 1874 bp, Homo sapiens
agctgcgggtgcgcgagccgcgcgctcccgccgcccgcgtcgccatctttttccccctccgtctgtctgtctgctgttggctttgtccgtctgcagcgccgcccctcggctccccgccaccggctcggctcggcccggagccccttccgctcgccggggcccagtcccggagcgccccggcccggctggcttgggctgcggtcccgggtccattgtccggcggtccgtctgtccggaggcggggcccagggacccagagcgcagcgcagcgccgaggcgccggatacagatcacttggattcagtcgagtttgctttgctccgtgggaactgcaccagagctggaggttagcatcttgcaaggaggtagtaacatatccagtcgtgaaactgggaaagaccagagctcttgcatcagggaaacatgtcccgtcggaaacagacaaatccaaataaagttcactgtgacagtgagggtgatgaagaggagacgacacaagatgaagtctcttcccacacatcagaggaagatggaggggtggtcaaagtggagaaagagttagaaaatacagaacagcctgttggtgggaacgaagtggtagagcacgaggtcacagggaatttgaattctgaccccttgcttgaactctgccagtgtcccctctgccagctagactgcgggagccgggagcagttgattgctcacgtgtaccagcacactgcagcagtggtgagcgccaagagctacatgtgtcctgtctgtggccgggcccttagctccccggggtcattgggtcgccacctcttaatccactcggaggaccagcgatctaactgtgctgtgtgtggagcccggttcaccagccatgccacttttaacagtgagaaacttcctgaagtactaaatatggaatccctacccacagtccacaatgagggtccctccagtgctgaggggaaggatattgcctttagtcctccagtgtaccctgctggaattctgcttgtgtgcaacaactgtgctgcctaccgtaaactgctggaagcccagactcccagtgtacgcaagtgggctctacgtcgacagaatgagcctttggaagtacggctgcagcggctggaacgagagcgcacggccaagaagagccggcgggacaatgagacccccgaggagcgggaggtgaggcgcatgagggaccgtgaagccaagcgcttgcagcgcatgcaggagacagacgagcagcgggcacgccggctgcagcgggatcgggaggccatgaggctgaagcgggccaatgaaaccccggaaaagcggcaggcccggctcatccgagagcgagaggccaagcggctcaagaggaggctggagaaaatggacatgatgttgcgagctcagtttggccaggacccttctgccatggcagccttagcagctgaaatgaacttcttccagctgcctgtaagtggggtggagttggacagccagcttctgggcaagatggcctttgaagagcagaacagcagctctctgcactgaaccacaccctcctgcctgccctccttcccacctacctacccacccacccacacccacagccacgaggaccagtgctgctgccacccacgaggccctgtccttgctgccagaggcaggcctgggtttattgcaggtggacctgagcagcccttgcatatgggaacaggatgatggggtcaggagggacctggctcaaggcagctctggacaagggagcaggcagtccagagaactggcctccccagcccactgccacaggctgtgcttctaggactgtggggcccctgtgtggcccatgaagttgtgaagtcaaataaattaattttatctttactgcc

SEQ ID NO: 10330 - protein, 370 aa, Homo sapiens; identical to SEQ ID NO: 1674

SEQ ID NO: 10331 - DNA, 1991 bp, Homo sapiens
agctgcgggtgcgcgagccgcgcgctcccgccgcccgcgtcgccatctttttccccctccgtctgtctgtctgctgttggctttgtccgtctgcagcgccgcccctcggctccccgccaccggctcggctcggcccggagccccttccgctcgccggggcccagtcccggagcgccccggcccggctggcttgggctgcggtcccgggtccattgtccggcggtccgtctgtccggaggcggggcccagggacccagagcgcagcgcagcgccgaggcgccggatacagatcacttggattcagtcgagtttgctttgctccgtgggaactgcaccagagctggaggtctgaaaaagaactgtgtttgatatgcagatatgctagaagactgcctgaaagctgcttcctttgccacttcctgtggaggcctgtctttgccatttgcggtttctttattcttttggttagcatcttgcaaggaggtagtaacatatccagtcgtgaaactgggaaagaccagagctcttgcatcagggaaacatgtcccgtcggaaacagacaaatccaaataaagttcactgggatcaagtatttgctgggctagaagagcaagcccgccaggcgatgatgaaaactgattttcctggagaccttggcagtcagcgacaagctatccaacaactaagagatcaggactccagtagcagtgagttctgcaccttctggtcacagggaatttgaattctgaccccttgcttgaactctgccagtgtcccctctgccagctagactgcgggagccgggagcagttgattgctcacgtgtaccagcacactgcagcagtggtgagcgccaagagctacatgtgtcctgtctgtggccgggcccttagctccccggggtcattgggtcgccacctcttaatccactcggaggaccagcgatctaactgtgctgtgtgtggagcccggttcaccagccatgccacttttaacagtgagaaacttcctgaagtactaaatatggaatccctacccacagtccacaatgagggtccctccagtgctgaggggaaggatattgcctttagtcctccagtgtaccctgctggaattctgcttgtgtgcaacaactgtgctgcctaccgtaaactgctggaagcccagactcccagtgtacgcaagtgggctctacgtcgacagaatgagcctttggaagtacggctgcagcggctggaacgagagcgcacggccaagaagagccggcgggacaatgagacccccgaggagcgggaggtgaggcgcatgagggaccgtgaagccaagcgcttgcagcgcatgcaggagacagacgagcagcgggcacgccggctgcagcgggatcgggaggccatgaggctgaagcgggccaatgaaaccccggaaaagcggcaggcccggctcatccgagagcgagaggccaagcggctcaagaggaggctggagaaaatggacatgatgttgcgagctcagtttggccaggacccttctgccatggcagccttagcagctgaaatgaacttcttccagctgcctgtaagtggggtggagttggacagccagcttctgggcaagatggcctttgaagagcagaacagcagctctctgcactgaaccacaccctcctgcctgccctccttcccacctacctacccacccacccacacccacagccacgaggaccagtgctgctgccacccacgaggccctgtccttgctgccagaggcaggcctgggtttattgcaggtggacctgagcagcccttgcatatgggaacaggatgatggggtcaggagggacctggctcaaggcagctctggacaagggagcaggcagtccagagaactggcctccccagcccactgccacaggctgtgcttctaggactgtggggcccctgtgtggcccatgaagttgtgaagtcaaataaattaattttatctttactgcc

SEQ ID NO: 10332 - protein, 262 aa, Homo sapiens; identical to SEQ ID NO: 10324

SEQ ID NO: 10333 - DNA, 1852 bp, Homo sapiens
agctgcgggtgcgcgagccgcgcgctcccgccgcccgcgtcgccatctttttccccctccgtctgtctgtctgctgttggctttgtccgtctgcagcgccgcccctcggctccccgccaccggctcggctcggcccggagccccttccgctcgccggggcccagtcccggagcgccccggcccggctggcttgggctgcggtcccgggtccattgtccggcggtccgtctgtccggaggcggggcccagggacccagagcgcagcgcagcgccgaggcgccggatacagatcacttggattcagtcgagtttgctttgctccgtgggaactgcaccagagctggaggttagcatcttgcaaggaggtagtaacatatccagtcgtgaaactgggaaagaccagagctcttgcatcagggaaacatgtcccgtcggaaacagacaaatccaaataaagttcactgggatcaagtatttgctgggctagaagagcaagcccgccaggcgatgatgaaaactgattttcctggagaccttggcagtcagcgacaagctatccaacaactaagagatcaggactccagtagcagtgagttctgcaccttctggtgacagtgagggtgatgaagaggagacgacacaagatgaagtctcttcccacacatcagaggaagatggaggggtggtcaaagtggagaaagagttagaaaatacagaacagcctgttggtgggaacgaagtggtagagcacgaggtcacagggaatttgaattctgaccccttgcttgaactctgccagtgtcccctctgccagctagactgcgggagccgggagcagttgattgctcacgtgtaccagtgagaaacttcctgaagtactaaatatggaatccctacccacagtccacaatgagggtccctccagtgctgaggggaaggatattgcctttagtcctccagtgtaccctgctggaattctgcttgtgtgcaacaactgtgctgcctaccgtaaactgctggaagcccagactcccagtgtacgcaagtgggctctacgtcgacagaatgagcctttggaagtacggctgcagcggctggaacgagagcgcacggccaagaagagccggcgggacaatgagacccccgaggagcgggaggtgaggcgcatgagggaccgtgaagccaagcgcttgcagcgcatgcaggagacagacgagcagcgggcacgccggctgcagcgggatcgggaggccatgaggctgaagcgggccaatgaaaccccggaaaagcggcaggcccggctcatccgagagcgagaggccaagcggctcaagaggaggctggagaaaatggacatgatgttgcgagctcagtttggccaggacccttctgccatggcagccttagcagctgaaatgaacttcttccagctgcctgtaagtggggtggagttggacagccagcttctgggcaagatggcctttgaagagcagaacagcagctctctgcactgaaccacaccctcctgcctgccctccttcccacctacctacccacccacccacacccacagccacgaggaccagtgctgctgccacccacgaggccctgtccttgctgccagaggcaggcctgggtttattgcaggtggacctgagcagcccttgcatatgggaacaggatgatggggtcaggagggacctggctcaaggcagctctggacaagggagcaggcagtccagagaactggcctccccagcccactgccacaggctgtgcttctaggactgtggggcccctgtgtggcccatgaagttgtgaagtcaaataaattaattttatctttactgcc

SEQ ID NO: 10334 - protein, 62 aa, Homo sapiens
MSRRKQTNPNKVHWDQVFAGLEEQARQAMMKTDFPGDLGSQRQAIQQLRDQDSSSSEFCTFW

SEQ ID NO: 10335 - DNA, 1777 bp, Homo sapiens
gccgaagccaccgcgaagcgtgggggaatgaggcgaagaggatacagatcacttggattcagtcgagtttgctttgctccgtgggaactgcaccagagctggaggttagcatcttgcaaggaggtagtaacatatccagtcgtgaaactgggaaagaccagagctcttgcatcagggaaacatgtcccgtcggaaacagacaaatccaaataaagttcactgggatcaagtatttgctgggctagaagagcaagcccgccaggcgatgatgaaaactgattttcctggagaccttggcagtcagcgacaagctatccaacaactaagagatcaggactccagtagcagtgagttctgcaccttctggtgacagtgagggtgatgaagaggagacgacacaagatgaagtctcttcccacacatcagaggaagatggaggggtggtcaaagtggagaaagagttagaaaatacagaacagcctgttggtgggaacgaagtggtagagcacgaggtcacagggaatttgaattctgaccccttgcttgaactctgccagtgtcccctctgccagctagactgcgggagccgggagcagttgattgctcacgtgtaccagcacactgcagcagtggtgagcgccaagagctacatgtgtcctgtctgtggccgggcccttagctccccggggtcattgggtcgccacctcttaatccactcggaggaccagcgatctaactgtgctgtgtgtggagcccggttcaccagccatgccacttttaacagtgagaaacttcctgaagtactaaatatggaatccctacccacagtccacaatgagggtccctccagtgctgaggggaaggatattgcctttagtcctccagtgtaccctgctggaattctgcttgtgtgcaacaactgtgctgcctaccgtaaactgctggaagcccagactcccagtgtacgcaagtgggctctacgtcgacagaatgagcctttggaagtacggctgcagcggctggaacgagagcgcacggccaagaagagccggcgggacaatgagacccccgaggagcgggaggtgaggcgcatgagggaccgtgaagccaagcgcttgcagcgcatgcaggagacagacgagcagcgggcacgccggctgcagcgggatcgggaggccatgaggctgaagcgggccaatgaaaccccggaaaagcggcaggcccggctcatccgagagcgagaggccaagcggctcaagaggaggctggagaaaatggacatgatgttgcgagctcagtttggccaggacccttctgccatggcagccttagcagctgaaatgaacttcttccagctgcctgtaagtggggtggagttggacagccagcttctgggcaagatggcctttgaagagcagaacagcagctctctgcactgaaccacaccctcctgcctgccctccttcccacctacctacccacccacccacacccacagccacgaggaccagtgctgctgccacccacgaggccctgtccttgctgccagaggcaggcctgggtttattgcaggtggacctgagcagcccttgcatatgggaacaggatgatggggtcaggagggacctggctcaaggcagctctggacaagggagcaggcagtccagagaactggcctccccagcccactgccacaggctgtgcttctaggactgtggggcccctgtgtggcccatgaagttgtgaagtcaaataaattaattttatctttactgcc

SEQ ID NO: 10336 - protein, 262 aa, Homo sapiens; identical to SEQ ID NO: 10324

SEQ ID NO: 10337 - DNA, 2625 bp, Homo sapiens
tagagacagattttcgcaatgttgaccaggctggtctcgaactcctgacctcaagtgatccccctgccttaccctcccaaaatgctgggattacagagatactgtttcgaataattggcttgttggggtacaattcacagttgatatattacaggatctaaatagacagcgatgcggtttcactatggtgtccaggctggtctgcaactcccgggctcaagcgatcctcccgccccgcctctcaaagtgctgggaaggtcccttccaggcttaagcagcgataatggttttcaagttaaaaacaaaggaggaacagcacagcatgctgggctctggatttaaagctgagcgcttaagagtgaatttgagattagtcataaatcgccttaaactattggagaaaaagaaaacggaactggcccagaaagcaaggaaggagattgctgactatctggctgctgggaaagatgaacgagctcggatccgtgtggagcacattatccgggaagactacctcgtggaggccatggagatcctggagctgtactgtgacctgctgctggctcggtttggccttatccagtctatgaaggaactagattctggtctggctgaatctgtgtctacattgatctgggctgctcctcgactccagtcagaagtggctgagttgaaaatagttgctgatcagctctgtgccaagtatagcaaggaatatggcaagctatgtaggaccaaccagattggaactgtgaatgacaggctaatgcacaagctgagtgtggaagccccacccaaaatcctggtggagagatacctgattgaaattgcaaagaattacaacgtaccctatgaacctgactctgtggtcatggcagaagctcctcctggggtagagacagatcttattgatgttggattcacagatgatgtgaagaaaggaggccctggaagaggagggagtggtggcttcacagcaccagttggtggacctgatggaacggtgccaatgcccatgcccatgcccatgcctatgccatctgcaaatacgcctttctcatatccactgccaaagggaccatcagatttcaatggactgccaatggggacttatcaggcctttcccaatattcatccacctcagataccagcaactcccccatcgtatgaatctgtagatgacattaatgctgataagaatatctcttctgcacagattgttggtcctggacccaagccagaagcctctgcaaagcttccttccagacctgcagataactatgacaactttgtcctaccagagttgccatctgtgccagacacactaccaactgcatctgctggtgccagcacctcagcatctgaagacattgactttgatgatctttcccggaggtttgaagagctgaaaaagaaaacataggtctcttaaaccaggcaactttcacgttttgggagttgagactgagcaatttctccttgtaacaaagaatctccatgaaattctgtttcatctgttaaccgtcactcagcacaacactccctctgggctctcttcctgctcctccagattctgctgctttccagttctctgttgatcctgagactaacaattggagactgaggccagagcaactggctcctggcagctgtgcttgtccgtttcctgtcagagtgatcccaggtttcctcctggcccgtcccatggtccctccacaggagtgtgagaggatgggggaagcactgtgggaagaccaccaaagatggctggacagtgggagagagcacgttgtgaagcatcccagcctcgtgttgaggttccagacttagaaacagacccctctgtacagggggattgtggtgagtgagaatcaaggccaccttgtgtgttttctcactctcgaatgcaagtgggagagggaaaatgactcgggacgccattgtaacggttcctggaagctgggccctctcattggcatatacagtactcctcgctgcagggcactgtcccaccgggatccagttgcaaagtttgtcttgacagttgaaggcctcgcttagttgtactggattctcagggagccctctgtggccttttgctttgcgtgctgtttcccttgtaccagagggcggcaccgtggaaattctgttttccctgtagcatattgtgttggattgcattactggcagagaaaggacaaggtgccattcaagtcctagggtgggcttccagctgccttaatagaagtactcaagtcttttgggtagtgagctggaaagcctacaggaaaagaggggtacctgttttcatttgaaaactttgattcatggaacctttaaaactaatctcagaaaaatttttggtgcccatgcagctgtagttgttcactgctttcctggatggatgggactcttatgtcataacttctgttactcctttggcccatagctaaggtcatccttccccacaggggtggctttgggattggatgatacagcttttgcttctgtgtagtatacctgtacatacttgtttcaggcagcctttctttaatgttttcagttggtttgtattctgtagctcagtagctgctaataaagttaaagatcctgtgtcctgctttc

SEQ ID NO: 10338 - protein, 379 aa, Homo sapiens
MVFKLKTKEEQHSMLGSGFKAERLRVNLRLVINRLKLLEKKKTELAQKARKEIADYLAAGKDERARIRVEHIIREDYLVEAMEILELYCDLLLARFGLIQSMKELDSGLAESVSTLIWAAPRLQSEVAELKIVADQLCAKYSKEYGKLCRTNQIGTVNDRLMHKLSVEAPPKILVERYLIEIAKNYNVPYEPDSVVMAEAPPGVETDLIDVGFTDDVKKGGPGRGGSGGFTAPVGGPDGTVPMPMPMPMPMPSANTPFSYPLPKGPSDFNGLPMGTYQAFPNIHPPQIPATPPSYESVDDINADKNISSAQIVGPGPKPEASAKLPSRPADNYDNFVLPELPSVPDTLPTASAGASTSASEDIDFDDLSRRFEELKKKT

SEQ ID NO: 10339 - DNA, 1373 bp, Homo sapiens
ctgtggctggcctccccgcgcccagagcgaaattaagggcatgcccccagcagctgactcagtcggcgtggcgcttcccccaacgtctgccgtgcccccgccgcgggaagtagtccccggccgcgccgactccaaaggaaaccgagggagggtgccccgagtcagcgcgtgggtcccggcagcggcgatcgcgcagccaatccctggaaaggagggcgtggctatatcggccccgtggatccctccgcccgcgcttgttgtgctgaggccgagggagtcgccattttggatggtgaaccctgaagtcggtgtctgctgcgttcacggcaggattcggttaggaggaacagcacagcatgctgggctctggatttaaagctgagcgcttaagagtgaatttgagattagtcataaatcgccttaaactattggagaaaaagaaaacggaactggcccagaaagcaaggaaggagattgctgactatctggctgctgggaaagatgaacgagctcggatccgtgtggagcacattatccgggaagactacctcgtggaggccatggagatcctggagctgtactgtgacctgctgctggctcggtttggccttatccagtctatgaaggaactagattctggtctggctgaatctgtgtctacattgatctgggctgctcctcgactccagtcagaagtggctgagttgaaaatagttgctgatcagctctgtgccaagtatagcaaggaatatggcaagctatgtaggaccaaccagattggaactgtgaatgacaggttgaaggcctcgcttagttgtactggattctcagggagccctctgtggccttttgctttgcgtgctgtttcccttgtaccagagggcggcaccgtggaaattctgttttccctgtagcatattgtgttggattgcattactggcagagaaaggacaaggtgccattcaagtcctagggtgggcttccagctgccttaatagaagtactcaagtcttttgggtagtgagctggaaagcctacaggaaaagaggggtacctgttttcatttgaaaactttgattcatggaacctttaaaactaatctcagaaaaatttttggtgcccatgcagctgtagttgttcactgctttcctggatggatgggactcttatgtcataacttctgttactcctttggcccatagctaaggtcatccttccccacaggggtggctttgggattggatgatacagcttttgcttctgtgtagtatacctgtacatacttgtttcaggcagcctttctttaatgttttcagttggtttgtattctgtagctcagtagctgctaataaagttaaagatcctgtgtcctg

SEQ ID NO: 10340 - protein, 185 aa, Homo sapiens
MLGSGFKAERLRVNLRLVINRLKLLEKKKTELAQKARKEIADYLAAGKDERARIRVEHIIREDYLVEAMEILELYCDLLLARFGLIQSMKELDSGLAESVSTLIWAAPRLQSEVAELKIVADQLCAKYSKEYGKLCRTNQIGTVNDRLKASLSCTGFSGSPLWPFALRAVSLVPEGGTVEILFSL

SEQ ID NO: 10341 - DNA, 2566 bp, Homo sapiens
ctgtggctggcctccccgcgcccagagcgaaattaagggcatgcccccagcagctgactcagtcggcgtggcgcttcccccaacgtctgccgtgcccccgccgcgggaagtagtccccggccgcgccgactccaaaggaaaccgagggagggtgccccgagtcagcgcgtgggtcccggcagcggcgatcgcgcagccaatccctggaaaggagggcgtggctatatcggccccgtggatccctccgcccgcgcttgttgtgctgaggccgagggagtcgccattttggatggtgaaccctgaagtcggtgtctgctgcgttcacggcaggattcggttaggaggaacagcacagcatgctgggctctggatttaaagctgagcgcttaagagtgaatttgagattagtcataaatcgccttaaactattggagaaaaagaaaacggaactggcccagaaagcaaggaaggagattgctgactatctggctgctgggaaagatgaacgagctcggatccgtgtggagcacattatccgggaagactacctcgtggaggccatggagatcctggagctgtactgtgacctgctgctggctcggtttggccttatccagtctatgaaggaactagattctggtctggctgaatctgtgtctacattgatctgggctgctcctcgactccagtcagaagtggctgagttgaaaatagttgctgatcagctctgtgccaagtatagcaaggaatatggcaagctatgtaggaccaaccagattggaactgtgaatgacaggctaatgcacaagctgagtgtggaagccccacccaaaatcctggtggagagatacctgattgaaattgcaaagaattacaacgtaccctatgaacctgactctgtggtcatggcagaagctcctcctggggtagagacagatcttattgatgttggattcacagatgatgtgaagaaaggaggccctggaagaggagggagtggtggcttcacagcaccagttggtggacctgatggaacggtgccaatgcccatgcccatgcccatgcctatgccatctgcaaatacgcctttctcatatccactgccaaagggaccagtagatgacattaatgctgataagaatatctcttctgcacagattgttggtcctggacccaagccagaagcctctgcaaagcttccttccagacctgcagataactatgacaactttgtcctaccagagttgccatctgtgccagacacactaccaactgcatctgctggtgccagcacctcagcatctgaagacattgactttgatgatctttcccggaggtttgaagagctgaaaaagaaaacataggtctcttaaaccaggcaactttcacgttttgggagttgagactgagcaatttctccttgtaacaaagaatctccatgaaattctgtttcatctgttaaccgtcactcagcacaacactccctctgggctctcttcctgctcctccagattctgctgctttccagttctctgttgatcctgagactaacaattggagactgaggccagagcaactggctcctggcagctgtgcttgtccgtttcctgtcagagtgatcccaggtttcctcctggcccgtcccatggtccctccacaggagtgtgagaggatgggggaagcactgtgggaagaccaccaaagatggctggacagtgggagagagcacgttgtgaagcatcccagcctcgtgttgaggttccagacttagaaacagacccctctgtacagggggattgtggtgagtgagaatcaaggccaccttgtgtgttttctcactctcgaatgcaagtgggagagggaaaatgactcgggacgccattgtaacggttcctggaagctgggccctctcattggcatatacagtactcctcgctgcagggcactgtcccaccgggatccagttgcaaagtttgtcttgacagttgaaggcctcgcttagttgtactggattctcagggagccctctgtggccttttgctttgcgtgctgtttcccttgtaccagagggcggcaccgtggaaattctgttttccctgtagcatattgtgttggattgcattactggcagagaaaggacaaggtgccattcaagtcctagggtgggcttccagctgccttaatagaagtactcaagtcttttgggtagtgagctggaaagcctacaggaaaagaggggtacctgttttcatttgaaaactttgattcatggaacctttaaaactaatctcagaaaaatttttggtgcccatgcagctgtagttgttcactgctttcctggatggatgggactcttatgtcataacttctgttactcctttggcccatagctaaggtcatccttccccacaggggtggctttgggattggatgatacagcttttgcttctgtgtagtatacctgtacatacttgtttcaggcagcctttctttaatgttttcagttggtttgtattctgtagctcagtagctgctaataaagttaaagatcctgtgtcctgctttc

SEQ ID NO: 10342 - protein, 335 aa, Homo sapiens
MLGSGFKAERLRVNLRLVINRLKLLEKKKTELAQKARKEIADYLAAGKDERARIRVEHIIREDYLVEAMEILELYCDLLLARFGLIQSMKELDSGLAESVSTLIWAAPRLQSEVAELKIVADQLCAKYSKEYGKLCRTNQIGTVNDRLMHKLSVEAPPKILVERYLIEIAKNYNVPYEPDSVVMAEAPPGVETDLIDVGFTDDVKKGGPGRGGSGGFTAPVGGPDGTVPMPMPMPMPMPSANTPFSYPLPKGPVDDINADKNISSAQIVGPGPKPEASAKLPSRPADNYDNFVLPELPSVPDTLPTASAGASTSASEDIDFDDLSRRFEELKKKT

SEQ ID NO: 10343 - DNA, 2659 bp, Homo sapiens
ctgtggctggcctccccgcgcccagagcgaaattaagggcatgcccccagcagctgactcagtcggcgtggcgcttcccccaacgtctgccgtgcccccgccgcgggaagtagtccccggccgcgccgactccaaaggaaaccgagggagggtgccccgagtcagcgcgtgggtcccggcagcggcgatcgcgcagccaatccctggaaaggagggcgtggctatatcggccccgtggatccctccgcccgcgcttgttgtgctgaggccgagggagtcgccattttggatggtgaaccctgaagtcggtgtctgctgcgttcacggcaggattcggttaggaggaacagcacagcatgctgggctctggatttaaagctgagcgcttaagagtgaatttgagattagtcataaatcgccttaaactattggagaaaaagaaaacggaactggcccagaaagcaaggaaggagattgctgactatctggctgctgggaaagatgaacgagctcggatccgtgtggagcacattatccgggaagactacctcgtggaggccatggagatcctggagctgtactgtgacctgctgctggctcggtttggccttatccagtctatgaaggaactagattctggtctggctgaatctgtgtctacattgatctgggctgctcctcgactccagtcagaagtggctgagttgaaaatagttgctgatcagctctgtgccaagtatagcaaggaatatggcaagctatgtaggaccaaccagattggaactgtgaatgacaggctaatgcacaagctgagtgtggaagccccacccaaaatcctggtggagagatacctgattgaaattgcaaagaattacaacgtaccctatgaacctgactctgtggtcatggcagaagctcctcctggggtagagacagatcttattgatgttggattcacagatgatgtgaagaaaggaggccctggaagaggagggagtggtggcttcacagcaccagttggtggacctgatggaacggtgccaatgcccatgcccatgcccatgcctatgccatctgcaaatacgcctttctcatatccactgccaaagggaccatcagatttcaatggactgccaatggggacttatcaggcctttcccaatattcatccacctcagataccagcaactcccccatcgtatgaatctgtagatgacattaatgctgataagaatatctcttctgcacagattgttggtcctggacccaagccagaagcctctgcaaagcttccttccagacctgcagataactatgacaactttgtcctaccagagttgccatctgtgccagacacactaccaactgcatctgctggtgccagcacctcagcatctgaagacattgactttgatgatctttcccggaggtttgaagagctgaaaaagaaaacataggtctcttaaaccaggcaactttcacgttttgggagttgagactgagcaatttctccttgtaacaaagaatctccatgaaattctgtttcatctgttaaccgtcactcagcacaacactccctctgggctctcttcctgctcctccagattctgctgctttccagttctctgttgatcctgagactaacaattggagactgaggccagagcaactggctcctggcagctgtgcttgtccgtttcctgtcagagtgatcccaggtttcctcctggcccgtcccatggtccctccacaggagtgtgagaggatgggggaagcactgtgggaagaccaccaaagatggctggacagtgggagagagcacgttgtgaagcatcccagcctcgtgttgaggttccagacttagaaacagacccctctgtacagggggattgtggtgagtgagaatcaaggccaccttgtgtgttttctcactctcgaatgcaagtgggagagggaaaatgactcgggacgccattgtaacggttcctggaagctgggccctctcattggcatatacagtactcctcgctgcagggcactgtcccaccgggatccagttgcaaagtttgtcttgacagttgaaggcctcgcttagttgtactggattctcagggagccctctgtggccttttgctttgcgtgctgtttcccttgtaccagagggcggcaccgtggaaattctgttttccctgtagcatattgtgttggattgcattactggcagagaaaggacaaggtgccattcaagtcctagggtgggcttccagctgccttaatagaagtactcaagtcttttgggtagtgagctggaaagcctacaggaaaagaggggtacctgttttcatttgaaaactttgattcatggaacctttaaaactaatctcagaaaaatttttggtgcccatgcagctgtagttgttcactgctttcctggatggatgggactcttatgtcataacttctgttactcctttggcccatagctaaggtcatccttccccacaggggtggctttgggattggatgatacagcttttgcttctgtgtagtatacctgtacatacttgtttcaggcagcctttctttaatgttttcagttggtttgtattctgtagctcagtagctgctaataaagttaaagatcctgtgtcctgctttc

SEQ ID NO: 10344 - protein, 366 aa, Homo sapiens
MLGSGFKAERLRVNLRLVINRLKLLEKKKTELAQKARKEIADYLAAGKDERARIRVEHIIREDYLVEAMEILELYCDLLLARFGLIQSMKELDSGLAESVSTLIWAAPRLQSEVAELKIVADQLCAKYSKEYGKLCRTNQIGTVNDRLMHKLSVEAPPKILVERYLIEIAKNYNVPYEPDSVVMAEAPPGVETDLIDVGFTDDVKKGGPGRGGSGGFTAPVGGPDGTVPMPMPMPMPMPSANTPFSYPLPKGPSDFNGLPMGTYQAFPNIHPPQIPATPPSYESVDDINADKNISSAQIVGPGPKPEASAKLPSRPADNYDNFVLPELPSVPDTLPTASAGASTSASEDIDFDDLSRRFEELKKKT

SEQ ID NO: 10345 - DNA, 2328 bp, Homo sapiens
ctgtggctggcctccccgcgcccagagcgaaattaagggcatgcccccagcagctgactcagtcggcgtggcgcttcccccaacgtctgccgtgcccccgccgcgggaagtagtccccggccgcgccgactccaaaggaaaccgagggagggtgccccgagtcagcgcgtgggtcccggcagcggcgatcgcgcagccaatccctggaaaggagggcgtggctatatcggccccgtggatccctccgcccgcgcttgttgtgctgaggccgagggagtcgccattttggatggtgaaccctgaagtcggtgtctgctgcgttcacggcaggattcggttaggaggaacagcacagcatgctgggctctggatttaaagctgagcgcttaagagtgaatttgagattagtcataaatcgccttaaactattggagaaaaagaaaacggaactggcccagaaagcaaggaaggagattgctgactatctggctgctgggaaagatgaacgagctcggatccgtgtggagcacattatccgggaagactacctcgtggaggccatggagatcctggagctgtactgtgacctgctgctggctcggtttggccttatccagtctatgaaggaactagattctggtctggctgaatctgtgtctacattgatctgggctgctcctcgactccagtcagaagtggctgagttgaaaatagttgctgatcagctctgtgccaagtatagcaaggaatatggcaagctatgtaggaccaaccagattggaactgtgaatgacaggctaatgcacaagctgagtgtggaagccccacccaaaatcctggtggagagatacctgattgaaattgcaaagaattacaacgtaccctatgaacctgactctgtggtcatggcagaagctcctcctggggtcctggacccaagccagaagcctctgcaaagcttccttccagacctgcagataactatgacaactttgtcctaccagagttgccatctgtgccagacacactaccaactgcatctgctggtgccagcacctcagcatctgaagacattgactttgatgatctttcccggaggtttgaagagctgaaaaagaaaacataggtctcttaaaccaggcaactttcacgttttgggagttgagactgagcaatttctccttgtaacaaagaatctccatgaaattctgtttcatctgttaaccgtcactcagcacaacactccctctgggctctcttcctgctcctccagattctgctgctttccagttctctgttgatcctgagactaacaattggagactgaggccagagcaactggctcctggcagctgtgcttgtccgtttcctgtcagagtgatcccaggtttcctcctggcccgtcccatggtccctccacaggagtgtgagaggatgggggaagcactgtgggaagaccaccaaagatggctggacagtgggagagagcacgttgtgaagcatcccagcctcgtgttgaggttccagacttagaaacagacccctctgtacagggggattgtggtgagtgagaatcaaggccaccttgtgtgttttctcactctcgaatgcaagtgggagagggaaaatgactcgggacgccattgtaacggttcctggaagctgggccctctcattggcatatacagtactcctcgctgcagggcactgtcccaccgggatccagttgcaaagtttgtcttgacagttgaaggcctcgcttagttgtactggattctcagggagccctctgtggccttttgctttgcgtgctgtttcccttgtaccagagggcggcaccgtggaaattctgttttccctgtagcatattgtgttggattgcattactggcagagaaaggacaaggtgccattcaagtcctagggtgggcttccagctgccttaatagaagtactcaagtcttttgggtagtgagctggaaagcctacaggaaaagaggggtacctgttttcatttgaaaactttgattcatggaacctttaaaactaatctcagaaaaatttttggtgcccatgcagctgtagttgttcactgctttcctggatggatgggactcttatgtcataacttctgttactcctttggcccatagctaaggtcatccttccccacaggggtggctttgggattggatgatacagcttttgcttctgtgtagtatacctgtacatacttgtttcaggcagcctttctttaatgttttcagttggtttgtattctgtagctcagtagctgctaataaagttaaagatcctgtgtcctgctttc

SEQ ID NO: 10346 - protein, 251 aa, Homo sapiens
MLGSGFKAERLRVNLRLVINRLKLLEKKKTELAQKARKEIADYLAAGKDERARIRVEHIIREDYLVEAMEILELYCDLLLARFGLIQSMKELDSGLAESVSTLIWAAPRLQSEVAELKIVADQLCAKYSKEYGKLCRTNQIGTVNDRLMHKLSVEAPPKILVERYLIEIAKNYNVPYEPDSVVMAEAPPGVLDPSQKPLQSFLPDLQITMTTLSYQSCHLCQTHYQLHLLVPAPQHLKTLTLMIFPGGLKS

SEQ ID NO: 10347 - DNA, 1988 bp, Homo sapiens
ctgaagtcggtgtctgctgcgttcacggcaggattcggttaggttgctgatcagctctgtgccaagtatagcaaggaatatggcaagctatgtaggaccaaccagattggaactgtgaatgacaggctaatgcacaagctgagtgtggaagccccacccaaaatcctggtggagagatacctgattgaaattgcaaagaattacaacgtaccctatgaacctgactctgtggtcatggcagaagctcctcctggggtagagacagatcttattgatgttggattcacagatgatgtgaagaaaggaggccctggaagaggagggagtggtggcttcacagcaccagttggtggacctgatggaacggtgccaatgcccatgcccatgcccatgcctatgccatctgcaaatacgcctttctcatatccactgccaaagggaccatcagatttcaatggactgccaatggggacttatcaggcctttcccaatattcatccacctcagataccagcaactcccccatcgtatgaatctgtagatgacattaatgctgataagaatatctcttctgcacagattgttggtcctggacccaagccagaagcctctgcaaagcttccttccagacctgcagataactatgacaactttgtcctaccagagttgccatctgtgccagacacactaccaactgcatctgctggtgccagcacctcagcatctgaagacattgactttgatgatctttcccggaggtttgaagagctgaaaaagaaaacataggtctcttaaaccaggcaactttcacgttttgggagttgagactgagcaatttctccttgtaacaaagaatctccatgaaattctgtttcatctgttaaccgtcactcagcacaacactccctctgggctctcttcctgctcctccagattctgctgctttccagttctctgttgatcctgagactaacaattggagactgaggccagagcaactggctcctggcagctgtgcttgtccgtttcctgtcagagtgatcccaggtttcctcctggcccgtcccatggtccctccacaggagtgtgagaggatgggggaagcactgtgggaagaccaccaaagatggctggacagtgggagagagcacgttgtgaagcatcccagcctcgtgttgaggttccagacttagaaacagacccctctgtacagggggattgtggtgagtgagaatcaaggccaccttgtgtgttttctcactctcgaatgcaagtgggagagggaaaatgactcgggacgccattgtaacggttcctggaagctgggccctctcattggcatatacagtactcctcgctgcagggcactgtcccaccgggatccagttgcaaagtttgtcttgacagttgaaggcctcgcttagttgtactggattctcagggagccctctgtggccttttgctttgcgtgctgtttcccttgtaccagagggcggcaccgtggaaattctgttttccctgtagcatattgtgttggattgcattactggcagagaaaggacaaggtgccattcaagtcctagggtgggcttccagctgccttaatagaagtactcaagtcttttgggtagtgagctggaaagcctacaggaaaagaggggtacctgttttcatttgaaaactttgattcatggaacctttaaaactaatctcagaaaaatttttggtgcccatgcagctgtagttgttcactgctttcctggatggatgggactcttatgtcataacttctgttactcctttggcccatagctaaggtcatccttccccacaggggtggctttgggattggatgatacagcttttgcttctgtgtagtatacctgtacatacttgtttcaggcagcctttctttaatgttttcagttggtttgtattctgtagctcagtagctgctaataaagttaaagatcctgtgtcctgctttc

SEQ ID NO: 10348 - protein, 218 aa, Homo sapiens
MHKLSVEAPPKILVERYLIEIAKNYNVPYEPDSVVMAEAPPGVETDLIDVGFTDDVKKGGPGRGGSGGFTAPVGGPDGTVPMPMPMPMPMPSANTPFSYPLPKGPSDFNGLPMGTYQAFPNIHPPQIPATPPSYESVDDINADKNISSAQIVGPGPKPEASAKLPSRPADNYDNFVLPELPSVPDTLPTASAGASTSASEDIDFDDLSRRFEELKKKT

SEQ ID NO: 10349 - DNA, 366 bp, Homo sapiens
ttctaggaggaacagcacagcatgctgggctctggatttaaagctgagcgcttaagagtgaatttgagattagtcataaatcgcctttaaaactaatctcagaaaaatttttggtgcccatgcagctgtagttgttcactgctttcctggatggatgggactcttatgtcataacttctgttactcctttggcccatagctaaggtcatccttccccacaggggtggctttgggattggatgatacagcttttgcttctgtgtagtatacctgtacatacttgtttcaggcagcctttctttaatgttttcagttggtttgtattctgtagctcagtagctgctaataaagttaaagatcctgtgt

SEQ ID NO: 10350 - protein, 41 aa, Homo sapiens
MIQLLLLCSIPVHTCFRQPFFNVFSWFVFCSSVAANKVKDP

SEQ ID NO: 10351 - DNA, 2514 bp, Homo sapiens
ttctgccctttgtgacttttagactgagtaccttttttgcagagaaagggacatactctgttgttgtggcattaggtcacctgactcttgagttggaaatgtcaagccacatgagctatattttctcacctagacagagtagcaaattctacagtagaggggatgggattagatttgctaaaggagaggagctaggatatagtagaaacacccagttcttcctgttggggggagattggcctgtaggccagatgcaagtgctctactgctgtgagatcggagtgggatttgtgtcttagcggaactggcccagaaagcaaggaaggagattgctgactatctggctgctgggaaagatgaacgagctcggatccgtgtggagcacattatccgggaagactacctcgtggaggccatggagatcctggagctgtactgtgacctgctgctggctcggtttggccttatccagtctatgaaggaactagattctggtctggctgaatctgtgtctacattgatctgggctgctcctcgactccagtcagaagtggctgagttgaaaatagttgctgatcagctctgtgccaagtatagcaaggaatatggcaagctatgtaggaccaaccagattggaactgtgaatgacaggctaatgcacaagctgagtgtggaagccccacccaaaatcctggtggagagatacctgattgaaattgcaaagaattacaacgtaccctatgaacctgactctgtggtcatggcagaagctcctcctggggtagagacagatcttattgatgttggattcacagatgatgtgaagaaaggaggccctggaagaggagggagtggtggcttcacagcaccagttggtggacctgatggaacggtgccaatgcccatgcccatgcccatgcctatgccatctgcaaatacgcctttctcatatccactgccaaagggaccatcagatttcaatggactgccaatggggacttatcaggcctttcccaatattcatccacctcagataccagcaactcccccatcgtatgaatctgtagatgacattaatgctgataagaatatctcttctgcacagattgttggtcctggacccaagccagaagcctctgcaaagcttccttccagacctgcagataactatgacaactttgtcctaccagagttgccatctgtgccagacacactaccaactgcatctgctggtgccagcacctcagcatctgaagacattgactttgatgatctttcccggaggtttgaagagctgaaaaagaaaacataggtctcttaaaccaggcaactttcacgttttgggagttgagactgagcaatttctccttgtaacaaagaatctccatgaaattctgtttcatctgttaaccgtcactcagcacaacactccctctgggctctcttcctgctcctccagattctgctgctttccagttctctgttgatcctgagactaacaattggagactgaggccagagcaactggctcctggcagctgtgcttgtccgtttcctgtcagagtgatcccaggtttcctcctggcccgtcccatggtccctccacaggagtgtgagaggatgggggaagcactgtgggaagaccaccaaagatggctggacagtgggagagagcacgttgtgaagcatcccagcctcgtgttgaggttccagacttagaaacagacccctctgtacagggggattgtggtgagtgagaatcaaggccaccttgtgtgttttctcactctcgaatgcaagtgggagagggaaaatgactcgggacgccattgtaacggttcctggaagctgggccctctcattggcatatacagtactcctcgctgcagggcactgtcccaccgggatccagttgcaaagtttgtcttgacagttgaaggcctcgcttagttgtactggattctcagggagccctctgtggccttttgctttgcgtgctgtttcccttgtaccagagggcggcaccgtggaaattctgttttccctgtagcatattgtgttggattgcattactggcagagaaaggacaaggtgccattcaagtcctagggtgggcttccagctgccttaatagaagtactcaagtcttttgggtagtgagctggaaagcctacaggaaaagaggggtacctgttttcatttgaaaactttgattcatggaacctttaaaactaatctcagaaaaatttttggtgcccatgcagctgtagttgttcactgctttcctggatggatgggactcttatgtcataacttctgttactcctttggcccatagctaaggtcatccttccccacaggggtggctttgggattggatgatacagcttttgcttctgtgtagtatacctgtacatacttgtttcaggcagcctttctttaatgttttcagttggtttgtattctgtagctcagtagctgctaataaagttaaagatcctgtgtcctgctttc

SEQ ID NO: 10352 - protein, 298 aa, Homo sapiens
MEILELYCDLLLARFGLIQSMKELDSGLAESVSTLIWAAPRLQSEVAELKIVADQLCAKYSKEYGKLCRTNQIGTVNDRLMHKLSVEAPPKILVERYLIEIAKNYNVPYEPDSVVMAEAPPGVETDLIDVGFTDDVKKGGPGRGGSGGFTAPVGGPDGTVPMPMPMPMPMPSANTPFSYPLPKGPSDFNGLPMGTYQAFPNIHPPQIPATPPSYESVDDINADKNISSAQIVGPGPKPEASAKLPSRPADNYDNFVLPELPSVPDTLPTASAGASTSASEDIDFDDLSRRFEELKKKT

SEQ ID NO: 10353 - DNA, 2465 bp, Homo sapiens
ttctgccctttgtgacttttagactgagtaccttttttgcagagaaagggacatactctgttgttgtggcattaggtcacctgactcttgagttggaaatgtcaagccacatgagctatattttctcacctagacagagtagcaaattctacagtagaggggatgggattagatttgctaaaggagaggagctaggatatagtagaaacacccagttcttcctgttggggggagattggcctgtaggccagatgcaagtgctctactgctgtgagatcggagtgggatttgtgtcttagcggaactggcccagaaagcaaggaaggagattgctgactatctggctgctgggaaagatgaacgagctcggatccgtgtggagcacattatccgggaagactacctcgtggaggccatggagatcctggagctgtactgtgacctgctgctggctcggtttggccttatccagtctatgaaggaactagattctggtctggctgaatctgtgtctacattgatctgggctgctcctcgactccagtcagaagtggctgagttgaaaatagttgctgatcagctctgtgccaagtatagcaaggaatatggcaagctatgtaggaccaaccagattggaactgtgaatgacaggctaatgcacaagctgagtgtggaagccccacccaaaatcctggtggagagatacctgattgaaattgcaaagaattacaacgtaccctatgaacctgactctgtggtcatggcagaagctcctcctggggtagagacagatcttattgatgttggattcacagatgatgtgaagaaaggaggccctggaagaggagggagtggtggcttcacagcaccagttggtggacctgatggaacggtgccaatgcccatgcccatgcccatgcctatgccatctgcaaatacgcctttctcatatccactgccaaagggaccatcagatttcaatggactgccaatggggacttatcaggcctttcccaatattcatccacctcagataccagcaactcccccatcgtatgaatctgtcctggacccaagccagaagcctctgcaaagcttccttccagacctgcagataactatgacaactttgtcctaccagagttgccatctgtgccagacacactaccaactgcatctgctggtgccagcacctcagcatctgaagacattgactttgatgatctttcccggaggtttgaagagctgaaaaagaaaacataggtctcttaaaccaggcaactttcacgttttgggagttgagactgagcaatttctccttgtaacaaagaatctccatgaaattctgtttcatctgttaaccgtcactcagcacaacactccctctgggctctcttcctgctcctccagattctgctgctttccagttctctgttgatcctgagactaacaattggagactgaggccagagcaactggctcctggcagctgtgcttgtccgtttcctgtcagagtgatcccaggtttcctcctggcccgtcccatggtccctccacaggagtgtgagaggatgggggaagcactgtgggaagaccaccaaagatggctggacagtgggagagagcacgttgtgaagcatcccagcctcgtgttgaggttccagacttagaaacagacccctctgtacagggggattgtggtgagtgagaatcaaggccaccttgtgtgttttctcactctcgaatgcaagtgggagagggaaaatgactcgggacgccattgtaacggttcctggaagctgggccctctcattggcatatacagtactcctcgctgcagggcactgtcccaccgggatccagttgcaaagtttgtcttgacagttgaaggcctcgcttagttgtactggattctcagggagccctctgtggccttttgctttgcgtgctgtttcccttgtaccagagggcggcaccgtggaaattctgttttccctgtagcatattgtgttggattgcattactggcagagaaaggacaaggtgccattcaagtcctagggtgggcttccagctgccttaatagaagtactcaagtcttttgggtagtgagctggaaagcctacaggaaaagaggggtacctgttttcatttgaaaactttgattcatggaacctttaaaactaatctcagaaaaatttttggtgcccatgcagctgtagttgttcactgctttcctggatggatgggactcttatgtcataacttctgttactcctttggcccatagctaaggtcatccttccccacaggggtggctttgggattggatgatacagcttttgcttctgtgtagtatacctgtacatacttgtttcaggcagcctttctttaatgttttcagttggtttgtattctgtagctcagtagctgctaataaagttaaagatcctgtgtcctgctttc

SEQ ID NO: 10354 - protein, 277 aa, Homo sapiens
MEILELYCDLLLARFGLIQSMKELDSGLAESVSTLIWAAPRLQSEVAELKIVADQLCAKYSKEYGKLCRTNQIGTVNDRLMHKLSVEAPPKILVERYLIEIAKNYNVPYEPDSVVMAEAPPGVETDLIDVGFTDDVKKGGPGRGGSGGFTAPVGGPDGTVPMPMPMPMPMPSANTPFSYPLPKGPSDFNGLPMGTYQAFPNIHPPQIPATPPSYESVLDPSQKPLQSFLPDLQITMTTLSYQSCHLCQTHYQLHLLVPAPQHLKTLTLMIFPGGLKS

SEQ ID NO: 10355 - DNA, 4041 bp, Homo sapiens
tcataatgaacagtgagaactctcctactgggcttctggaatgttgggaccactctggtccaatgctactgtcgtttcctgtctggaaatgagagtagcttcttgaatattcttcctattcctactttggcttcttttaatctattcacaccattccatcagaaccacctgagggttttgtccaaaacacagctccgatcctgtcacgacctcttgctttaaagcccattagtagctttctgttgctcttgtgatagaaacaaaactccctgatacagcctacatggtcctgcattgtctggctcccacttccctttttcatttcttaccacactccttggcctctgcactagaggctcactggctgattgcaggcttgagaactgaccatgtttgtttctgccagaggcctttgcactgctgttttcttttcctggaatgtgcttccttccctatttagttaactcctagtcatcctttaatttattatttgagacggtcttgatctgtcacccaggctggagtgcagtggcacgatcttgcctcactgcagcctcggcttcctgggctcaactgatcatcctcccacctcacctcccaaagtgctgagattacaggcatgagccaccgtgcccggccagctcagtgaattttgtaaagcaatcatgttcatgtagctaccactcaattaaaaaagtactggccaggtgtggtgattcacatttgtaatccaagcactttgggaagctgaggcaggaggatcacttgaggccaggagtttgagaacagcctgggcaagatccttgtttccacaaaaaatttttaaaaaacccatctgagcttggtggtatggacttgtggtcacagctactcaagaggcgttcttagcccaggagttcaagattacagtgagtgatcattgtactccagcctgggggacaaaagtgagaccctgtcttaaaaaacaaaaattaagataatacctaccagcaaaaaccagagggaagaatacttttaaaattagaggccgggtgcggtggctcacccctgtaatcccagcaccttgggaggcctaggtgggcagatcacctgaggtcaggtgttcaagaccaggctggtcaacatggtgaaaccctgtctctactaaaaatacacaaattagctgggtgtggtggcaggcgcctgtaatcccagctactcgggaagctgaggcagaagaatctcttgaacccgggaagcggaggttgtagtgaaccaagattatgccattgcactccagcctgggcgacagagtgagactttgtctaaaaagaatataaataatattagacagttgtcttatggagatacaatttacattttaaaaaaactcatagttttttttttttttaggcagtcttgctctgtcacccaggctggaatgcagtggcgtgatctcggctcattgcaagctccacctcccgggttcacgccattctcctgcctcaacctcccaagtagctgggactacaggcatcccccaccacgcctggctaatttttttttgtatttttagtagagatggggtttcaccatgttagccaggatggtcttgatctcctgaccttgtgatctgcccacatcggcctcccaaagtgctgggattacaggcgtgagccaccacgcccggcaaacccatacattttaagtgtatacacagacaattccactctctgatcaaggtatacaacattactcttacctcaaagttcccttgttgccagtcaactctgcccttccctccagagtcagagcactattttgatttttttgtaatttagttttcctgaatctagaacttaaggaaacatacagtagatgtgtgtgggggcatgatcttaatataaaatactagatggaagactggaaatacagatcagactattataacaaaataacttggacattatattcctttaaaaaaactttgcccccaatccctaaagaatgttggttcttaaggaagcagtgtttgttctatcagaatcctattatcactccttggacttagttggtaaagtaacagaccttatgaaaaggaacagtcgattgctctgtggatgtggccccatgtatcccactttgatttcccttaaacttttttctcaccacaggaaagtaaaacaggattcaaccctaattagaaaatgtagatattaactgtcattcaaatgtttattagcctctagaattaacttttttttagccagatgcggtggctcacacctgtaatccagcactttgggaggctgaggtgtgtggatcacttgagatcagagttcaaggccaacctggtgaaaccctctctctactaaaaatacaaaaattagccaggtgtggtggcatgcgcctgtaatcccagctactcaggaggctgaggcaggagaattgcctgaacccaggaggcagaggtgcagtgagctgagatcacgccaactgcactccagcctgggtgacagagggagactgtctcaaaaaaaaaaaaaaaagtttgtgaactaaggttttctcctgtgttttgatcattttatttttactgccaaaggggatctgagtcatttctctggtatttgtaacgttgtgctccttgccctaattaggtcctggacccaagccagaagcctctgcaaagcttccttccagacctgcagataactatgacaactttgtcctaccagagttgccatctgtgccagacacactaccaactgcatctgctggtgccagcacctcagcatctgaagacattgactttgatgatctttcccggaggtttgaagagctgaaaaagaaaacataggtctcttaaaccaggcaactttcacgttttgggagttgagactgagcaatttctccttgtaacaaagaatctccatgaaattctgtttcatctgttaaccgtcactcagcacaacactccctctgggctctcttcctgctcctccagattctgctgctttccagttctctgttgatcctgagactaacaattggagactgaggccagagcaactggctcctggcagctgtgcttgtccgtttcctgtcagagtgatcccaggtttcctcctggcccgtcccatggtccctccacaggagtgtgagaggatgggggaagcactgtgggaagaccaccaaagatggctggacagtgggagagagcacgttgtgaagcatcccagcctcgtgttgaggttccagacttagaaacagacccctctgtacagggggattgtggtgagtgagaatcaaggccaccttgtgtgttttctcactctcgaatgcaagtgggagagggaaaatgactcgggacgccattgtaacggttcctggaagctgggccctctcattggcatatacagtactcctcgctgcagggcactgtcccaccgggatccagttgcaaagtttgtcttgacagttgaaggcctcgcttagttgtactggattctcagggagccctctgtggccttttgctttgcgtgctgtttcccttgtaccagagggcggcaccgtggaaattctgttttccctgtagcatattgtgttggattgcattactggcagagaaaggacaaggtgccattcaagtcctagggtgggcttccagctgccttaatagaagtactcaagtcttttgggtagtgagctggaaagcctacaggaaaagaggggtacctgttttcatttgaaaactttgattcatggaacctttaaaactaatctcagaaaaatttttggtgcccatgcagctgtagttgttcactgctttcctggatggatgggactcttatgtcataacttctgttactcctttggcccatagctaaggtcatccttccccacaggggtggctttgggattggatgatacagcttttgcttctgtgtagtatacctgtacatacttgtttcaggcagcctttctttaatgttttcagttggtttgtattctgtagctcagtagctgctaataaagttaaagatcctgtgtcctgctttc

SEQ ID NO: 10356 - protein, 70 aa, Homo sapiens [sequence omitted]

SEQ ID NO: 10357 - DNA, 511 bp, Homo sapiens
ctgaacctttttttccctcaatattacctgtaaaatgagaggagctaacttcgcatagtgaggtgaggattaggctggttggtatacatgcatcttagccctgggtctttttacttacagctaatgcacaagctgagtgtggaagccccacccaaaatcctggtggagagatacctgattgaaattgcaaagaattacaacgtaccctatgaacctgactctgtggtcatggcagaagctcctcctggggtagagacagatcttattgatgttggattcacagatgatgtgaagaaaggaggccctggaagaggagggagtggtggcttcacagcaccagttggtggacctgatggaacggtgccaatgcccatgcccatgcccatgcctatgccatctgcaaatacgcctttctcatatccactgccaaagggaccagtaagtatatataagtgtggatgtaagctttagaaaatgttatagataacaagttggctctgtgaacacactc

SEQ ID NO: 10358 - protein, 127 aa, Homo sapiens
MHLSPGSFYLQLMHKLSVEAPPKILVERYLIEIAKNYNVPYEPDSVVMAEAPPGVETDLIDVGFTDDVKKGGPGRGGSGGFTAPVGGPDGTVPMPMPMPMPMPSANTPFSYPLPKGPVSIYKCGCKL

SEQ ID NO: 10359 - DNA, 2158 bp, Homo sapiens
ctgttctttcctttggttcccatctgtagctgatgtgttctaccttgggcctgagtttttcttatgctttggttttgcatgcgtcacataacccacagccgttggtaggaatgaggtcgaaaatcttcatcagtatttgaggacttggttcttaagatatattcaagaatgctttccctttgcccaaaggtgaaagtatcattaaagttgtcttagtatggtaaggatttttttttctctgcttggcagttaagagttcaacatggggctgggcggggtggttcacgcctgtaatcccagcactttgggaggcttaggcaggcgttcgagaccagcctgggcaacatggcgaaaccctgtctctacccaaaatacaaaaattggccaggcatagtgctgcatgcctgtggtcccagctatgcaggaggctgaggcggggcaatggctggaggccaggaagtggaggctgtggtgagccgtgattgtatcactgcactccagcctgggtgacaggagaccctgtctcaaaatcaaaggagttcaacatagtatctacctgattggaaaaaatgcaggggcagtttctttggaacaggctctgttgcatttggtgagcaacttaacttttggaaacacaggggcttacaccagtactttctccagtgacactattgctgtctcctctggtaacaatctttgtgtttcaggtagatgacattaatgctgataagaatatctcttctgcacagattgttggtcctggacccaagccagaagcctctgcaaagcttccttccagacctgcagataactatgacaactttgtcctaccagagttgccatctgtgccagacacactaccaactgcatctgctggtgccagcacctcagcatctgaagacattgactttgatgatctttcccggaggtttgaagagctgaaaaagaaaacataggtctcttaaaccaggcaactttcacgttttgggagttgagactgagcaatttctccttgtaacaaagaatctccatgaaattctgtttcatctgttaaccgtcactcagcacaacactccctctgggctctcttcctgctcctccagattctgctgctttccagttctctgttgatcctgagactaacaattggagactgaggccagagcaactggctcctggcagctgtgcttgtccgtttcctgtcagagtgatcccaggtttcctcctggcccgtcccatggtccctccacaggagtgtgagaggatgggggaagcactgtgggaagaccaccaaagatggctggacagtgggagagagcacgttgtgaagcatcccagcctcgtgttgaggttccagacttagaaacagacccctctgtacagggggattgtggtgagtgagaatcaaggccaccttgtgtgttttctcactctcgaatgcaagtgggagagggaaaatgactcgggacgccattgtaacggttcctggaagctgggccctctcattggcatatacagtactcctcgctgcagggcactgtcccaccgggatccagttgcaaagtttgtcttgacagttgaaggcctcgcttagttgtactggattctcagggagccctctgtggccttttgctttgcgtgctgtttcccttgtaccagagggcggcaccgtggaaattctgttttccctgtagcatattgtgttggattgcattactggcagagaaaggacaaggtgccattcaagtcctagggtgggcttccagctgccttaatagaagtactcaagtcttttgggtagtgagctggaaagcctacaggaaaagaggggtacctgttttcatttgaaaactttgattcatggaacctttaaaactaatctcagaaaaatttttggtgcccatgcagctgtagttgttcactgctttcctggatggatgggactcttatgtcataacttctgttactcctttggcccatagctaaggtcatccttccccacaggggtggctttgggattggatgatacagcttttgcttctgtgtagtatacctgtacatacttgtttcaggcagcctttctttaatgttttcagttggtttgtattctgtagctcagtagctgctaataaagttaaagatcctgtgtcctgctttc

SEQ ID NO: 10360 - protein, 76 aa, Homo sapiens
MTLMLIRISLLHRLLVLDPSQKPLQSFLPDLQITMTTLSYQSCHLCQTHYQLHLLVPAPQHLKTLTLMIFPGGLKS

SEQ ID NO: 10361 - DNA, 1483 bp, Homo sapiens
cctgtgttttgatcattttatttttactgccaaaggggatctgagtcatttctctggtatttgtaacgttgtgctccttgccctaattaggtcctggacccaagccagaagcctctgcaaagcttccttccagacctgcagataactatgacaactttgtcctaccagagttgccatctgtgccagacacactaccaactgcatctgctggtgccagcacctcagcatctgaagacattgactttgatgatctttcccggaggtttgaagagctgaaaaagaaaacataggtctcttaaaccaggcaactttcacgttttgggagttgagactgagcaatttctccttgtaacaaagaatctccatgaaattctgtttcatctgttaaccgtcactcagcacaacactccctctgggctctcttcctgctcctccagattctgctgctttccagttctctgttgatcctgagactaacaattggagactgaggccagagcaactggctcctggcagctgtgcttgtccgtttcctgtcagagtgatcccaggtttcctcctggcccgtcccatggtccctccacaggagtgtgagaggatgggggaagcactgtgggaagaccaccaaagatggctggacagtgggagagagcacgttgtgaagcatcccagcctcgtgttgaggttccagacttagaaacagacccctctgtacagggggattgtggtgagtgagaatcaaggccaccttgtgtgttttctcactctcgaatgcaagtgggagagggaaaatgactcgggacgccattgtaacggttcctggaagctgggccctctcattggcatatacagtactcctcgctgcagggcactgtcccaccgggatccagttgcaaagtttgtcttgacagttgaaggcctcgcttagttgtactggattctcagggagccctctgtggccttttgctttgcgtgctgtttcccttgtaccagagggcggcaccgtggaaattctgttttccctgtagcatattgtgttggattgcattactggcagagaaaggacaaggtgccattcaagtcctagggtgggcttccagctgccttaatagaagtactcaagtcttttgggtagtgagctggaaagcctacaggaaaagaggggtacctgttttcatttgaaaactttgattcatggaacctttaaaactaatctcagaaaaatttttggtgcccatgcagctgtagttgttcactgctttcctggatggatgggactcttatgtcataacttctgttactcctttggcccatagctaaggtcatccttccccacaggggtggctttgggattggatgatacagcttttgcttctgtgtagtatacctgtacatacttgtttcaggcagcctttctttaatgttttcagttggtttgtattctgtagctcagtagctgctaataaagttaaagatcctgtgt

SEQ ID NO: 10362 - protein, 42 aa, Homo sapiens
MTTLSYQSCHLCQTHYQLHLLVPAPQHLKTLTLMIFPGGLKS

SEQ ID NO: 10363 - DNA, 5195 bp, Homo sapiens
atgttcttcaaaggaggaagctggctttggttatacatcagaacaagtattattctaggaagtgagctaaacagcccagcaccacatgggcaaaataattgttaccagcttaacagatttcaatgcagctttgaggaagcacagcattactgtcatgtgcagagaggattcctagctcatatttggaacaaggaagttcaagatctcatccgggactatctggaagaaggaaagaagtggtggattgggcaaaatgtaatgccattgaaaaagcatcaagacaacaaatacccagcagacgttgcagccaacgggcccccaaagcccctcagctgcacctacctgtccagaaacttcattcggatctcatccaaaggggacaagtgcttactgaaatactatttcatttgccagactggtgactttttggacggagatgcccattatgaaagaaatggaaataattcccatttgtaccagagacacaagaagacaaaaagaggagttgcaatagcaagagacaaaatgcccccaggacctggtcatcttccaaccacatgtcactatcctcttcctgctcatctttccaagaccctgtgtcatcccatcagccagtttccttcagtactatcaagtatcacatcacaggtaacatcagccgcatctgaacccagcagccagcctctccctgtgataacacagctcaccatgcccgtgtctgtcacgcatgctgggcaatctctggcagaaacaacttcaagcccaaaggaagaaggtcatccgaataccttcacctcttatctacaagtgtcattgcagaaggcatctggtcaggtcatagatgagatagcagggaacttcagcagagcagttcatggtttgcaagctcttaacaaactacaggaagcttgtgagttcctccagaaactaacagccttaaccccaagattttctaagccagctcaggttaatctcatcaattcccttatttacctgagtgaggagttactcaggatcccatttcagaacaacaacagtctgggcttcaaagttcctccaactgtctgcccctttcattccctcaacaatgtcaccaaagctggagaaggaagttggctggaatccaagcgtcatactgagccggtagaagacatcctggaaatgtccttggtggagtttgggaatatcggggaagcatttctagagcagaaccagtctcccgagtcttcagtgactttgacctctgccaatgctactctgctgctgagcagacaaaacatatcaactttaccgctgagctcttacactctgggtcacccagcccctgtgaggctaggctttccgtcggctttagctttgaaggagctcttgaataaacatccaggagttaatgtccaaataacaggactagctttcaatcccttcaaggatttggacaacagaaacattgttggaagcattggaagtgtgttactaagcgctaatcgtaaattgctccaagtccatgatttaatggaggacattgagatcatgctctggagaaatgttagcttggaaacccatcccaccagcctcaacatgagcacacatcagcttacaatcacagtgaacgtcacttccttggagaaatccttgatagtgagcatagatcctgacagtccccttttaatgacactctacctggggttccagtatcagcctaactgcactcacttccacctgaacatcacccttccaaaggataaggtgtggcaaaaagatgaggagtacacgtgggtgctgaatccagagcatctgcagcacgggattggcacctactatataacagctgtgctgagtgagaggcaggagggtgctcagcagacacccagcttggtctcggtcatcaccgccgtcactcagtgttactactgggagatccacaaccagacatggagcagcgccggatgccaagttgggccacagagcacaattctgaggacacagtgtctctgtaaccacctgaccttctttgccagcgacttctttgtcgtgcccaggaccgtgaatgttgaagacacgatcaaactgttccttcgcgtgaccaacaatcctgttggggtgtcactgctggccagccttttaggattttatgtgatcacagttgtgtgggctcggaaaaaggatcaagcagatatgcagaaggtgaaggtcactgtcctggctgataatgaccccagcgctcaatttcactaccttattcaggtctacaccggatatcgaagaagcgctgctacaacagctaaggttgtcatcaccctctatggatcagagggacggagtgagccccatcacctctgtgacccccagaagacagtctttgaacgagggggcctggatgtcttccttctcaccacttggacctctctagggaacctgcacagccttcggctctggcatgacaattctggcgtcagtccctcctggtatgtcagccaggtaattgtctgtgacatggcagttaagaggaagtggcatttcctgtgcaattgctggctggctgtggacctcggagactgtgagcttgaccgggtcttcatcccagtttcaaagagagagctcttttcctttagacatctgttttcctccatgattgtggaaaagttcacccaggattatctgtggctttcaattgcaactcggcatccctggaaccagtttacaagggtccaacggctgtcttgctgcatgacactgctactctgcaacatggtcatcaatgttatgttctggaagataaacagcaccactgccaagagagatgagcaaatgcgtccatttgctgtggcctggtctgaactgctggtcagcatccatactgctgtcatcctcttcccaatcaatcttgtcatagggcggctcttcccgttgattgagccacaggagactctgcccctctttcctcccatccaggcctcctgcctctcagatgcttctgttgagcctctctctgccacaatggtagttgaggaattaaaggaaactgtgagattcctgctcaggagaaatacatacctactctccaagtgtgagcagccgccatggagttcttgggacattactaagctggtgaaacttttatccagcctcgtatcatctcacttggagggtcaaggctgtcatcagcagggagagcgccactgggcacgtgttgttcctgaaaaccaccatcatttctgctgttacctgcatagagttctgcagaggctgaaatctcacttaggcacgctgggtctcacccagggtcaccagtcctgtgacttcctagatgcagccagccaacttcaaaaactccaggaactcttggaaacacatattcttcccacggagcaagagccatccagggaagtcaccagttttgccatcctgagctcagaagaaggaaaaaagcccatctcaaatggcctgtccaaatggttgacttcagtctgctggctcctcttaggtttcactagcctggcttcagccttttttacagcactttatagcttggaattgagcaaagaccaagccaccagctggatgatttcaattattttatcagtgcttcagaacatcttcatcagccagccagtaaaggtggtcttcttcacattcttatactcactgatgatgagcaggatgccacggcttaacaaagagaatgaacaacaaagaggatcttggcactcttggcaaaatgttcttcgtcagtaccaggttcaagagataagaacaaccccgtctatgtagccccagctataaatagtccaactaagcacccagaaagaaccttgaaaaagaagaaactcttcaagctgactggagatattttggtacaaatcctcttccttaccctgttgatgactgcaatctactctgcaaagaactccaatagattttacctccaccaagctatctggaagacattttcgcaccagttctcggaaatcaaacttcttcaggatttctacccctgggccaatcatatccttcttcctagcctgtatggggattacagaggtaagaatgcagtcctggagcccagtcattgcaaatgtggggtacaattaattttccaaataccccgtaccaagacctatgagaaagtggacgaaggtcagctggcgttttgtgataacggccatacctgtgggcgtcccaagagcctattccctggacttcatctaaggaggttcagttacatctgttcacccaggcccatggtgctgattcccactgatgagcttcacgaaaggctgacaagcaagaatgagaatggattcagttacatcatgagaggtgctttcttcacctctttgagactggaaagcttcacttcccttcagatgtcaaagaagggctgtgtctggtctatcatctcacaagtcatctattatctactggtctgttactatgccttcatacagggttgtcagctgaaacagcagaagtggaggttcttcactgggaaaagaaacattctggacacaagtataatcctcattagcttcatcctcctggggcttgacatgaagagtatttctctacataagaaaaacatggcacgataccgcgatgaccaggacagattcatcagcttctatgaggcagtaaaagtgaactctgctgcgactcaccttgtgggcttcccggttctcctggcaactgttcagttatggaacctgctgcgtcatagccccaggctgcgggtcatcagcaggacactgagccgagcctgggacgaggtggtgggctttctgctgatcatcctaatcctgctgacaggctatgccattgcctttaacctgctgtttggatgcagcatctctgactaccggacatttttcagctcagcagtgactgttgttggtctcctgatgggaatttctcaccaagaggaggttttcgctttagacccagtcctgggcacctttctgatcctcaccagtgtcatcttgatggtacttgtggtaattaatcttttcgtttcggccattctcatggcctttggaaaagaaagaaagtcgcttaagaaagaagctgcactaatagatacactgctacagaagctctcaaatttgttaggaatcagttggccccaaaaaacctcatctgagcaagcagccacgacagcagtgggcagtgacactgaagttttagatgaactaccttaa

SEQ ID NO: 10364 - protein, 1256 aa, Homo sapiens
MFFKGGSWLWLYIRTSIILGSELNSPAPHGQNNCYQLNRFQCSFEEAQHYCHVQRGFLAHIWNKEVQDLIRDYLEEGKKWWIGQNVMPLKKHQDNKYPADVAANGPPKPLSCTYLSRNFIRISSKGDKCLLKYYFICQTGDFLDGDAHYERNGNNSHLYQRHKKTKRGVAIARDKMPPGPGHLPTTCHYPLPAHLSKTLCHPISQFPSVLSSITSQVTSAASEPSSQPLPVITQLTMPVSVTHAGQSLAETTSSPKEEGHPNTFTSYLQVSLQKASGQVIDEIAGNFSRAVHGLQALNKLQEACEFLQKLTALTPRFSKPAQVNLINSLIYLSEELLRIPFQNNNSLGFKVPPTVCPFHSLNNVTKAGEGSWLESKRHTEPVEDILEMSLVEFGNIGEAFLEQNQSPESSVTLTSANATLLLSRQNISTLPLSSYTLGHPAPVRLGFPSALALKELLNKHPGVNVQITGLAFNPFKDLDNRNIVGSIGSVLLSANRKLLQVHDLMEDIEIMLWRNVSLETHPTSLNMSTHQLTITVNVTSLEKSLIVSIDPDSPLLMTLYLGFQYQPNCTHFHLNITLPKDKVWQKDEEYTWVLNPEHLQHGIGTYYITAVLSERQEGAQQTPSLVSVITAVTQCYYWEIHNQTWSSAGCQVGPQSTILRTQCLCNHLTFFASDFFVVPRTVNVEDTIKLFLRVTNNPVGVSLLASLLGFYVITVVWARKKDQADMQKVKVTVLADNDPSAQFHYLIQVYTGYRRSAATTAKVVITLYGSEGRSEPHHLCDPQKTVFERGGLDVFLLTTWTSLGNLHSLRLWHDNSGVSPSWYVSQVIVCDMAVKRKWHFLCNCWLAVDLGDCELDRVFIPVSKRELFSFRHLFSSMIVEKFTQDYLWLSIATRHPWNQFTRVQRLSCCMTLLLCNMVINVMFWKINSTTAKRDEQMRPFAVAWSELLVSIHTAVILFPINLVIGRLFPLIEPQETLPLFPPIQASCLSDASVEPLSATMVVEELKETVRFLLRRNTYLLSKCEQPPWSSWDITKLVKLLSSLVSSHLEGQGCHQQGERHWARVVPENHHHFCCYLHRVLQRLKSHLGTLGLTQGHQSCDFLDAASQLQKLQELLETHILPTEQEPSREVTSFAILSSEEGKKPISNGLSKWLTSVCWLLLGFTSLASAFFTALYSLELSKDQATSWMISIILSVLQNIFISQPVKVVFFTFLYSLMMSRMPRLNKENEQQRGSWHSWQNVLRQYQVQEIRTTPSM

SEQ ID NO: 10365 - DNA, 648 bp, Homo sapiens
ggggcgggcttaatgacggaaggagcatggcgtggagacacctgaaagtatggatttaacagtcacgggctttcagtggtggaacacaggttacgggccagacagcagaagcaggccaagctcacagaagttgggcatcgatgggctgattgttacgaacaccaccgtgagtcgccctgcgggcctccagggtgccctgcgctctgaaacaggagggctgagtgggaagcccctccgggatttatcaactcaaaccattcgggagatgtatgcactcacccaaggcaagagcagggctttggcggagtcacagatgccattggagcagatcatcggaggtgaggacagcgtctgacgggaagcctgatctggaaccttcccaaggactcaggcaagcctttgtggctggatcatgagaggagggactccatcttgagccatgtcccccagccatggcatggctgcactgtaaacgccaatcggggggtcaccaggatcaaccgcaggctttcttcagtcccttggtcagaccataaactgcatttttgattctttgtggattcaaaccctaggatccatcagtcttgcaaggacattgaatattaggaggaaaaagtcatggaaaaaataaagccatttagaacctgg

SEQ ID NO: 10366 - protein, 101 aa, Homo sapiens
MDLTVTGFQWWNTGYGPDSRSRPSSQKLGIDGLIVTNTTVSRPAGLQGALRSETGGLSGKPLRDLSTQTIREMYALTQGKSRALAESQMPLEQIIGGEDSV

SEQ ID NO: 10367 - DNA, 1559 bp, Homo sapiens
ggggcgggcttaatgacggaaggagcatggcgtggagacacctgaaagtatggatttaacagtcacgggctttcagtggtggaacacaggttacgggccagacagcagaagcaggccaagctcacagaagttgggcatcgatgggctgattgttacgaacaccaccgtgagtcgccctgcgggcctccagggtgccctgcgctctgaaacaggagggctgagtgggaagcccctccgggatttatcaactcaaaccattcgggagatgtatgcactcacccaaggcaagagcagggctttggcggagtcacagatgccattggagcagatcatcggaggtgaggacagcgtctgacgggaagcctgatctggaaccttcccaaggactcaggcaagcctttgtggctggatcatgagaggagggactccatcttgagccatgtcccccagccatggcatggctgcactgtaaacgccaatcggggggtcaccaggatcaaccgcaggctttcttcagtcccttggtcagaccataaactgcatttttgattctttgtggattcaaaccctaggatccatcagtcttgcaaggacattgaatattaggaggaaaaagtcatggaaaaaataaagccatttagaacctgggtttcaacgctagccctttctggtttgccataggccctgccaagatactgcaggtccatccaggcctctgctatctgcatctgcagtgggcttcccaggaacttgactgtctttcatttgatctttatttttgtttatttaatattttaaactttattttaaaaatatttcaaacataagggcggggtgtggtggctcatgcctgtaatcccagcactttgggaggccgaggcgggcggatcacctgaggccaggagttggagaccagccaggccaccatggtgaaaccctgtctctaccaaaaatacaaaaaattagccagatattgtggcaggcacttttaatcccagctactcgggaggctgaggcaggagaattgcttgaacctgggaggcggaggttgcagtgagccaagattgcaccagtgcactccagcttgggcgacagatcaagactctgtcacacacaaaacaaacaaacaaattttcccgtttctctctgtccctttctctataacatggataaaatattcacgtcttatgtatttattattgctgagtcattggtgccttattcttcagtgtttcagtctgtatctcctaagcatcctgatgttagttttttgactataaaattgacctgcattctttactagcaattcaaacggtacagcactcttgaagtgtaaacattcctgttcctcctcaccccactctgcagacatgcctttctgtctgtcctcccagacttttcccctgcataaagatgttcattttgtacatacactcagacatacatgtggctgtattttttgtataccgatttctggatggaatgcacactgttatctgtttagttactttatgttttcatacaaatgacatcatcccacaaatagaattctgccattt

SEQ ID NO: 10368 - protein, 101 aa, Homo sapiens; identical to SEQ ID NO: 10366

SEQ ID NO: 10369 - DNA, 2425 bp, Homo sapiens
gggcttaatgacggaaggagcatggcgtggagacacctgaaaaagcgggcccaggatgctgtgatcatcctggggggaggaggacttctcttcgcctcctacctgatggccacgggagatgagcgtttctatgctgaacacctgatgccgactctgcaggggctgctggacccggagtcagcccacagactggctgttcgcttcacctccctggggctccttccacgggccagatttcaagactctgacatgctggaagtgagagttctgggccataaattccgaaatccagtaggaattgctgcaggatttgacaagcatggggaagccgtggacggactttataagatgggctttggttttgttgagataggaagtgtgactccaaaacctcaggaaggaaaccctagacccagagtcttccgcctccctgaggaccaagctgtcattaacaggtatggatttaacagtcacgggctttcagtggtggaacacaggttacgggccagacagcagaagcaggccaagctcacagaagatggactgcctctgggggtcaacttggggaagaacaagacctcagtggacgccgcggaggactacgcagaaggggtgcgcgtactgggccccctggccgactacctggtggtgaatgtgtccagccccaacactgccgggctgcggagccttcagggaaaggccgagctgcgccgcctgctgaccaaggtgctgcaggagagggatggcttgcggagagtgcacaggccggcagtcctggtgaagatcgctcctgacctcaccagccaggataaggaggacattgccagtgtggtcaaagagttgggcatcgatgggctgattgttacgaacaccaccgtgagtcgccctgcgggcctccagggtgccctgcgctctgaaacaggagggctgagtgggaagcccctccgggatttatcaactcaaaccattcgggagatgtatgcactcacccaaggcaagttcccataattggggttggtggtgtgagcagcgggcaggacgcgctggagaagatccgggcaggggcctccctggtgcagctgtacacggccctcaccttctgggggccacccgttgtgggcaaagtcaagcgggaactggaggcccttctgaaagagcagggctttggcggagtcacagatgccattggagcagatcatcggaggtgaggacagcgtctgacgggaagcctgatctggaaccttcccaaggactcaggcaagcctttgtggctggatcatgagaggagggactccatcttgagccatgtcccccagccatggcatggctgcactgtaaacgccaatcggggggtcaccaggatcaaccgcaggctttcttcagtcccttggtcagaccataaactgcatttttgattctttgtggattcaaaccctaggatccatcagtcttgcaaggacattgaatattaggaggaaaaagtcatggaaaaaataaagccatttagaacctgggtttcaacgctagccctttctggtttgccataggccctgccaagatactgcaggtccatccaggcctctgctatctgcatctgcagtgggcttcccaggaacttgactgtctttcatttgatctttatttttgtttatttaatattttaaactttattttaaaaatatttcaaacataagggcggggtgtggtggctcatgcctgtaatcccagcactttgggaggccgaggcgggcggatcacctgaggccaggagttggagaccagccaggccaccatggtgaaaccctgtctctaccaaaaatacaaaaaattagccagatattgtggcaggcacttttaatcccagctactcgggaggctgaggcaggagaattgcttgaacctgggaggcggaggttgcagtgagccaagattgcaccagtgcactccagcttgggcgacagatcaagactctgtcacacacaaaacaaacaaacaaattttcccgtttctctctgtccctttctctataacatggataaaatattcacgtcttatgtatttattattgctgagtcattggtgccttattcttcagtgtttcagtctgtatctcctaagcatcctgatgttagttttttgactataaaattgacctgcattctttactagcaattcaaacggtacagcactcttgaagtgtaaacattcctgttcctcctcaccccactctgcagacatgcctttctgtctgtcctcccagacttttcccctgcataaagatgttcattttgtacatacactcagacatacatgtggctgtattttttgtataccgatttctggatggaatgcacactgttatctgtttagttactttatgttttcatacaaatgacatcatcccacaaatagaattctgccattt

SEQ ID NO: 10370 - protein, 328 aa, Homo sapiens
MAWRHLKKRAQDAVIILGGGGLLFASYLMATGDERFYAEHLMPTLQGLLDPESAHRLAVRFTSLGLLPRARFQDSDMLEVRVLGHKFRNPVGIAAGFDKHGEAVDGLYKMGFGFVEIGSVTPKPQEGNPRPRVFRLPEDQAVINRYGFNSHGLSVVEHRLRARQQKQAKLTEDGLPLGVNLGKNKTSVDAAEDYAEGVRVLGPLADYLVVNVSSPNTAGLRSLQGKAELRRLLTKVLQERDGLRRVHRPAVLVKIAPDLTSQDKEDIASVVKELGIDGLIVTNTTVSRPAGLQGALRSETGGLSGKPLRDLSTQTIREMYALTQGKFP

SEQ ID NO: 10371 - DNA, 2713 bp, Homo sapiens
gaccagggaccggggagggcgagaacggagagtcaggccgggcgaggcatggaccgaaggcggctccgggagtgtgggcccccctgggacgtgtgcgtgtttccggggtctcctgcaaatgctcgtgcgtgtgcatttgcacgtggactcggtcaggcgtgtgcagacagcgcctgcaggtctgggtgggtgctgatctgagtgtctgcgcctgggccatgtttttgagcctggcacaggggtgcttagtgaacacatgaccgcctagcgttgtgtgccggatccaacggggaatgaaactagagtaggacatgctcccaacccttttagaagcgggcccaggatgctgtgatcatcctggggggaggaggacttctcttcgcctcctacctgatggccacgggagatgagcgtttctatgctgaacacctgatgccgactctgcaggggctgctggacccggagtcagcccacagactggctgttcgcttcacctccctggggctccttccacgggccagatttcaagactctgacatgctggaagtgagagttctgggccataaattccgaaatccagtaggaattgctgcaggatttgacaagcatggggaagccgtggacggactttataagatgggctttggttttgttgagataggaagtgtgactccaaaacctcaggaaggaaaccctagacccagagtcttccgcctccctgaggaccaagctgtcattaacaggtatggatttaacagtcacgggctttcagtggtggaacacaggttacgggccagacagcagaagcaggccaagctcacagaagatggactgcctctgggggtcaacttggggaagaacaagacctcagtggacgccgcggaggactacgcagaaggggtgcgcgtactgggccccctggccgactacctggtggtgaatgtgtccagccccaacactgccgggctgcggagccttcagggaaaggccgagctgcgccgcctgctgaccaaggtgctgcaggagagggatggcttgcggagagtgcacaggccggcagtcctggtgaagatcgctcctgacctcaccagccaggataaggaggacattgccagtgtggtcaaagagttgggcatcgatgggctgattgttacgaacaccaccgtgagtcgccctgcgggcctccagggtgccctgcgctctgaaacaggagggctgagtgggaagcccctccgggatttatcaactcaaaccattcgggagatgtatgcactcacccaaggcaagttcccataattggggttggtggtgtgagcagcgggcaggacgcgctggagaagatccgggcaggggcctccctggtgcagctgtacacggccctcaccttctgggggccacccgttgtgggcaaagtcaagcgggaactggaggcccttctgaaagagcagggctttggcggagtcacagatgccattggagcagatcatcggaggtgaggacagcgtctgacgggaagcctgatctggaaccttcccaaggactcaggcaagcctttgtggctggatcatgagaggagggactccatcttgagccatgtcccccagccatggcatggctgcactgtaaacgccaatcggggggtcaccaggatcaaccgcaggctttcttcagtcccttggtcagaccataaactgcatttttgattctttgtggattcaaaccctaggatccatcagtcttgcaaggacattgaatattaggaggaaaaagtcatggaaaaaataaagccatttagaacctgggtttcaacgctagccctttctggtttgccataggccctgccaagatactgcaggtccatccaggcctctgctatctgcatctgcagtgggcttcccaggaacttgactgtctttcatttgatctttatttttgtttatttaatattttaaactttattttaaaaatatttcaaacataagggcggggtgtggtggctcatgcctgtaatcccagcactttgggaggccgaggcgggcggatcacctgaggccaggagttggagaccagccaggccaccatggtgaaaccctgtctctaccaaaaatacaaaaaattagccagatattgtggcaggcacttttaatcccagctactcgggaggctgaggcaggagaattgcttgaacctgggaggcggaggttgcagtgagccaagattgcaccagtgcactccagcttgggcgacagatcaagactctgtcacacacaaaacaaacaaacaaattttcccgtttctctctgtccctttctctataacatggataaaatattcacgtcttatgtatttattattgctgagtcattggtgccttattcttcagtgtttcagtctgtatctcctaagcatcctgatgttagttttttgactataaaattgacctgcattctttactagcaattcaaacggtacagcactcttgaagtgtaaacattcctgttcctcctcaccccactctgcagacatgcctttctgtctgtcctcccagacttttcccctgcataaagatgttcattttgtacatacactcagacatacatgtggctgtattttttgtataccgatttctggatggaatgcacactgttatctgtttagttactttatgttttcatacaaatgacatcatcccacaaatagaattctgccattt

SEQ ID NO: 10372 - protein, 300 aa, Homo sapiens
MATGDERFYAEHLMPTLQGLLDPESAHRLAVRFTSLGLLPRARFQDSDMLEVRVLGHKFRNPVGIAAGFDKHGEAVDGLYKMGFGFVEIGSVTPKPQEGNPRPRVFRLPEDQAVINRYGFNSHGLSVVEHRLRARQQKQAKLTEDGLPLGVNLGKNKTSVDAAEDYAEGVRVLGPLADYLVVNVSSPNTAGLRSLQGKAELRRLLTKVLQERDGLRRVHRPAVLVKIAPDLTSQDKEDIASVVKELGIDGLIVTNTTVSRPAGLQGALRSETGGLSGKPLRDLSTQTIREMYALTQGKFP

SEQ ID NO: 10373 - DNA, 447 bp, Homo sapiens
accagggaccggggagggcgagaacggagagtcaggccgggcgaggcatggaccgaaggcggctccgggagtgtgggcccccctgggacgtgtgcgtgtttccggggtctcctgcaaatgctcgtgcgtgtgcatttgcacgtggactcggtcaggcgtgtgcagacagcgcctgcagaagcgggcccaggatgctgtgatcatcctggggggaggaggacttctcttcgcctcctacctgatggccacgggagatgagcgtttctatgctgaacacctgatgccgactctgcaggggctgctggacccggagtcagcccacagactggctgttcgcttcacctccctggggctccttccacgggccagatttcaagactctgacatgctggtagtgctcccagacaccctatacattaaatacaaaggcgaaggctgcagtcccct

SEQ ID NO: 10374 - protein, 50 aa, Homo sapiens
MDRRRLRECGPPWDVCVFPGSPANARACAFARGLGQACADSACRSGPRML

SEQ ID NO: 10375 - DNA, 2534 bp, Homo sapiens
agagtcaggccgggcgaggcatggaccgaaggcggctccgggagtgtgggcccccctgggacgtgtgcgtgtttccggggtctcctgcaaatgctcgtgcgtgtgcatttgcacgtggactcggtcaggcgtgtgcagacagcgcctgcagaagcgggcccaggatgctgtgatcatcctggggggaggaggacttctcttcgcctcctacctgatggccacgggagatgagcgtttctatgctgaacacctgatgccgactctgcaggggctgctggacccggagtcagcccacagactggctgttcgcttcacctccctggggctccttccacgggccagatttcaagactctgacatgctggaagtgagagttctgggccataaattccgaaatccagtaggaattgctgcaggatttgacaagcatggggaagccgtggacggactttataagatgggctttggttttgttgagataggaagtgtgactccaaaacctcaggaaggaaaccctagacccagagtcttccgcctccctgaggaccaagctgtcattaacaggtatggatttaacagtcacgggctttcagtggtggaacacaggttacgggccagacagcagaagcaggccaagctcacagaagatggactgcctctgggggtcaacttggggaagaacaagacctcagtggacgccgcggaggactacgcagaaggggtgcgcgtactgggccccctggccgactacctggtggtgaatgtgtccagccccaacactgccgggctgcggagccttcagggaaaggccgagctgcgccgcctgctgaccaaggtgctgcaggagagggatggcttgcggagagtgcacaggccggcagtcctggtgaagatcgctcctgacctcaccagccaggataaggaggacattgccagtgtggtcaaagagttgggcatcgatgggctgattgttacgaacaccaccgtgagtcgccctgcgggcctccagggtgccctgcgctctgaaacaggagggctgagtgggaagcccctccgggatttatcaactcaaaccattcgggagatgtatgcactcacccaaggcaagttcccataattggggttggtggtgtgagcagcgggcaggacgcgctggagaagatccgggcaggggcctccctggtgcagctgtacacggccctcaccttctgggggccacccgttgtgggcaaagtcaagcgggaactggaggcccttctgaaagagcagggctttggcggagtcacagatgccattggagcagatcatcggaggtgaggacagcgtctgacgggaagcctgatctggaaccttcccaaggactcaggcaagcctttgtggctggatcatgagaggagggactccatcttgagccatgtcccccagccatggcatggctgcactgtaaacgccaatcggggggtcaccaggatcaaccgcaggctttcttcagtcccttggtcagaccataaactgcatttttgattctttgtggattcaaaccctaggatccatcagtcttgcaaggacattgaatattaggaggaaaaagtcatggaaaaaataaagccatttagaacctgggtttcaacgctagccctttctggtttgccataggccctgccaagatactgcaggtccatccaggcctctgctatctgcatctgcagtgggcttcccaggaacttgactgtctttcatttgatctttatttttgtttatttaatattttaaactttattttaaaaatatttcaaacataagggcggggtgtggtggctcatgcctgtaatcccagcactttgggaggccgaggcgggcggatcacctgaggccaggagttggagaccagccaggccaccatggtgaaaccctgtctctaccaaaaatacaaaaaattagccagatattgtggcaggcacttttaatcccagctactcgggaggctgaggcaggagaattgcttgaacctgggaggcggaggttgcagtgagccaagattgcaccagtgcactccagcttgggcgacagatcaagactctgtcacacacaaaacaaacaaacaaattttcccgtttctctctgtccctttctctataacatggataaaatattcacgtcttatgtatttattattgctgagtcattggtgccttattcttcagtgtttcagtctgtatctcctaagcatcctgatgttagttttttgactataaaattgacctgcattctttactagcaattcaaacggtacagcactcttgaagtgtaaacattcctgttcctcctcaccccactctgcagacatgcctttctgtctgtcctcccagacttttcccctgcataaagatgttcattttgtacatacactcagacatacatgtggctgtattttttgtataccgatttctggatggaatgcacactgttatctgtttagttactttatgttttcatacaaatgacatcatcccacaaatagaattctgccattt

SEQ ID NO: 10376 - protein, 300 aa, Homo sapiens; identical to SEQ ID NO: 10372

SEQ ID NO: 10377 - DNA, 2602 bp, Homo sapiens
taaaaagtattaattcgctgtttttaccttcttttgcctgtaccaagtcttcaagagccagtgtgcattttacttccagcacctctccctttggaccagctgcattcccagcagccagtagccacatgcggccagcaggcttgtattggctagcacagccccagcctttagcaaacagggaaatgtaatattcaacatgcacagctgctcttagtaagagaaatccttctagactgtataaagcccttccctttgtcatccctgggcaatttttactacagcaaacccaaaaggtgaagaagtgcttactttttggtaagaggattttgaagagcctccttggggagatttcgatgggcatctttggggccactggtggcctcctgggagacggacctgtaggacatttacttggccgtgcttcctgctttcttgtgcttgtttcagggaaattctccagcattagagatcaagttattgatctttctgctgcattgcaggtggggatcaatatcttcagaattggccaggcaaaatatatttgcttaacattcagctgctacagataactgcaggtgctgggatgatggtacttggtgaatcctataggtgagcaggggtgtgagatcctgctctgagccctgtgtgtgcggcctcctggttgtgtggcatgtggtaagtgtgtagtaaacacttaatgaatgggtgaagttatgaagtcatcagatatgtgtgccagtgtgtctgttattatggatgcttttggctctaacaaagtggcttaaacaacaggcacatttgatattattttcttctcataacaggtgcaatgggcaggtccagggttggttgagcaccagggcagtgttgagactctggtccaacttctctgggcgttttctttttgcttgtcagagagcgacctcggctgcaagtattatgttcttacacggacgcccaagagcagaaaggaaaaagggcagggatgttctcagaggctcccagtaggtctcacttgtgtctcagtgtctacacttggcatacacttacgcttcccttgccagcaaggctgggaaaggagtcattagcatttttaccctgtatcagggcaggtgggtttcactggcaaagaggaagaggaaggggactggccactaggtcaaaacccacagtggggctggggatacagggatgaaagagagatgaggctcctgccttcagggagtgtctagtgacagtgacagagggatgagagaagtatgagatgttgctcaccctcaagaagattgtaacctagggaccttaagcatatatgtatgtatctatcccaagccaggagaaaggtggggccaaagctctgtatgaaggccagggggatgagggatcctttgcagctgcgagctctgtgcaggaggagagggagcgtttgctctgagctaggaagagaggtgattttcagacagaaagcctagagagatggagtggctgcaggggcttcaggaggctgtttgggagcccaggcagaaggtggcaagtgagtgtgcaattctcagagagtggctgggtaaggagtggggatccagcaggtctggggcagctgctgctgagtctgggctgtttccagtgctagctggctgagcatttgcaaattttaatctttccctgggtattggatggtgttctggcaagttctctaggagtcccagtggtgtttagaccctggaagtgtaagaactgactgtgatttttttttttctcttgtttgaaaaagtcctaagtgtatgggaagtggctatggtgccgtctcactctgcccctcccgtgtgcttgtgctctgcaggtatggatttaacagtcacgggctttcagtggtggaacacaggttacgggccagacagcagaagcaggccaagctcacagaagttgggcatcgatgggctgattgttacgaacaccaccgtgagtcgccctgcgggcctccagggtgccctgcgctctgaaacaggagggctgagtgggaagcccctccgggatttatcaactcaaaccattcgggagatgtatgcactcacccaaggcaagttcccataattggggttggtggtgtgagcagcgggcaggacgcgctggagaagatccgggcaggggcctccctggtgcagctgtacacggccctcaccttctgggggccacccgttgtgggcaaagtcaagcgggaactggaggcccttctgaaagagcagggctttggcggagtcacagatgccattggagcagatcatcggaggtgaggacagcgtctgacgggaagcctgatctggaaccttcccaaggactcaggcaagcctttgtggctggatcatgagaggagggactccatcttgagccatgtcccccagccatggcatggctgcactgtaaacgccaatcggggggtcaccaggatcaaccgcaggctttcttcagtcccttggtcagaccataaactgcatttttgattctttgtggattcaaaccctaggatccatcagtcttgcaaggacattgaatattaggaggaaaaagtcatggaaaaaataaagccatttagaacctgggtttc

SEQ ID NO: 10378 - protein, 100 aa, Homo sapiens
MHSPKASSHNWGWWCEQRAGRAGEDPGRGLPGAAVHGPHLLGATRCGQSQAGTGGPSERAGLWRSHRCHWSRSSEVRTASDGKPDLEPSQGLRQAFVAGS

SEQ ID NO: 10379 - DNA, 435 bp, Homo sapiens
gcagtgcagctgtgacctacgctgcaggtcagtgggtttccacaatagcgatcaaactaaagcagaaacaatttcttttcaggaaagccagccctcagacgtgaggaccaccatgcccggccaaatgttttcaattatcatgcctaaaatgtagaggtgtaattgttttctaacttataattttagttctctgaggaaagggactctccctcatataataactgagggtaccctgtatcttaggtgctccctggacaacctgattactcccctagcctgggcatcattgttaacacctgcccctttttactctcaagagggtctcagtttacatgtaagcaattaggtcagcttacttaaaaatccacaggactatcaatggacttgcattttggacctccagaaaaaatacattttcagaaacacactatgtgt

SEQ ID NO: 10380 - protein, 63 aa, Homo sapiens
RCNCFLTYNFSSLRKGTLPHIITEGTLYLRCSLDNLITPLAWASLLTPAPFYSQEGLSLHVSN

SEQ ID NO: 10381 - DNA, 252 bp, Homo sapiens
aggtgaggacagcgtctgacgggaagcctgatctggaaccttcccaaggactcaggcaagcctttgtggctggatcatgagaggagggactccatcttgagccatgtcccccagccatggcatggctgcactgtaaacgccaatcggggggtcaccaggatcaaccgcaggctttcttcagtcccttggtcagaccataaactgcatttttgattctttgtggattcaaaccctaggatccatcagcctctg

SEQ ID NO: 10382 - protein, 37 aa, Homo sapiens
TPIGGSPGSTAGFLQSLGQTINCIFDSLWIQTLGSIS

SEQ ID NO: 10383 - DNA, 2977 bp, Homo sapiens
aggactcaggcaagcctttgtggctggatcatgagaggagggactccatcttgagccatgtcccccagccatggcatggctgcactgtaaacgccaatcggggggtcaccaggatcaaccgcaggctttcttcagtcccttggtcagaccataaactgcatttttgattctttgtggattcaaaccctaggatccatcagtcttgcaaggacattgaatattaggaggaaaaagtcatggaaaaaataaagccatttagaacctgggtttcaacgctagccctttctggtttgccataggccctgccaagatactgcaggtccatccaggcctctgctatctgcatctgcagtgggcttcccaggaacttgactgtctttcatttgatctttatttttgtttatttaatattttaaactttattttaaaaatatttcaaacataagggcggggtgtggtggctcatgcctgtaatcccagcactttgggaggccgaggcgggcggatcacctgaggccaggagttggagaccagccaggccaccatggtgaaaccctgtctctaccaaaaatacaaaaaattagccagatattgtggcaggcacttttaatcccagctactcgggaggctgaggcaggagaattgcttgaacctgggaggcggaggttgcagtgagccaagattgcaccagtgcactccagcttgggcgacagatcaagactctgtcacacacaaaacaaacaaacaaattttcccgtttctctctgtccctttctctataacatggataaaatattcacgtcttatgtatttattattgctgagtcattggtgccttattcttcagtgtttcagtctgtatctcctaagcatcctgatgttagttttttgactataaaattgacctgcattctttactagcaattcaaacggtacagcactcttgaagtgtaaacattcctgttcctcctcaccccactctgcagacatgcctttctgtctgtcctcccagacttttcccctgcataaagatgttcattttgtacatacactcagacatacatgtggctgtattttttgtataccgatttctggatggaatgcacactgttatctgtttagttactttatgttttcatacaaatgacatcatcccacaaatagaattctgccatttactttcttcactattcttatgtggcatggttcatgctgggcctcggtcttttgagtggggtctgtttacccagtcccctgttggtgatcacatcgctaacttccggcgttttcctatcaccatcggtgcctccgtgaacaccttgtgaatgtgcctgtgccttcgttctggtgtcggtgcagagcagggtccaaggggcgtgacagtgggctcgagcccagcggtgtggtcatagagcatgttgtgctgaatggctctgccatggaccaagccttggctgctctaaaagccggctcattgccttctgcttctccggattcgttccttactccaggaagagcagtgcactgaaggagaaatgggaatgggcaaaaggaaccacatgctggccagacccctgcggggtcactttcctcagcctgggctccgacatgccacgtcaggtgccagcgcacatactctggacaccctcctcattctctctgggctttgatgctctctgtgagtcatctgccctccctttcccatgctacaggcatctaccttgctctgtcccacctaatagcttcaggactgaacaattcaggaaagggaagggaaggggtggaggagaagagggaagagtcggcccttggaaggttctccacggaagactgccttttttttttttgagatggagtctcgctgtgtcgcccagcctggagtgcagtggcatgatctcagctcactgcaaactccgcctcctgggttcaggggattcttcagcctcagcctccagagtagctgggactacaggtgcatgccactgtgccctgctaatttttgtatttttagtagagacggggtttcaccatattggccaggctggtctcgaactcctgacctcttggtccacccgcctcagcctcccaaagtgctgggattacaggtgcaagccaccgcgcctggctcgagagactgacattctgtctcagcacagctggaagaggctgcttgagcaccaggataaggagttgtcttgcattcaggggccatgtggtgtgcggatacctatttttctttcttttcttttttttttctgagacagagtctcgctctgtctcccaggctagagtgcagtggcatgatctcagctcactgcaacctctgtctcccgggttcaagcaattcttctgcctcagcctcccaagtagctgggattacaggtgcccactaccacacccagctaatttgtgtgtgtgtgtgtgtgtgtgtgtgtgtgtgtgtgtgtgtgtgtgtgtgtttttgagatggagtcctgctctgtcaccccggctggagtgcagtggtgcgatctcagctcactgcaagctccgcctcccgggttcacactattctcctgcctcagcctcccgagtagctgggactacaggcgcctgccaccatgcctggctagtttttttgtattttaagtagagacagggtttcaccgtgttagccaggatggttcgatctcctgacctcatgatctggccgcctcagtctcccaaagtgctgagattacaggtgtgagccaccgcacccggcccaaggatacctatttttcttaatgctggaagccacactcagacaccagagcagctctcaatgctgggaatcctgggagactgatgatgaccgcgtctccctctgggaccaaggatggtggaagggtgtgcagaattccaaatgttatttacatcactcactcttgtgtggagtgcataattgtctttgcttgccaatttcatatcagttaaatataagcagtaagctaatcct

SEQ ID NO: 10384 - protein, 216 aa, Homo sapiens
MPRQVPAHILWTPSSFSLGFDALCESSALPFPCYRHLPCSVPPNSFRTEQFRKGKGRGGGEEGRVGPWKVLHGRLPFFFLRWSLAVSPSLECSGMISAHCKLRLLGSGDSSASASRVAGTTGACHCALLIFVFLVETGFHHIGQAGLELLTSWSTRLSLPKCWDYRCKPPRLARETDILSQHSWKRLLEHQDKELSCIQGPCGVRIPIFLSFLFFF

SEQ ID NO: 10385 - DNA, 1087 bp, Homo sapiens
agatgccccacagcactgctcttccagaggcaagaccaaccaagatgagtgccctgggagctgtcattgccctcctgctctggggacagctttttgcagtggactcaggcaatgatgtcacggatatcgcagatgacggctgcccgaagccccccgagattgcacatggctatgtggagcactcggttcgctaccagtgtaagaactactacaaactgcgcacagaaggagatggagtatacaccttaaatgataagaagcagtggataaataaggctgttggagataaacttcctgaatgtgaagcagatgacggctgcccgaagccccccgagattgcacatggctatgtggagcactcggttcgctaccagtgtaagaactactacaaactgcgcacagaaggagatggagtgtacaccttaaacaatgagaagcagtggataaataaggctgttggagataaacttcctgaatgtgaagcaggtgggtgctgagcacttaagagagcaggcaggcgtccagcggggaacgtcctagaggcacagccttccagtgcggcttcctctgagcacacaagagccaggaggagggatgtgggagaaccgcagctggccagggagagacttaagcagttaggtgatgactccctaagggtcaccaagggtcttgttcattagggcctgaagggcactggctgaatccattgtctacatcgcccacagattaggagagcctgtgcatacagagagcctgctagagagccctgggtctaaggagaagcaagctccagggagaacaagtcaaggaatgacataaaatcttaatccatggaagcctagcaggaggctggacatgggctggaactcctgcttctcgttattaggaggagctgttgctctctcctttcattctcagaacaagaggcaaaggcccagcctcttctgctcttactggtgtggaaatgccaacctgcctcgtattaactgcaccatctacaaaatctgagctccagccagtgctgctctagattcatctttctttagagagaatgaattattgtagcccctagccctttcaatgaatt

SEQ ID NO: 10386 - protein, 164 aa, Homo sapiens
MPHSTALPEARPTKMSALGAVIALLLWGQLFAVDSGNDVTDIADDGCPKPPEIAHGYVEHSVRYQCKNYYKLRTEGDGVYTLNDKKQWINKAVGDKLPECEADDGCPKPPEIAHGYVEHSVRYQCKNYYKLRTEGDGVYTLNNEKQWINKAVGDKLPECEAGGC

SEQ ID NO: 10387 - DNA, 1434 bp, Homo sapiens
agatgccccacagcactgctcttccagaggcaagaccaaccaagatgagtgccctgggagctgtcattgccctcctgctctggggacagctttttgcagtggactcaggcaatgatgtcacggatatcgcagatgacggctgcccgaagccccccgagattgcacatggctatgtggagcactcggttcgctaccagtgtaagaactactacaaactgcgcacagaaggagatggagtatacaccttaaatgataagaagcagtggataaataaggctgttggagataaacttcctgaatgtgaagcagatgacggctgcccgaagccccccgagattgcacatggctatgtggagcactcggttcgctaccagtgtaagaactactacaaactgcgcacagaaggagatggagtgtacaccttaaacaatgagaagcagtggataaataaggctgttggagataaacttcctgaatgtgaagcagtatgtgggaagcccaagaatccggcaaacccagtgcagcggatcctgggtggacacctggatgccaaaggcagctttccctggcaggctaagatggtttcccaccataatctcaccacaggtgccacgctgatcaatgaacaatggctgctgaccacggctaaaaatctcttcctgaaccattcagaaaatgcaacagcgaaagacattgcccctactttaacactctatgtggggaaaaagcagcttgtagagattgagaaggttgttctacaccctaactactcccaggtagatattgggctcatcaaactcaaacagaaggtgtctgttaatgagagagtgatgcccatctgcctaccttcaaaggattatgcagaagtagggcgtgtgggttatgtttctggctgggggcgaaatgccaattttaaatttactgaccatctgaagtatgtcatgctgcctgtggctgaccaagaccaatgcataaggcattatgaaggcagcacagtccccgaaaagaagacaccgaagagccctgtaggggtgcagcccatactgaatgaacacaccttctgtgctggcatgtctaagtaccaagaagacacctgctatggcgatgcgggcagtgcctttgccgttcacgacctggaggaggacacctggtatgcgactgggatcttaagctttgataagagctgtgctgtggctgagtatggtgtgtatgtgaaggtgacttccatccaggactgggttcagaagaccatagctgagaactaatgcaaggctggccggaagcccttgcctgaaagcaagatttcagcctggaagagggcaaagtggacgggagtggacaggagtggatgcgataagatgtggtttgaagctgatgggtgccagccctgcattgctgagtcaatcaataaagagctttcttttgacccatttc

SEQ ID NO: 10388 - protein, 420 aa, Homo sapiens
MPHSTALPEARPTKMSALGAVIALLLWGQLFAVDSGNDVTDIADDGCPKPPEIAHGYVEHSVRYQCKNYYKLRTEGDGVYTLNDKKQWINKAVGDKLPECEADDGCPKPPEIAHGYVEHSVRYQCKNYYKLRTEGDGVYTLNNEKQWINKAVGDKLPECEAVCGKPKNPANPVQRILGGHLDAKGSFPWQAKMVSHHNLTTGATLINEQWLLTTAKNLFLNHSENATAKDIAPTLTLYVGKKQLVEIEKVVLHPNYSQVDIGLIKLKQKVSVNERVMPICLPSKDYAEVGRVGYVSGWGRNANFKFTDHLKYVMLPVADQDQCIRHYEGSTVPEKKTPKSPVGVQPILNEHTFCAGMSKYQEDTCYGDAGSAFAVHDLEEDTWYATGILSFDKSCAVAEYGVYVKVTSIQDWVQKTIAEN

SEQ ID NO: 10389 - DNA, 1542 bp, Homo sapiens
agatgccccacagcactgctcttccagaggcaagaccaaccaagatgagtgccctgggagctgtcattgccctcctgctctggggacagctttttgcagtggactcaggcaatgatgtcacggatatcgcagatgacggctgcccgaagccccccgagattgcacatggctatgtggagcactcggttcgctaccagtgtaagaactactacaaactgcgcacagaaggagatggagtatacaccttaaatgataagaagcagtggataaataaggctgttggagataaacttcctgaatgtgaagcagatgacggctgcccgaagccccccgagattgcacatggctatgtggagcactcggttcgctaccagtgtaagaactactacaaactgcgcacagaaggagatggggaggcgatgccatgcagcctacctcatgtaaatctcagagtcacatttacatctccagcagatgtgggaaaagaaggaatgctgatgatgatgtcaccctcacctagagtgtacaccttaaacaatgagaagcagtggataaataaggctgttggagataaacttcctgaatgtgaagcagtatgtgggaagcccaagaatccggcaaacccagtgcagcggatcctgggtggacacctggatgccaaaggcagctttccctggcaggctaagatggtttcccaccataatctcaccacaggtgccacgctgatcaatgaacaatggctgctgaccacggctaaaaatctcttcctgaaccattcagaaaatgcaacagcgaaagacattgcccctactttaacactctatgtggggaaaaagcagcttgtagagattgagaaggttgttctacaccctaactactcccaggtagatattgggctcatcaaactcaaacagaaggtgtctgttaatgagagagtgatgcccatctgcctaccttcaaaggattatgcagaagtagggcgtgtgggttatgtttctggctgggggcgaaatgccaattttaaatttactgaccatctgaagtatgtcatgctgcctgtggctgaccaagaccaatgcataaggcattatgaaggcagcacagtccccgaaaagaagacaccgaagagccctgtaggggtgcagcccatactgaatgaacacaccttctgtgctggcatgtctaagtaccaagaagacacctgctatggcgatgcgggcagtgcctttgccgttcacgacctggaggaggacacctggtatgcgactgggatcttaagctttgataagagctgtgctgtggctgagtatggtgtgtatgtgaaggtgacttccatccaggactgggttcagaagaccatagctgagaactaatgcaaggctggccggaagcccttgcctgaaagcaagatttcagcctggaagagggcaaagtggacgggagtggacaggagtggatgcgataagatgtggtttgaagctgatgggtgccagccctgcattgctgagtcaatcaataaagagctttcttttgacccatttc

SEQ ID NO: 10390 - protein, 456 aa, Homo sapiens
MPHSTALPEARPTKMSALGAVIALLLWGQLFAVDSGNDVTDIADDGCPKPPEIAHGYVEHSVRYQCKNYYKLRTEGDGVYTLNDKKQWINKAVGDKLPECEADDGCPKPPEIAHGYVEHSVRYQCKNYYKLRTEGDGEAMPCSLPHVNLRVTFTSPADVGKEGMLMMMSPSPRVYTLNNEKQWINKAVGDKLPECEAVCGKPKNPANPVQRILGGHLDAKGSFPWQAKMVSHHNLTTGATLINEQWLLTTAKNLFLNHSENATAKDIAPTLTLYVGKKQLVEIEKVVLHPNYSQVDIGLIKLKQKVSVNERVMPICLPSKDYAEVGRVGYVSGWGRNANFKFTDHLKYVMLPVADQDQCIRHYEGSTVPEKKTPKSPVGVQPILNEHTFCAGMSKYQEDTCYGDAGSAFAVHDLEEDTWYATGILSFDKSCAVAEYGVYVKVTSIQDWVQKTIAEN

SEQ ID NO: 10391 - DNA, 903 bp, Homo sapiens
agatgccccacagcactgctcttccagaggcaagaccaaccaagatgagtgccctgggagctgtcattgccctcctgctctggggacagctttttgcagtggactcaggcaatgatgtcacggatatcgcagatgacggctgcccgaagccccccgagattgcacatggctatgtggagcactcggttcgctaccagtgtaagaactactacaaactgcgcacagaaggagatggagtatacaccttaaatgataagaagcagtggataaataaggctgttggagataaacttcctgaatgtgaagcagtatgtgggaagcccaagaatccggcaaacccagtgcagcggatcctgggtggacacctggatgccaaaggcagctttccctggcaggctaagatggtttcccaccataatctcaccacaggtgccacgctgatcaatgaacaatggctgctgaccacggctaaaaatctcttcctgaaccattcagaaaatgcaacacccatactgaatgaacacaccttctgtgctggcatgtctaagtaccaagaagacacctgctatggcgatgcgggcagtgcctttgccgttcacgacctggaggaggacacctggtatgcgactgggatcttaagctttgataagagctgtgctgtggctgagtatggtgtgtatgtgaaggtgacttccatccaggactgggttcagaagaccatagctgagaactaatgcaaggctggccggaagcccttgcctgaaagcaagatttcagcctggaagagggcaaagtggacgggagtggacaggagtggatgcgataagatgtggtttgaagctgatgggtgccagccctgcattgctgagtcaatcaataaagagctttcttttgacccatttc

SEQ ID NO: 10392 - protein, 243 aa, Homo sapiens
MPHSTALPEARPTKMSALGAVIALLLWGQLFAVDSGNDVTDIADDGCPKPPEIAHGYVEHSVRYQCKNYYKLRTEGDGVYTLNDKKQWINKAVGDKLPECEAVCGKPKNPANPVQRILGGHLDAKGSFPWQAKMVSHHNLTTGATLINEQWLLTTAKNLFLNHSENATPILNEHTFCAGMSKYQEDTCYGDAGSAFAVHDLEEDTWYATGILSFDKSCAVAEYGVYVKVTSIQDWVQKTIAEN

SEQ ID NO: 10393 - DNA, 1257 bp, Homo sapiens
agatgccccacagcactgctcttccagaggcaagaccaaccaagatgagtgccctgggagctgtcattgccctcctgctctggggacagctttttgcagtggactcaggcaatgatgtcacggatatcgcagatgacggctgcccgaagccccccgagattgcacatggctatgtggagcactcggttcgctaccagtgtaagaactactacaaactgcgcacagaaggagatggagtatacaccttaaatgataagaagcagtggataaataaggctgttggagataaacttcctgaatgtgaagcagtatgtgggaagcccaagaatccggcaaacccagtgcagcggatcctgggtggacacctggatgccaaaggcagctttccctggcaggctaagatggtttcccaccataatctcaccacaggtgccacgctgatcaatgaacaatggctgctgaccacggctaaaaatctcttcctgaaccattcagaaaatgcaacagcgaaagacattgcccctactttaacactctatgtggggaaaaagcagcttgtagagattgagaaggttgttctacaccctaactactcccaggtagatattgggctcatcaaactcaaacagaaggtgtctgttaatgagagagtgatgcccatctgcctaccttcaaaggattatgcagaagtagggcgtgtgggttatgtttctggctgggggcgaaatgccaattttaaatttactgaccatctgaagtatgtcatgctgcctgtggctgaccaagaccaatgcataaggcattatgaaggcagcacagtccccgaaaagaagacaccgaagagccctgtaggggtgcagcccatactgaatgaacacaccttctgtgctggcatgtctaagtaccaagaagacacctgctatggcgatgcgggcagtgcctttgccgttcacgacctggaggaggacacctggtatgcgactgggatcttaagctttgataagagctgtgctgtggctgagtatggtgtgtatgtgaaggtgacttccatccaggactgggttcagaagaccatagctgagaactaatgcaaggctggccggaagcccttgcctgaaagcaagatttcagcctggaagagggcaaagtggacgggagtggacaggagtggatgcgataagatgtggtttgaagctgatgggtgccagccctgcattgctgagtcaatcaataaagagctttcttttgacccatttc

SEQ ID NO: 10394 - protein, 361 aa, Homo sapiens [sequence omitted]

SEQ ID NO: 10395 - DNA, 1245 bp, Homo sapiens
gcactgctcttccagaggcaagaccaaccaagatgagtgccctgggagctgtcattgccctcctgctctggggacagctttttgcagtggactcaggcaatgatgtcacggatatcgcagatgacggctgcccgaagccccccgagattgcacatggctatgtggagcactcggttcgctaccagtgtaagaactactacaaactgcgcacagaaggagatggagtgtacaccttaaacaatgagaagcagtggataaataaggctgttggagataaacttcctgaatgtgaagcagtatgtgggaagcccaagaatccggcaaacccagtgcagcggatcctgggtggacacctggatgccaaaggcagctttccctggcaggctaagatggtttcccaccataatctcaccacaggtgccacgctgatcaatgaacaatggctgctgaccacggctaaaaatctcttcctgaaccattcagaaaatgcaacagcgaaagacattgcccctactttaacactctatgtggggaaaaagcagcttgtagagattgagaaggttgttctacaccctaactactcccaggtagatattgggctcatcaaactcaaacagaaggtgtctgttaatgagagagtgatgcccatctgcctaccttcaaaggattatgcagaagtagggcgtgtgggttatgtttctggctgggggcgaaatgccaattttaaatttactgaccatctgaagtatgtcatgctgcctgtggctgaccaagaccaatgcataaggcattatgaaggcagcacagtccccgaaaagaagacaccgaagagccctgtaggggtgcagcccatactgaatgaacacaccttctgtgctggcatgtctaagtaccaagaagacacctgctatggcgatgcgggcagtgcctttgccgttcacgacctggaggaggacacctggtatgcgactgggatcttaagctttgataagagctgtgctgtggctgagtatggtgtgtatgtgaaggtgacttccatccaggactgggttcagaagaccatagctgagaactaatgcaaggctggccggaagcccttgcctgaaagcaagatttcagcctggaagagggcaaagtggacgggagtggacaggagtggatgcgataagatgtggtttgaagctgatgggtgccagccctgcattgctgagtcaatcaataaagagctttcttttgacccatttc

SEQ ID NO: 10396 - protein, 347 aa, Homo sapiens
MSALGAVIALLLWGQLFAVDSGNDVTDIADDGCPKPPEIAHGYVEHSVRYQCKNYYKLRTEGDGVYTLNNEKQWINKAVGDKLPECEAVCGKPKNPANPVQRILGGHLDAKGSFPWQAKMVSHHNLTTGATLINEQWLLTTAKNLFLNHSENATAKDIAPTLTLYVGKKQLVEIEKVVLHPNYSQVDIGLIKLKQKVSVNERVMPICLPSKDYAEVGRVGYVSGWGRNANFKFTDHLKYVMLPVADQDQCIRHYEGSTVPEKKTPKSPVGVQPILNEHTFCAGMSKYQEDTCYGDAGSAFAVHDLEEDTWYATGILSFDKSCAVAEYGVYVKVTSIQDWVQKTIAEN

SEQ ID NO: 10397 - DNA, 1246 bp, Homo sapiens
actgctcttccagaggcaagaccaaccaagatgagtgccctgggagctgtcattgccctcctgctctggggacagctttttgcagtggactcaggcaatgatgtcacggatatcgcagatgacggctgcccgaagccccccgagattgcacatggctatgtggagcactcggttcgctaccagtgtaagaactactacaaactactgcgcacagaaggagatggagtgtacaccttaaacaatgagaagcagtggataaataaggctgttggagataaacttcctgaatgtgaagcagtatgtgggaagcccaagaatccggcaaacccagtgcagcggatcctgggtggacacctggatgccaaaggcagctttccctggcaggctaagatggtttcccaccataatctcaccacaggtgccacgctgatcaatgaacaatggctgctgaccacggctaaaaatctcttcctgaaccattcagaaaatgcaacagcgaaagacattgcccctactttaacactctatgtggggaaaaagcagcttgtagagattgagaaggttgttctacaccctaactactcccaggtagatattgggctcatcaaactcaaacagaaggtgtctgttaatgagagagtgatgcccatctgcctaccttcaaaggattatgcagaagtagggcgtgtgggttatgtttctggctgggggcgaaatgccaattttaaatttactgaccatctgaagtatgtcatgctgcctgtggctgaccaagaccaatgcataaggcattatgaaggcagcacagtccccgaaaagaagacaccgaagagccctgtaggggtgcagcccatactgaatgaacacaccttctgtgctggcatgtctaagtaccaagaagacacctgctatggcgatgcgggcagtgcctttgccgttcacgacctggaggaggacacctggtatgcgactgggatcttaagctttgataagagctgtgctgtggctgagtatggtgtgtatgtgaaggtgacttccatccaggactgggttcagaagaccatagctgagaactaatgcaaggctggccggaagcccttgcctgaaagcaagatttcagcctggaagagggcaaagtggacgggagtggacaggagtggatgcgataagatgtggtttgaagctgatgggtgccagccctgcattgctgagtcaatcaataaagagctttcttttgacccatttc

SEQ ID NO: 10398 - protein, 348 aa, Homo sapiens
MSALGAVIALLLWGQLFAVDSGNDVTDIADDGCPKPPEIAHGYVEHSVRYQCKNYYKLLRTEGDGVYTLNNEKQWINKAVGDKLPECEAVCGKPKNPANPVQRILGGHLDAKGSFPWQAKMVSHHNLTTGATLINEQWLLTTAKNLFLNHSENATAKDIAPTLTLYVGKKQLVEIEKVVLHPNYSQVDIGLIKLKQKVSVNERVMPICLPSKDYAEVGRVGYVSGWGRNANFKFTDHLKYVMLPVADQDQCIRHYEGSTVPEKKTPKSPVGVQPILNEHTFCAGMSKYQEDTCYGDAGSAFAVHDLEEDTWYATGILSFDKSCAVAEYGVYVKVTSIQDWVQKTIAEN

SEQ ID NO: 10399 - DNA, 1095 bp, Homo sapiens
actgctcttccagaggcaagaccaaccaagatgagtgccctgggagctgtcattgccctcctgctctggggacagctttttgcagtggactcaggcaatgatgtcacggatatcgcagatgacggctgcccgaagccccccgagattgcacatggctatgtggagcactcggttcgctaccagtgtaagaactactacaaactgcgcacagaaggagatggagtgtacaccttaaacaatgagaagcagtggataatctcaccacaggtgccacgctgatcaatgaacaatggctgctgaccacggctaaaaatctcttcctgaaccattcagaaaatgcaacagcgaaagacattgcccctactttaacactctatgtggggaaaaagcagcttgtagagattgagaaggttgttctacaccctaactactcccaggtagatattgggctcatcaaactcaaacagaaggtgtctgttaatgagagagtgatgcccatctgcctaccttcaaaggattatgcagaagtagggcgtgtgggttatgtttctggctgggggcgaaatgccaattttaaatttactgaccatctgaagtatgtcatgctgcctgtggctgaccaagaccaatgcataaggcattatgaaggcagcacagtccccgaaaagaagacaccgaagagccctgtaggggtgcagcccatactgaatgaacacaccttctgtgctggcatgtctaagtaccaagaagacacctgctatggcgatgcgggcagtgcctttgccgttcacgacctggaggaggacacctggtatgcgactgggatcttaagctttgataagagctgtgctgtggctgagtatggtgtgtatgtgaaggtgacttccatccaggactgggttcagaagaccatagctgagaactaatgcaaggctggccggaagcccttgcctgaaagcaagatttcagcctggaagagggcaaagtggacgggagtggacaggagtggatgcgataagatgtggtttgaagctgatgggtgccagccctgcattgctgagtcaatcaataaagagctttcttttgacccatttc

SEQ ID NO: 10400 - protein, 82 aa, Homo sapiens
MSALGAVIALLLWGQLFAVDSGNDVTDIADDGCPKPPEIAHGYVEHSVRYQCKNYYKLRTEGDGVYTLNNEKQWIISPQVPR

SEQ ID NO: 10401 - DNA, 1038 bp, Homo sapiens
actgctcttccagaggcaagaccaaccaagatgagtgccctgggagctgtcattgccctcctgctctggggacagctttttgcagtggactcaggcaatgatgtcacggatatcgcagatgacggctgcccgaagccccccgagattgcacatggctatgtggagcactcggttcgctaccagtgtaagaactactacaaactgcgcacagtgccacgctgatcaatgaacaatggctgctgaccacggctaaaaatctcttcctgaaccattcagaaaatgcaacagcgaaagacattgcccctactttaacactctatgtggggaaaaagcagcttgtagagattgagaaggttgttctacaccctaactactcccaggtagatattgggctcatcaaactcaaacagaaggtgtctgttaatgagagagtgatgcccatctgcctaccttcaaaggattatgcagaagtagggcgtgtgggttatgtttctggctgggggcgaaatgccaattttaaatttactgaccatctgaagtatgtcatgctgcctgtggctgaccaagaccaatgcataaggcattatgaaggcagcacagtccccgaaaagaagacaccgaagagccctgtaggggtgcagcccatactgaatgaacacaccttctgtgctggcatgtctaagtaccaagaagacacctgctatggcgatgcgggcagtgcctttgccgttcacgacctggaggaggacacctggtatgcgactgggatcttaagctttgataagagctgtgctgtggctgagtatggtgtgtatgtgaaggtgacttccatccaggactgggttcagaagaccatagctgagaactaatgcaaggctggccggaagcccttgcctgaaagcaagatttcagcctggaagagggcaaagtggacgggagtggacaggagtggatgcgataagatgtggtttgaagctgatgggtgccagccctgcattgctgagtcaatcaataaagagctttcttttgacccatttc

SEQ ID NO: 10402 - protein, 63 aa, Homo sapiens
MSALGAVIALLLWGQLFAVDSGNDVTDIADDGCPKPPEIAHGYVEHSVRYQCKNYYKLRTVPR

SEQ ID NO: 10403 - DNA, 437 bp, Homo sapiens
gctcttccagaggcaagaccaaccaagatgagtgccctgggagctgtcattgccctcctgctctggggacagctttttgcagtggactcaggcaatgatgtcacggatatcgcagatgacggctgcccgaagccccccgagattgcacatggctatgtggagcactcggttcgctaccagtataagagctgtgctgtggctgagtatggtgtgtatgtgaaggtgacttccatccaggactgggttcagaagaccatagctgagaactaatgcaaggctggccggaagcccttgcctgaaagcaagatttcagcctggaagagggcaaagtggacgggagtggacaggagtggatgcgataagatgtggtttgaagctgatgggtgccagccctgcattgctgagtcaatcaataaagagctttcttttgacccatt

SEQ ID NO: 10404 - protein, 80 aa, Homo sapiens
MSALGAVIALLLWGQLFAVDSGNDVTDIADDGCPKPPEIAHGYVEHSVRYQYKSCAVAEYGVYVKVTSIQDWVQKTIAEN

SEQ ID NO: 10405 - DNA, 489 bp, Homo sapiens
gctcttccagaggcaagaccaaccaagatgagtgccctgggagctgtcattgccctcctgctctggggacagctttttgcagtggactcaggcaatgatgtcacggatatcgcagatgacggctgcccgaagccccccgagattgcacatggctatgtggagcactcggttcgctaccagtgtaagaactactacaaactgcgcacagaaggagatggagtatacaccttaaatgataagaagcagtggataaataaggctgttggagataaacgtgacttccatccaggactgggttcagaagaccatagctgagaactaatgcaaggctggccggaagcccttgcctgaaagcaagatttcagcctggaagagggcaaagtggacgggagtggacaggagtggatgcgataagatgtggtttgaagctgatgggtgccagccctgcattgctgagtcaatcaataaagagctttcttttgacccatt

SEQ ID NO: 10406 - protein, 95 aa, Homo sapiens
MSALGAVIALLLWGQLFAVDSGNDVTDIADDGCPKPPEIAHGYVEHSVRYQCKNYYKLRTEGDGVYTLNDKKQWINKAVGDKRDFHPGLGSEDHS

SEQ ID NO: 10407 - DNA, 730 bp, Homo sapiens
gctcttccagaggcaagaccaaccaagatgagtgccctgggagctgtcattgccctcctgctctggggacagctttttgcagtggactcaggcaatgatgtcacggatatcgcagatgacggctgcccgaagccccccgagattgcacatggctatgtggagcactcggttcgctaccagtgtaagaactactacaaactgcgcacagaaggagatggagtgtacaccttaaacaatgagaagcagtggataaataaggctgttggagataaacttcctgaatgtgaagcagtatgtgggaagcccaagaatccggcaaacccagtgcagcggatcctgggtggacacctggatgccaaaggcagctttccctggcaggctaagatggtttcccaccataatctcaccacagtgcctttgccgttcacgacctggaggaggacacctggtatgcgactgggatcttaagctttgataagagctgtgctgtggctgagtatggtgtgtatgtgaaggtgacttccatccaggactgggttcagaagaccatagctgagaactaatgcaaggctggccggaagcccttgcctgaaagcaagatttcagcctggaagagggcaaagtggacgggagtggacaggagtggatgcgataagatgtggtttgaagctgatgggtgccagccctgcattgctgagtcaatcaataaagagctttcttttgacccatt

SEQ ID NO: 10408 - protein, 146 aa, Homo sapiens
MSALGAVIALLLWGQLFAVDSGNDVTDIADDGCPKPPEIAHGYVEHSVRYQCKNYYKLRTEGDGVYTLNNEKQWINKAVGDKLPECEAVCGKPKNPANPVQRILGGHLDAKGSFPWQAKMVSHHNLTTVPLPFTTWRRTPGMRLGS

SEQ ID NO: 10409 - DNA, 511 bp, Homo sapiens
gctcttccagaggcaagaccaaccaagatgagtgccctgggagctgtcattgccctcctgctctggggacagctttttgcagtggactcaggcaatgatgtcacggatatcgcagatgacggctgcccgaagccccccgagattgcacatggctatgtggagcactcggttcgctaccagtgctaaaaatctcttcctgaaccattcacgacctggaggaggacacctggtatgcgactgggatcttaagctttgataagagctgtgctgtggctgagtatggtgtgtatgtgaaggtgacttccatccaggactgggttcagaagaccatagctgagaactaatgcaaggctggccggaagcccttgcctgaaagcaagatttcagcctggaagagggcaaagtggacgggagtggacaggagtggatgcgataagatgtggtttgaagctgatgggtgccagccctgcattgctgagtcaatcaataaagagctttcttttgacccatt

SEQ ID NO: 10410 - protein, 53 aa, Homo sapiens
MMSRISQMTAARSPPRLHMAMWSTRFATSAKNLFLNHSRPGGGHLVCDWDLKL

SEQ ID NO: 10411 - DNA, 633 bp, Homo sapiens
gctcttccagaggcaagaccaaccaagatgagtgccctgggagctgtcattgccctcctgctctggggacagctttttgcagtggactcaggcaatgatgtcacggatatcgcagatgacggctgcccgaagccccccgagattgcacatggctatgtggagcactcggttcgctaccagtgtaagaactactacaaactgcgcacagaaggagatggagtgtacaccttaaacaatgagaagcagtggataaataaggctgttggagataaacttcctgaatgtgaagcagtatgtgggaagcccaagaatccggcaaacccagtgcagcggatcctgggtggacacctggtatgcgactgggatcttaagctttgataagagctgtgctgtggctgagtatggtgtgtatgtgaaggtgacttccatccaggactgggttcagaagaccatagctgagaactaatgcaaggctggccggaagcccttgcctgaaagcaagatttcagcctggaagagggcaaagtggacgggagtggacaggagtggatgcgataagatgtggtttgaagctgatgggtgccagccctgcattgctgagtcaatcaataaagagctttcttttgacccatt

SEQ ID NO: 10412 - protein, 116 aa, Homo sapiens
MSALGAVIALLLWGQLFAVDSGNDVTDIADDGCPKPPEIAHGYVEHSVRYQCKNYYKLRTEGDGVYTLNNEKQWINKAVGDKLPECEAVCGKPKNPANPVQRILGGHLVCDWDLKL

SEQ ID NO: 10413 - DNA, 1178 bp, Homo sapiens
gctcttccagaggcaagaccaaccaagatgagtgccctgggagctgtcattgccctcctgctctggggacagctttttgcagtggactcaggcaatgatgtcacggatatcgcagcagtgtaagaactactacaaactgcgcacagaaggagatggagtgtacaccttaaacaatgagaagcagtggataaataaggctgttggagataaacttcctgaatgtgaagcagtatgtgggaagcccaagaatccggcaaacccagtgcagcggatcctgggtggacacctggatgccaaaggcagctttccctggcaggctaagatggtttcccaccataatctcaccacaggtgccacgctgatcaatgaacaatggctgctgaccacggctaaaaatctcttcctgaaccattcagaaaatgcaacagcgaaagacattgcccctactttaacactctatgtggggaaaaagcagcttgtagagattgagaaggttgttctacaccctaactactcccaggtagatattgggctcatcaaactcaaacagaaggtgtctgttaatgagagagtgatgcccatctgcctaccttcaaaggattatgcagaagtagggcgtgtgggttatgtttctggctgggggcgaaatgccaattttaaatttactgaccatctgaagtatgtcatgctgcctgtggctgaccaagaccaatgcataaggcattatgaaggcagcacagtccccgaaaagaagacaccgaagagccctgtaggggtgcagcccatactgaatgaacacaccttctgtgctggcatgtctaagtaccaagaagacacctgctatggcgatgcgggcagtgcctttgccgttcacgacctggaggaggacacctggtatgcgactgggatcttaagctttgataagagctgtgctgtggctgagtatggtgtgtatgtgaaggtgacttccatccaggactgggttcagaagaccatagctgagaactaatgcaaggctggccggaagcccttgcctgaaagcaagatttcagcctggaagagggcaaagtggacgggagtggacaggagtggatgcgataagatgtggtttgaagctgatgggtgccagccctgcattgctgagtcaatcaataaagagctttcttttgacccatttc

SEQ ID NO: 10414 - protein, 304 aa, Homo sapiens
MMSRISQQCKNYYKLRTEGDGVYTLNNEKQWINKAVGDKLPECEAVCGKPKNPANPVQRILGGHLDAKGSFPWQAKMVSHHNLTTGATLINEQWLLTTAKNLFLNHSENATAKDIAPTLTLYVGKKQLVEIEKVVLHPNYSQVDIGLIKLKQKVSVNERVMPICLPSKDYAEVGRVGYVSGWGRNANFKFTDHLKYVMLPVADQDQCIRHYEGSTVPEKKTPKSPVGVQPILNEHTFCAGMSKYQEDTCYGDAGSAFAVHDLEEDTWYATGILSFDKSCAVAEYGVYVKVTSIQDWVQKTIAEN

SEQ ID NO: 10415 - DNA, 1000 bp, Homo sapiens
gctcttccagaggcaagaccaaccaagatgagtgccctgggagctgtcattgccctcctgctctggggacagctttttgcagtggactcaggcaatgatgtcacggatatcgcagatgacggctgcccgaagccccccgagattgcacatggctatgtggagcactcggttcgctaccagtgtaagaactactacaaactgcgcacagaaggagatggagtgtacaccttaaacaatgagaagcagtggataaataaggctgttggagataaacttcctgaatgtgaagcaggtgccacgctgatcaatgaacaatggctgctgaccacggctaaaaatctcttcctgaaccattcagaaaatgcaacagcgaaagacattgcccctactttaacactctatgtggggaaaaagcagcttgtagagattgagaaggttgttctacaccctaactactcccaggtagatattgggctcatcaaactcaaacagaaggtgtctgttaatgagagagtgatgcccatctgcctaccttcaaaggattatgcagaagtagggcgtgtgggttatgtttctggctgggggcgaaatgccaattttaaacccatactgaatgaacacaccttctgtgctggcatgtctaagtaccaagaagacacctgctatggcgatgcgggcagtgcctttgccgttcacgacctggaggaggacacctggtatgcgactgggatcttaagctttgataagagctgtgctgtggctgagtatggtgtgtatgtgaaggtgacttccatccaggactgggttcagaagaccatagctgagaactaatgcaaggctggccggaagcccttgcctgaaagcaagatttcagcctggaagagggcaaagtggacgggagtggacaggagtggatgcgataagatgtggtttgaagctgatgggtgccagccctgcattgctgagtcaatcaataaagagctttcttttgacccatttc

SEQ ID NO: 10416 - protein, 267 aa, Homo sapiens
MSALGAVIALLLWGQLFAVDSGNDVTDIADDGCPKPPEIAHGYVEHSVRYQCKNYYKLRTEGDGVYTLNNEKQWINKAVGDKLPECEAGATLINEQWLLTTAKNLFLNHSENATAKDIAPTLTLYVGKKQLVEIEKVVLHPNYSQVDIGLIKLKQKVSVNERVMPICLPSKDYAEVGRVGYVSGWGRNANFKPILNEHTFCAGMSKYQEDTCYGDAGSAFAVHDLEEDTWYATGILSFDKSCAVAEYGVYVKVTSIQDWVQKTIAEN

SEQ ID NO: 10417 - DNA, 562 bp, Homo sapiens
gctcttccagaggcaagaccaaccaagatgagtgccctgggagctgtcattgccctcctgctctggggacagctttttgcagtggactcaggcaatgatgtcacggatatcgcagatgacggctgcccgaagccccccgagattgcacatggctatgtggagcactcggttcgctaccagtgtaagaactactacaaactgcgcacagaaggagatgacacctgctatggcgatgcgggcagtgcctttgccgttcacgacctggaggaggacacctggtatgcgactgggatcttaagctttgataagagctgtgctgtggctgagtatggtgtgtatgtgaaggtgacttccatccaggactgggttcagaagaccatagctgagaactaatgcaaggctggccggaagcccttgcctgaaagcaagatttcagcctggaagagggcaaagtggacgggagtggacaggagtggatgcgataagatgtggtttgaagctgatgggtgccagccctgcattgctgagtcaatcaataaagagctttcttttgacccatttc

SEQ ID NO: 10418 - protein, 121 aa, Homo sapiens
MSALGAVIALLLWGQLFAVDSGNDVTDIADDGCPKPPEIAHGYVEHSVRYQCKNYYKLRTEGDDTCYGDAGSAFAVHDLEEDTWYATGILSFDKSCAVAEYGVYVKVTSIQDWVQKTIAEN

SEQ ID NO: 10419 - DNA, 971 bp, Homo sapiens
gctcttccagaggcaagaccaaccaagatgagtgccctgggagctgtcattgccctcctgctctggggacagctttttgcagtggactcaggcaatgatgtcacggatatcgcagatggtttcccaccataatctcaccacaggtgccacgctgatcaatgaacaatggctgctgaccacggctaaaaatctcttcctgaaccattcagaaaatgcaacagcgaaagacattgcccctactttaacactctatgtggggaaaaagcagcttgtagagattgagaaggttgttctacaccctaactactcccaggtagatattgggctcatcaaactcaaacagaaggtgtctgttaatgagagagtgatgcccatctgcctaccttcaaaggattatgcagaagtagggcgtgtgggttatgtttctggctgggggcgaaatgccaattttaaatttactgaccatctgaagtatgtcatgctgcctgtggctgaccaagaccaatgcataaggcattatgaaggcagcacagtccccgaaaagaagacaccgaagagccctgtaggggtgcagcccatactgaatgaacacaccttctgtgctggcatgtctaagtaccaagaagacacctgctatggcgatgcgggcagtgcctttgccgttcacgacctggaggaggacacctggtatgcgactgggatcttaagctttgataagagctgtgctgtggctgagtatggtgtgtatgtgaaggtgacttccatccaggactgggttcagaagaccatagctgagaactaatgcaaggctggccggaagcccttgcctgaaagcaagatttcagcctggaagagggcaaagtggacgggagtggacaggagtggatgcgataagatgtggtttgaagctgatgggtgccagccctgcattgctgagtcaatcaataaagagctttcttttgacccatttc

SEQ ID NO: 10420 - protein, 235 aa, Homo sapiens
MMSRISQMVSHHNLTTGATLINEQWLLTTAKNLFLNHSENATAKDIAPTLTLYVGKKQLVEIEKVVLHPNYSQVDIGLIKLKQKVSVNERVMPICLPSKDYAEVGRVGYVSGWGRNANFKFTDHLKYVMLPVADQDQCIRHYEGSTVPEKKTPKSPVGVQPILNEHTFCAGMSKYQEDTCYGDAGSAFAVHDLEEDTWYATGILSFDKSCAVAEYGVYVKVTSIQDWVQKTIAEN

SEQ ID NO: 10421 - DNA, 1240 bp, Homo sapiens
gctcttccagaggcaagaccaaccaagatgagtgccctgggagctgtcattgccctcctgctctggggacagctttttgcagtggactcaggcaatgatgtcacggatatcgcagatgacggctgcccgaagccccccgagattgcacatggctatgtggagcactcggttcgctaccagtgtaagaactactacaaactgcgcacagaaggagatggagtgtacaccttaaacaatgagaagcagtggataaataaggctgttggagataaacttcctgaatgtgaagcagtatgtgggaagcccaagaatccggcaaacccagtgcagcggatcctgggtggacacctggatgccaaaggcagctttccctggcaggctaagatggtttcccaccataatctcaccacaggtgccacgctgatcaatgaacaatggctgctgaccacggctaaaaatctcttcctgaaccattcagaaaatgcaacagcgaaagacattgcccctactttaacactctatgtggggaaaaagcagcttgtagagattgagaaggttgttctacaccctaactactcccaggtagatattgggctcatcaaactcaaacagaaggtgtctgttaatgagagagtgatgcccatctgcctaccttcaaaggattatgcagaagtagggcgtgtgggttatgtttctggctgggggcgaaatgccaattttaaatttactgaccatctgaagtatgtcatgctgcctgtggctgaccaagaccaatgcataaggcattatgaaggcagcacagtccccgaaaagaagacaccgaagagccctgtaggggtgcagcccatactgaatgaacacaccttctgtgctggcatgtctaagtaccaagaagacacctgctatggcgatgcgggcagtgcctttgccgttcacgacctggaggaggacacctggtatgcgactgggatcttaagctttgataagagctgtgctgtggctgagtatggtgtgtatgtgaaggtgacttccatccaggactgggttcagaagaccatagctgagaactaatgcaaggctggccggaagcccttgcctgaaagcaagatttcagcctggaagagggcaaagtggacgggagtggacaggagtggatgcgataagatgtggtttgaagctgatgggtgccagccctgcattgctgagtcaatcaataaagagctttcttttgacccatttc

SEQ ID NO: 10422 - protein, 347 aa, Homo sapiens; identical to SEQ ID NO: 10396

SEQ ID NO: 10423 - DNA, 689 bp, Homo sapiens
gctcttccagaggcaagaccaaccaagatgagtgccctgggagctgtcattgccctcctgctctggggacagctttttgcagtggactcaggcaatgatgtcacggatatcgcagatgacggctgcccgaagccccccgagattgcacatggctatgtggagcactcggttcgctaccagtgtaagaactactacaaactgcgcacagaaggagatggagtgtacaccttaaacaatgagaagcagtggataaataaggctgttggagataaacttcctgaatgtgaagcagcccatactgaatgaacacaccttctgtgctggcatgtctaagtaccaagaagacacctgctatggcgatgcgggcagtgcctttgccgttcacgacctggaggaggacacctggtatgcgactgggatcttaagctttgataagagctgtgctgtggctgagtatggtgtgtatgtgaaggtgacttccatccaggactgggttcagaagaccatagctgagaactaatgcaaggctggccggaagcccttgcctgaaagcaagatttcagcctggaagagggcaaagtggacgggagtggacaggagtggatgcgataagatgtggtttgaagctgatgggtgccagccctgcattgctgagtcaatcaataaagagctttcttttgacccatttc

SEQ ID NO: 10424 - protein, 92 aa, Homo sapiens
MSALGAVIALLLWGQLFAVDSGNDVTDIADDGCPKPPEIAHGYVEHSVRYQCKNYYKLRTEGDGVYTLNNEKQWINKAVGDKLPECEAAHTE

SEQ ID NO: 10425 - DNA, 1113 bp, Homo sapiens
gctcttccagaggcaagaccaaccaagatgagtgccctgggagctgtcattgccctcctgctctggggacagctttttgcagtggactcaggcaatgatgtcacggatatcgcagatgacggctgcccgaagccccccgagattgcacatggctatgtggagcactcggttcgctaccagtgtaagaactactacaaatgcagcggatcctgggtggacacctggatgccaaaggcagctttccctggcaggctaagatggtttcccaccataatctcaccacaggtgccacgctgatcaatgaacaatggctgctgaccacggctaaaaatctcttcctgaaccattcagaaaatgcaacagcgaaagacattgcccctactttaacactctatgtggggaaaaagcagcttgtagagattgagaaggttgttctacaccctaactactcccaggtagatattgggctcatcaaactcaaacagaaggtgtctgttaatgagagagtgatgcccatctgcctaccttcaaaggattatgcagaagtagggcgtgtgggttatgtttctggctgggggcgaaatgccaattttaaatttactgaccatctgaagtatgtcatgctgcctgtggctgaccaagaccaatgcataaggcattatgaaggcagcacagtccccgaaaagaagacaccgaagagccctgtaggggtgcagcccatactgaatgaacacaccttctgtgctggcatgtctaagtaccaagaagacacctgctatggcgatgcgggcagtgcctttgccgttcacgacctggaggaggacacctggtatgcgactgggatcttaagctttgataagagctgtgctgtggctgagtatggtgtgtatgtgaaggtgacttccatccaggactgggttcagaagaccatagctgagaactaatgcaaggctggccggaagcccttgcctgaaagcaagatttcagcctggaagagggcaaagtggacgggagtggacaggagtggatgcgataagatgtggtttgaagctgatgggtgccagccctgcattgctgagtcaatcaataaagagctttcttttgacccatttc

SEQ ID NO: 10426 - protein, 248 aa, Homo sapiens [sequence omitted]

SEQ ID NO: 10427 - DNA, 767 bp, Homo sapiens
gctcttccagaggcaagaccaaccaagatgagtgccctgggagctgtcattgccctcctgctctggggacagctttttgcagtggactcaggcaatgatgtcacggatatcgcagatgacggctgcccgaagccccccgagattgcacatggctatgtggagcactcggttcgctaccacttcaaaggattatgcagaagtagggcgtgtgggttatgtttctggctgggggcgaaatgccaattttaaatttactgaccatctgaagtatgtcatgctgcctgtggctgaccaagaccaatgcataaggcattatgaaggcagcacagtccccgaaaagaagacaccgaagagccctgtaggggtgcagcccatactgaatgaacacaccttctgtgctggcatgtctaagtaccaagaagacacctgctatggcgatgcgggcagtgcctttgccgttcacgacctggaggaggacacctggtatgcgactgggatcttaagctttgataagagctgtgctgtggctgagtatggtgtgtatgtgaaggtgacttccatccaggactgggttcagaagaccatagctgagaactaatgcaaggctggccggaagcccttgcctgaaagcaagatttcagcctggaagagggcaaagtggacgggagtggacaggagtggatgcgataagatgtggtttgaagctgatgggtgccagccctgcattgctgagtcaatcaataaagagctttcttttgacccatttc

SEQ ID NO: 10428 - protein, 167 aa, Homo sapiens
MMSRISQMTAARSPPRLHMAMWSTRFATTSKDYAEVGRVGYVSGWGRNANFKFTDHLKYVMLPVADQDQCIRHYEGSTVPEKKTPKSPVGVQPILNEHTFCAGMSKYQEDTCYGDAGSAFAVHDLEEDTWYATGILSFDKSCAVAEYGVYVKVTSIQDWVQKTIAEN

SEQ ID NO: 10429 - DNA, 942 bp, Homo sapiens
gctcttccagaggcaagaccaaccaagatgagcggatcctgggtggacacctggatgccaaaggcagctttccctggcaggctaagatggtttcccaccataatctcaccacaggtgccacgctgatcaatgaacaatggctgctgaccacggctaaaaatctcttcctgaaccattcagaaaatgcaacagcgaaagacattgcccctactttaacactctatgtggggaaaaagcagcttgtagagattgagaaggttgttctacaccctaactactcccaggtagatattgggctcatcaaactcaaacagaaggtgtctgttaatgagagagtgatgcccatctgcctaccttcaaaggattatgcagaagtagggcgtgtgggttatgtttctggctgggggcgaaatgccaattttaaatttactgaccatctgaagtatgtcatgctgcctgtggctgaccaagaccaatgcataaggcattatgaaggcagcacagtccccgaaaagaagacaccgaagagccctgtaggggtgcagcccatactgaatgaacacaccttctgtgctggcatgtctaagtaccaagaagacacctgctatggcgatgcgggcagtgcctttgccgttcacgacctggaggaggacacctggtatgcgactgggatcttaagctttgataagagctgtgctgtggctgagtatggtgtgtatgtgaaggtgacttccatccaggactgggttcagaagaccatagctgagaactaatgcaaggctggccggaagcccttgcctgaaagcaagatttcagcctggaagagggcaaagtggacgggagtggacaggagtggatgcgataagatgtggtttgaagctgatgggtgccagccctgcattgctgagtcaatcaataaagagctttcttttgacccatttc

SEQ ID NO: 10430 - protein, 32 aa, Homo sapiens
MSGSWVDTWMPKAAFPGRLRWFPTIISPQVPR

SEQ ID NO: 10431 - DNA, 886 bp, Homo sapiens
gctcttccagaggcaagaccaaccaagatgagtgccctgggagctgtcattgccctcctgctctggggacagctttttgcagtggactcaggcaatgatgtcacggatatcgcagatgacggctgcccgaagccccccgagattgcacatggctatgtggagcactcggttcgctaccagtgtaagaactactacaaactgcgcacagaaggagatggagtgtacaccttaaacaatgagaagcagtggataaataaggctgttggagataaacttcctgaatgtgaagcagtatgtgggaagcccaagaatccggcaaacccagtgcagcggatcctgggtggacacctggatgccaaaggcagctttccctggcaggctaagatggtttcccaccataatctcaccacaggtgccacgctgatcaatgaacaatggctgctgaccacggctaaaaatctcttcctgaaccattcagaaaatgcaacacccatactgaatgaacacaccttctgtgctggcatgtctaagtaccaagaagacacctgctatggcgatgcgggcagtgcctttgccgttcacgacctggaggaggacacctggtatgcgactgggatcttaagctttgataagagctgtgctgtggctgagtatggtgtgtatgtgaaggtgacttccatccaggactgggttcagaagaccatagctgagaactaatgcaaggctggccggaagcccttgcctgaaagcaagatttcagcctggaagagggcaaagtggacgggagtggacaggagtggatgcgataagatgtggtttgaagctgatgggtgccagccctgcattgctgagtcaatcaataaagagctttcttttgacccatttc

SEQ ID NO: 10432 - protein, 229 aa, Homo sapiens
MSALGAVIALLLWGQLFAVDSGNDVTDIADDGCPKPPEIAHGYVEHSVRYQCKNYYKLRTEGDGVYTLNNEKQWINKAVGDKLPECEAVCGKPKNPANPVQRILGGHLDAKGSFPWQAKMVSHHNLTTGATLINEQWLLTTAKNLFLNHSENATPILNEHTFCAGMSKYQEDTCYGDAGSAFAVHDLEEDTWYATGILSFDKSCAVAEYGVYVKVTSIQDWVQKTIAEN

SEQ ID NO: 10433 - DNA, 1120 bp, Homo sapiens
gctcttccagaggcaagaccaaccaagatgagtgccctgggagctgtcattgccctcctgctctggggacagctttttgcagtggactcaggcaatgatgtcacggatatcgcagatgacggctgcccgaagccccccgagattgcacatggctatgtggagcactcggttcgctaccagtgtaagaactactacaaactgcgcacagaaggagatggagtgtacaccttaaacaatgagaagcagtggataaataaggctgttggagataaacttcctgaatgtgaagcaggtgccacgctgatcaatgaacaatggctgctgaccacggctaaaaatctcttcctgaaccattcagaaaatgcaacagcgaaagacattgcccctactttaacactctatgtggggaaaaagcagcttgtagagattgagaaggttgttctacaccctaactactcccaggtagatattgggctcatcaaactcaaacagaaggtgtctgttaatgagagagtgatgcccatctgcctaccttcaaaggattatgcagaagtagggcgtgtgggttatgtttctggctgggggcgaaatgccaattttaaatttactgaccatctgaagtatgtcatgctgcctgtggctgaccaagaccaatgcataaggcattatgaaggcagcacagtccccgaaaagaagacaccgaagagccctgtaggggtgcagcccatactgaatgaacacaccttctgtgctggcatgtctaagtaccaagaagacacctgctatggcgatgcgggcagtgcctttgccgttcacgacctggaggaggacacctggtatgcgactgggatcttaagctttgataagagctgtgctgtggctgagtatggtgtgtatgtgaaggtgacttccatccaggactgggttcagaagaccatagctgagaactaatgcaaggctggccggaagcccttgcctgaaagcaagatttcagcctggaagagggcaaagtggacgggagtggacaggagtggatgcgataagatgtggtttgaagctgatgggtgccagccctgcattgctgagtcaatcaataaagagctttcttttgacccatttc

SEQ ID NO: 10434 - protein, 307 aa, Homo sapiens
MSALGAVIALLLWGQLFAVDSGNDVTDIADDGCPKPPEIAHGYVEHSVRYQCKNYYKLRTEGDGVYTLNNEKQWINKAVGDKLPECEAGATLINEQWLLTTAKNLFLNHSENATAKDIAPTLTLYVGKKQLVEIEKVVLHPNYSQVDIGLIKLKQKVSVNERVMPICLPSKDYAEVGRVGYVSGWGRNANFKFTDHLKYVMLPVADQDQCIRHYEGSTVPEKKTPKSPVGVQPILNEHTFCAGMSKYQEDTCYGDAGSAFAVHDLEEDTWYATGILSFDKSCAVAEYGVYVKVTSIQDWVQKTIAEN

SEQ ID NO: 10435 - DNA, 901 bp, Homo sapiens
gctcttccagaggcaagaccaaccaagatgagtgccctgggagctatggtttcccaccataatctcaccacaggtgccacgctgatcaatgaacaatggctgctgaccacggctaaaaatctcttcctgaaccattcagaaaatgcaacagcgaaagacattgcccctactttaacactctatgtggggaaaaagcagcttgtagagattgagaaggttgttctacaccctaactactcccaggtagatattgggctcatcaaactcaaacagaaggtgtctgttaatgagagagtgatgcccatctgcctaccttcaaaggattatgcagaagtagggcgtgtgggttatgtttctggctgggggcgaaatgccaattttaaatttactgaccatctgaagtatgtcatgctgcctgtggctgaccaagaccaatgcataaggcattatgaaggcagcacagtccccgaaaagaagacaccgaagagccctgtaggggtgcagcccatactgaatgaacacaccttctgtgctggcatgtctaagtaccaagaagacacctgctatggcgatgcgggcagtgcctttgccgttcacgacctggaggaggacacctggtatgcgactgggatcttaagctttgataagagctgtgctgtggctgagtatggtgtgtatgtgaaggtgacttccatccaggactgggttcagaagaccatagctgagaactaatgcaaggctggccggaagcccttgcctgaaagcaagatttcagcctggaagagggcaaagtggacgggagtggacaggagtggatgcgataagatgtggtttgaagctgatgggtgccagccctgcattgctgagtcaatcaataaagagctttcttttgacccatttc

SEQ ID NO: 10436 - protein, 234 aa, Homo sapiens
MSALGAMVSHHNLTTGATLINEQWLLTTAKNLFLNHSENATAKDIAPTLTLYVGKKQLVEIEKVVLHPNYSQVDIGLIKLKQKVSVNERVMPICLPSKDYAEVGRVGYVSGWGRNANFKFTDHLKYVMLPVADQDQCIRHYEGSTVPEKKTPKSPVGVQPILNEHTFCAGMSKYQEDTCYGDAGSAFAVHDLEEDTWYATGILSFDKSCAVAEYGVYVKVTSIQDWVQKTIAEN

SEQ ID NO: 10437 - DNA, 789 bp, Homo sapiens
gctcttccagaggcaagaccaaccaagatgagtgccctgggagctacattgcccctactttaacactctatgtggggaaaaagcagcttgtagagattgagaaggttgttctacaccctaactactcccaggtagatattgggctcatcaaactcaaacagaaggtgtctgttaatgagagagtgatgcccatctgcctaccttcaaaggattatgcagaagtagggcgtgtgggttatgtttctggctgggggcgaaatgccaattttaaatttactgaccatctgaagtatgtcatgctgcctgtggctgaccaagaccaatgcataaggcattatgaaggcagcacagtccccgaaaagaagacaccgaagagccctgtaggggtgcagcccatactgaatgaacacaccttctgtgctggcatgtctaagtaccaagaagacacctgctatggcgatgcgggcagtgcctttgccgttcacgacctggaggaggacacctggtatgcgactgggatcttaagctttgataagagctgtgctgtggctgagtatggtgtgtatgtgaaggtgacttccatccaggactgggttcagaagaccatagctgagaactaatgcaaggctggccggaagcccttgcctgaaagcaagatttcagcctggaagagggcaaagtggacgggagtggacaggagtggatgcgataagatgtggtttgaagctgatgggtgccagccctgcattgctgagtcaatcaataaagagctttcttttgacccatttc

SEQ ID NO: 10438 - protein, 144 aa, Homo sapiens
MPICLPSKDYAEVGRVGYVSGWGRNANFKFTDHLKYVMLPVADQDQCIRHYEGSTVPEKKTPKSPVGVQPILNEHTFCAGMSKYQEDTCYGDAGSAFAVHDLEEDTWYATGILSFDKSCAVAEYGVYVKVTSIQDWVQKTIAEN

SEQ ID NO: 10439 - DNA, 570 bp, Homo sapiens
gctcttccagaggcaagaccaaccaagatgagtgccctgggagctgtcattgccctcctgctctggggacagctttttgcagtggactcaggcaatgatgtcacggatatcgcagatgacggctgcccgaagccccccgagattgcacatggctatgtggagcactcggttcgctaccagtgtaagaacacaccttctgtgctggcatgtctaagtaccaagaagacacctgctatggcgatgcgggcagtgcctttgccgttcacgacctggaggaggacacctggtatgcgactgggatcttaagctttgataagagctgtgctgtggctgagtatggtgtgtatgtgaaggtgacttccatccaggactgggttcagaagaccatagctgagaactaatgcaaggctggccggaagcccttgcctgaaagcaagatttcagcctggaagagggcaaagtggacgggagtggacaggagtggatgcgataagatgtggtttgaagctgatgggtgccagccctgcattgctgagtcaatcaataaagagctttcttttgacccatttc

SEQ ID NO: 10440 - protein, 92 aa, Homo sapiens
MSALGAVIALLLWGQLFAVDSGNDVTDIADDGCPKPPEIAHGYVEHSVRYQCKNTPSVLACLSTKKTPAMAMRAVPLPFTTWRRTPGMRLGS

SEQ ID NO: 10441 - DNA, 824 bp, Homo sapiens
agtgccctgggagctgtcattgccctcctgctctggggacagctttttgcagtggactcaggcaatgatgtcacggatatcgcagatgacggctgcccgaagccccccgagattgcacatggctatgtggagcactcggttcgctaccagtgtaagaactactacaaactgcgcacagaaggagatggagtatacaccttaaatgataagaagcagtggataaataaggctgttggagataaacttcctgaatgtgaagcaggtgggtgctgagcactgagcacttaagagagcaggcaggcgtccagcggggaacgtcctagaggcacagccttccagtgcggcttcctctgagcacacaagagccaggaggagggatgtgggagaaccgcagctggccagggagagacttaagcagttaggtgatgactccctaagggtcaccaagggtcttgttcattggggcctgaagggcactggctgaatccactgtcggcactgcccacagatcaggagagcctgtgcatacagagagcctgctagaaagccctgggtctaaggagaagcaagctccagggagaacaagtcaaggaatgacataaaatcttaatccatggaagcctagcaggaggctggacatgggctggaactcctgcttctcgttattaggaggagctgttgctctctcctttcattctcagaaccagaggcaaagacccagcctcttctgctcttactggtgtggaaatgccaacctgcctcgtattaactgcaccatctacaaaatctgagctccagccagtgctgctctagattcatctttc

SEQ ID NO: 10442 - protein, 45 aa, Homo sapiens
MMSRISQMTAARSPPRLHMAMWSTRFATSVRTTTNCAQKEMEYTP

SEQ ID NO: 10443 - DNA, 1210 bp, Homo sapiens
agtgccctgggagctgtcattgccctcctgctctggggacagctttttgcagtggactcaggcaatgatgtcacggatatcgcagatgacggctgcccgaagccccccgagattgcacatggctatgtggagcactcggttcgctaccagtgtaagaactactacaaactgcgcacagaaggagatggagtgtacaccttaaacaatgagaagcagtggataaataaggctgttggagataaacttcctgaatgtgaagcagtatgtgggaagcccaagaatccggcaaacccagtgcagcggatcctgggtggacacctggatgccaaaggcagctttccctggcaggctaagatggtttcccaccataatctcaccacaggtgccacgctgatcaatgaacaatggctgctgaccacggctaaaaatctcttcctgaaccattcagaaaatgcaacagcgaaagacattgcccctactttaacactctatgtggggaaaaagcagcttgtagagattgagaaggttgttctacaccctaactactcccaggtagatattgggctcatcaaactcaaacagaaggtgtctgttaatgagagagtgatgcccatctgcctaccttcaaaggattatgcagaagtagggcgtgtgggttatgtttctggctgggggcgaaatgccaattttaaatttactgaccatctgaagtatgtcatgctgcctgtggctgaccaagaccaatgcataaggcattatgaaggcagcacagtccccgaaaagaagacaccgaagagccctgtaggggtgcagcccatactgaatgaacacaccttctgtgctggcatgtctaagtaccaagaagacacctgctatggcgatgcgggcagtgcctttgccgttcacgacctggaggaggacacctggtatgcgactgggatcttaagctttgataagagctgtgctgtggctgagtatggtgtgtatgtgaaggtgacttccatccaggactgggttcagaagaccatagctgagaactaatgcaaggctggccggaagcccttgcctgaaagcaagatttcagcctggaagagggcaaagtggacgggagtggacaggagtggatgcgataagatgtggtttgaagctgatgggtgccagccctgcattgctgagtcaatcaataaagagctttcttttgacccatttc

SEQ ID NO: 10444 - protein, 45 aa, Homo sapiens
MMSRISQMTAARSPPRLHMAMWSTRFATSVRTTTNCAQKEMECTP

SEQ ID NO: 10445 - DNA, 636 bp, Homo sapiens
agtgccctgggagctgtcattgccctcctgctctggggacagctttttgcagtggactcaggcaatgatgtcacggatatcgcagatgacggctgcccgaagccccccgagattgcacatggctatgtggagcactcggttcgctaccagtgtaagaactactacaaactgcgcacagaaggagatggagtatacaccttaaatgataaaagacaccgaagagccctgtaggggtgcagcccatactgaatgaacacaccttctgtgctggcatgtctaagtaccaagaagacacctgctatggcgatgcgggcagtgcctttgccgttcacgacctggaggaggacacctggtatgcgactgggatcttaagctttgataagagctgtgctgtggctgagtatggtgtgtatgtgaaggtgacttccatccaggactgggttcagaagaccatagctgagaactaatgcaaggctggccggaagcccttgcctgaaagcaagatttcagcctggaagagggcaaagtggacgggagtggacaggagtggatgcgataagatgtggtttgaagctgatgggtgccagccctgcattgctgagtcaatcaataaagagctttcttttgacccatttc

SEQ ID NO: 10446 - protein, 45 aa, Homo sapiens; identical to SEQ ID NO: 10442

SEQ ID NO: 10447 - DNA, 1210 bp, Homo sapiens; identical to SEQ ID NO: 10443

SEQ ID NO: 10448 - protein, 45 aa, Homo sapiens; identical to SEQ ID NO: 10444

SEQ ID NO: 10449 - DNA, 1069 bp, Homo sapiens
agtgccctgggagctgtcattgccctcctgctctggggacagctttttgcagtggactcaggcaatgatgtcacggatatcgcagatgacggctgcccgaagccccccgagattgcacatggctatgtggagcactcggttcgctaccagtgtaagaactactacaaactactgcgcacagaaggagatggcagctttccctggcaggctaagatggtttcccaccataatctcaccacaggtgccacgctgatcaatgaacaatggctgctgaccacggctaaaaatctcttcctgaaccattcagaaaatgcaacagcgaaagacattgcccctactttaacactctatgtggggaaaaagcagcttgtagagattgagaaggttgttctacaccctaactactcccaggtagatattgggctcatcaaactcaaacagaaggtgtctgttaatgagagagtgatgcccatctgcctaccttcaaaggattatgcagaagtagggcgtgtgggttatgtttctggctgggggcgaaatgccaattttaaatttactgaccatctgaagtatgtcatgctgcctgtggctgaccaagaccaatgcataaggcattatgaaggcagcacagtccccgaaaagaagacaccgaagagccctgtaggggtgcagcccatactgaatgaacacaccttctgtgctggcatgtctaagtaccaagaagacacctgctatggcgatgcgggcagtgcctttgccgttcacgacctggaggaggacacctggtatgcgactgggatcttaagctttgataagagctgtgctgtggctgagtatggtgtgtatgtgaaggtgacttccatccaggactgggttcagaagaccatagctgagaactaatgcaaggctggccggaagcccttgcctgaaagcaagatttcagcctggaagagggcaaagtggacgggagtggacaggagtggatgcgataagatgtggtttgaagctgatgggtgccagccctgcattgctgagtcaatcaataaagagctttcttttgacccatttc

SEQ ID NO: 10450 - protein, 62 aa, Homo sapiens
MMSRISQMTAARSPPRLHMAMWSTRFATSVRTTTNYCAQKEMAAFPGRLRWFPTIISPQVPR

SEQ ID NO: 10451 - DNA, 1060 bp, Homo sapiens
tgtaagaactactacaaactgcgcacagaaggagatggagtatacaccttaaatgataagaagcagtggataaataaggctgttggagataaacttcctgaatgtgaagcagtatgtgggaagcccaagaatccggcaaacccagtgcagcggatcctgggtggacacctggatgccaaaggcagctttccctggcaggctaagatggtttcccaccataatctcaccacaggtgccacgctgatcaatgaacaatggctgctgaccacggctaaaaatctcttcctgaaccattcagaaaatgcaacagcgaaagacattgcccctactttaacactctatgtggggaaaaagcagcttgtagagattgagaaggttgttctacaccctaactactcccaggtagatattgggctcatcaaactcaaacagaaggtgtctgttaatgagagagtgatgcccatctgcctaccttcaaaggattatgcagaagtagggcgtgtgggttatgtttctggctgggggcgaaatgccaattttaaatttactgaccatctgaagtatgtcatgctgcctgtggctgaccaagaccaatgcataaggcattatgaaggcagcacagtccccgaaaagaagacaccgaagagccctgtaggggtgcagcccatactgaatgaacacaccttctgtgctggcatgtctaagtaccaagaagacacctgctatggcgatgcgggcagtgcctttgccgttcacgacctggaggaggacacctggtatgcgactgggatcttaagctttgataagagctgtgctgtggctgagtatggtgtgtatgtgaaggtgacttccatccaggactgggttcagaagaccatagctgagaactaatgcaaggctggccggaagcccttgcctgaaagcaagatttcagcctggaagagggcaaagtggacgggagtggacaggagtggatgcgataagatgtggtttgaagctgatgggtgccagccctgcattgctgagtcaatcaataaagagctttcttttgacccatttc

SEQ ID NO: 10452 - protein, 228 aa, Homo sapiens
MVSHHNLTTGATLINEQWLLTTAKNLFLNHSENATAKDIAPTLTLYVGKKQLVEIEKVVLHPNYSQVDIGLIKLKQKVSVNERVMPICLPSKDYAEVGRVGYVSGWGRNANFKFTDHLKYVMLPVADQDQCIRHYEGSTVPEKKTPKSPVGVQPILNEHTFCAGMSKYQEDTCYGDAGSAFAVHDLEEDTWYATGILSFDKSCAVAEYGVYVKVTSIQDWVQKTIAEN

SEQ ID NO: 10453 - DNA, 880 bp, Homo sapiens
cagtatgtgggaagcccaagaatccggcaaacccagtgcagcggatcctgggtggacacctggatgccaaaggcagctttccctggcaggctaagatggtttcccaccataatctcaccacaggtgccacgctgatcaatgaacaatggctgctgaccacggctaaaaatctcttcctgaaccattcagaaaatgcaacagcgaaagacattgcccctactttaacactctatgtggggaaaaagcagcttgtagagattgagaaggttgttctacaccctaactactcccaggtagatattgggctcatcaaactcaaacagaagttatgtttctggctgggggcgaaatgccaattttaaatttactgaccatctgaagtatgtcatgctgcctgtggctgaccaagaccaatgcataaggcattatgaaggcagcacagtccccgaaaagaagacaccgaagagccctgtaggggtgcagcccatactgaatgaacacaccttctgtgctggcatgtctaagtaccaagaagacacctgctatggcgatgcgggcagtgcctttgccgttcacgacctggaggaggacacctggtatgcgactgggatcttaagctttgataagagctgtgctgtggctgagtatggtgtgtatgtgaaggtgacttccatccaggactgggttcagaagaccatagctgagaactaatgcaaggctggccggaagcccttgcctgaaagcaagatttcagcctggaagagggcaaagtggacgggagtggacaggagtggatgcgataagatgtggtttgaagctgatgggtgccagccctgcattgctgagtcaatcaataaagagctttcttttgacccatttc

SEQ ID NO: 10454 - protein, 88 aa, Homo sapiens
MVSHHNLTTGATLINEQWLLTTAKNLFLNHSENATAKDIAPTLTLYVGKKQLVEIEKVVLHPNYSQVDIGLIKLKQKLCFWLGAKCQF

SEQ ID NO: 10455 - DNA, 832 bp, Homo sapiens
cagtatgtgggaagcccaagaatccggcaaacccagtgcagcggatcctgggtggacacctggatgccaaaggcagctttccctggcaggctaagatggtttcccaccataatctcaccacaggtgccacgctgatcaatgaacaatggctgctgaccacggctaaaaatctcttcctgaaccattcagaaaatgcaacagcgaaagacattgcccctactttaacactctatgtggggaaaaagcagcttgtagagattgagaaggttgttctacaccctaactactcccaggtagatattgggctcatcaaactcaaacagaaggtgtctgttaatgagagagtgatgcccatctgcctaccttcaaaggattatgcagaagtagggcgtgtgggttatgtttctggctgggggcgaaatgccaattttaaatttactgaccatctgaagtatgtcatgctgcctgtggctgaccaagaccaatgcataaggcattatgaaggcagcacagtccccgaaaagaagacaccgaagagccctgtaggggtgcagcccatactgaatgaacacaccttctgtgctggcatgtctaagtaccaagaagacacctgctatggcgatgcgggcagtgcctttgccgttcacgacctggaggaggacacctggtatgcgactgggatcttaagctttgataagagctgtgctgtggctgagtatggtgtgtatgtgaaggtgacttccatccaggactgggttcagaagaccatagctgagaactaatgcaaggctggccggaagcccttgcctgaaagcaagatttcagctggaaa

SEQ ID NO: 10456 - protein, 228 aa, Homo sapiens; identical to SEQ ID NO: 10452

SEQ ID NO: 10457 - DNA, 1246 bp, Homo sapiens
actgctcttccagaggcaagaccaaccaagatgagtgacctgggagctgtcatttccctcctgctctggggacgacagctttttgcactgtactcaggcaatgatgtcacggatatttcagatgaccgcttcccgaagccccctgagattgcaaatggctatgtggagcacttgtttcgctaccagtgtaagaactactacagactgcgcacagaaggagatggagtatacaccttaaatgataagaagcagtggataaataaggctgttggagataaacttcctgaatgtgaagcagtatgtgggaagcccaagaatccggcaaacccagtgcagcggatcctgggtggacacctggatgccaaaggcagctttccctggcaggctaagatggtttcccaccataatctcaccacaggggccacgctgatcaatgaacaatggctgctgaccacggctaaaaatctcttcctgaaccattcagaaaatgcaacagcgaaagacattgcccctactttaacactctatgtggggaaaaagcagcttgtagagattgagaaggtggttctacaccctaactaccaccaggtagatattgggctcatcaaactcaaacagaaggtgcttgttaatgagagagtgatgcccatctgcctaccttcaaagaattatgcagaagtagggcgtgtgggttacgtgtctggctggggacaaagtgacaactttaaacttactgaccatctgaagtatgtcatgctgcctgtggctgaccaatacgattgcataacgcattatgaaggcagcacatgccccaaatggaaggcaccgaagagccctgtaggggtgcagcccatactgaacgaacacaccttctgtgtcggcatgtctaagtaccaggaagacacctgctatggcgatgcgggcagtgcctttgccgttcacgacctggaggaggacacctggtacgcggctgggatcctaagctttgataagagctgtgctgtggctgagtatggtgtgtatgtgaaggtgacttccatccagcactgggttcagaagaccatagctgagaactaatgcaaggctggccggaagcccttgcctgaaagcaagatttcagcctggaagagggcaaagtggacgggagtggacaggagtggatgcgataagatgtggtttgaagctgatgggtgccagccctgcattgctgagtcaatcaataaagagctttcttttgacccatttc

SEQ ID NO: 10458 - protein, 348 aa, Homo sapiens; identical to SEQ ID NO: 1687

SEQ ID NO: 10459 - DNA, 565 bp, Homo sapiens
gctcttccagaggcaagaccaaccaagatgagtgacctgggagctgtcatttccctcctgctctggggacgacagctttttgcactgtactcaggcaatgatgtcacggatatttcagatgaccgcttcccgaagccccctgagattgcaaatggctatgtggagcacttgtttcgctaccagtgtaagaactactacagactgcgcacagaaggagatggtaagacctggacaactatctctgtgctctacctacaacccctgctctgacatttccatgatgggtggtgctgaggtgatttgccagaaagttcgttgctctccttggagccaggagatttagattctgataagcgttttgtcgccagtagccatggccctttgggcagactaacttttgtcagcctcaggttttctgttttgttaaggggaggtgatgccatgcagcctacctcatgtaaatctcagagtcagatttacatctccagcagatgtgggaaaagaaggaatgctgatgatgatgtcaccctcacctagtgagtcttgctgtcctggcactgctcta

SEQ ID NO: 10460 - protein, 81 aa, Homo sapiens
MMSRIFQMTASRSPLRLQMAMWSTCFATSVRTTTDCAQKEMVRPGQLSLCSTYNPCSDISMMGGAEVICQKVRCSPWSQEI

SEQ ID NO: 10461 - DNA, 2608 bp, Homo sapiens
ttattgggctgttgagcgggggccgaccgacggccaggagtttcttttctgcgcttgtgcgttttctgttcggtttccttcccgctagcggggccacgagggttgctaggcaacagcccctgggtgacttggtcttagggtcctgtccggcttggggctgatgaaaggagctgtccgcgcccgggctcttccgagaagtggttgctgacagccacaaagtgaaagggagtgaggcggcgtggacgagtaaggagtgacagtgaggattcacatttgggttatttcaagatgagcttcctactgcccaagctgactagcaaaaaggaagtagaccaggcgataaaaagtactgctgagaaggtgttggttctcaggtttgggagagatgaagatcctgtctgtctgcagctagatgatatttgtgctgcctccagtatgtgcctgatgcagagagagacctaacccagaactaagacctcttaccgccatttctactgctaccatcccctttctaagacctcttctgacttaagtaaaatggctgctatatacctggtagatgtggaccaaactgcagtttatacacagtattttgacatcagttatattccatctactgtctttttcttcaatgggcagcatatgaaagtggattatggatctccagatcacactaagtttgtgggaagcttcaaaaccaaacaagacttcatagatttgattgaagtaatctatcgaggagcaatgagggggaagcttattgtccaaagtcctattgatcccaagaatattcccaaatatgaccttctctatcaagacatttagtacattaattgctgtcaaagatgaagaagaaggcacatcttgacacagtacctgaatccagctgtgctgtgtttctggagtcctttggaaacatgtgtcccagaggagaagaggtttgacttgcgtgtagaaaacccggcccctgaggaaaagaccccactggttctctgatgacctgggatgcctaactgtctactccctgcaagcctcagagcagccaagtcattggtgttcattttccccacagtgatttttgtaacttctctttctaatgtttttctttatccctttaatacagaaccctcccaaacattggctagtacaacttgatttcatcatgttcatttgatacacaagtgaactggaaagtcacttcccatagaagcaaaagtacttattttctaccctagctgggtgcatgtgtgtgcacacacacacacacacacacccccacacccctttgccggttcctcgactcatacatccctcgtgctttcccatctccagtctgtattactgtaggttctcttcaaataattaattgagcagacaagtttgttttattttggagcctttttggctctggcttttaaacattgtcctggttggctcatttaatttttttttttttttttgagaccgagtcactcttgtcacccaggctggagtgcagtggcgcgatctcggctcactgcaagctccacctcctgggttcatgccattttcctgcttcagcctcctgagtagctgggactacaggcgcccgccaccatgcccagctaattttttgtatttttatagaggcgcagtttcaccgtgttagccaagatggtctcgatctcctgacctcgtgatctgccctcctcagcctcccaggtgctgggattataggcgtgagccaccgcgcgcaccccatttaattattttttatgttataaaatttaatatggaaagtgagaatttgaaccttcaccatccaccactctattcaggtaaaacaatgaatgagccaccttagcaggagcagatttttcccagaagctgctgcctcttcctgaggcagaaaattggattactaaggctcaaaactaaaagagatgtcagcattgttggatagaaatgtcacctatatgggatttgcctgttttaataactttgtaaggaattcttgctcttctaggggtgcctggcgcaaccgtgggcaagttactgctcctctttaaacctcgtggtggttattgaaacagatttattagaaggagagggtaggtgcagagctggagagccatgggtgaggcagcttgtgacctgcctagcagccgctgaccacctctccaacagaagcctagtcctgttcagagcagcactgtcactgcaagtccagccccctttgccaggggctccattccacccctttcctgcagggaggggtgccatgagtcttgcttttggctcatacaggagagagggaaggctgccaggcactgcttgtatccctgctgataagaggagggagtcactccaggaataagacaaaaggagaggaggaggccatcacctctggcctcttccatcgtacacttcctgtctctggtttaatcatgatgcatggagctacaacagccatcttaggtccccgaggtgcccagcatcacgtaaaacatcgatatgctaagaagaacaaaaagagcccaatctctgatgttattgagctcctgcatgaactctggacctgcctgcctcagacttctgtgaaagaataaaatttctttttgcctaagtc

SEQ ID NO: 10462 - protein, 95 aa, Homo sapiens
MAAIYLVDVDQTAVYTQYFDISYIPSTVFFFNGQHMKVDYGSPDHTKFVGSFKTKQDFIDLIEVIYRGAMRGKLIVQSPIDPKNIPKYDLLYQDI

SEQ ID NO: 10463 - DNA, 2555 bp, Homo sapiens
gagcaaggtgggcggtgactagaagctcttccgtttattgggctgttgagcgggggccgaccgacggccaggagtttcttttctgcgcttgtgcgttttctgttcggtttccttcccgctagcggggccacgagggttgctaggcaacagcccctgggtgacttggtcttagggtcctgtccggcttggggctgatgaaaggagctgtccgcgcccgggctcttccgagaagtggttgctgacagccacaaagtgaaagggagtgaggcggcgtggacgagtaaggagtgacagtgaggattcacatttgggttatttcaagatgagcttcctactgcccaagctgactagcaaaaaggaagtagaccaggcgataaaaagtactgctgagaaggtgttggttctcaggtttgggagagatgaagatcctgtctgtctgcagctagatgatattctttctaagacctcttctgacttaagtaaaatggctgctatatacctggtagatgtggaccaaactgcagtttatacacagtattttgacatcagttatattccatctactgtctttttcttcaatgggcagcatatgaaagtggattatggatctccagatcacactaagtttgtgggaagcttcaaaaccaaacaagacttcatagatttgattgaagtaatctatcgaggagcaatgagggggaagcttattgtccaaagtcctattgatcccaagaatattcccaaatatgaccttctctatcaagacatttagtacattaattgctgtcaaagatgaagaagaaggcacatcttgacacagtacctgaatccagctgtgctgtgtttctggagtcctttggaaacatgtgtcccagaggagaagaggtttgacttgcgtgtagaaaacccggcccctgaggaaaagaccccactggttctctgatgacctgggatgcctaactgtctactccctgcaagcctcagagcagccaagtcattggtgttcattttccccacagtgatttttgtaacttctctttctaatgtttttctttatccctttaatacagaaccctcccaaacattggctagtacaacttgatttcatcatgttcatttgatacacaagtgaactggaaagtcacttcccatagaagcaaaagtacttattttctaccctagctgggtgcatgtgtgtgcacacacacacacacacacacccccacacccctttgccggttcctcgactcatacatccctcgtgctttcccatctccagtctgtattactgtaggttctcttcaaataattaattgagcagacaagtttgttttattttggagcctttttggctctggcttttaaacattgtcctggttggctcatttaatttttttttttttttttgagaccgagtcactcttgtcacccaggctggagtgcagtggcgcgatctcggctcactgcaagctccacctcctgggttcatgccattttcctgcttcagcctcctgagtagctgggactacaggcgcccgccaccatgcccagctaattttttgtatttttatagaggcgcagtttcaccgtgttagccaagatggtctcgatctcctgacctcgtgatctgccctcctcagcctcccaggtgctgggattataggcgtgagccaccgcgcgcaccccatttaattattttttatgttataaaatttaatatggaaagtgagaatttgaaccttcaccatccaccactctattcaggtaaaacaatgaatgagccaccttagcaggagcagatttttcccagaagctgctgcctcttcctgaggcagaaaattggattactaaggctcaaaactaaaagagatgtcagcattgttggatagaaatgtcacctatatgggatttgcctgttttaataactttgtaaggaattcttgctcttctaggggtgcctggcgcaaccgtgggcaagttactgctcctctttaaacctcgtggtggttattgaaacagatttattagaaggagagggtaggtgcagagctggagagccatgggtgaggcagcttgtgacctgcctagcagccgctgaccacctctccaacagaagcctagtcctgttcagagcagcactgtcactgcaagtccagccccctttgccaggggctccattccacccctttcctgcagggaggggtgccatgagtcttgcttttggctcatacaggagagagggaaggctgccaggcactgcttgtatccctgctgataagaggagggagtcactccaggaataagacaaaaggagaggaggaggccatcacctctggcctcttccatcgtacacttcctgtctctggtttaatcatgatgcatggagctacaacagccatcttaggtccccgaggtgcccagcatcacgtaaaacatcgatatgctaagaagaacaaaaagagcccaatctctgatgttattgagctcctgcatgaactctggacctgcctgcctcagacttctgtgaaagaataaaatttctttttgcctaagtc

SEQ ID NO: 10464 - protein, 149 aa, Homo sapiens; identical to SEQ ID NO: 1689

SEQ ID NO: 10465 - DNA, 2508 bp, Homo sapiens
gagatcgcccaccagattgcctggtataaatgacactgtgagagagcagaggaagacacaaggagtcctactcgggctcggtgacagtctggggtgggttaaagcggaggcctgggagagggaccaaggccactccaggcagcatccctggatctcagcgaggccgctccaggcagcaggatttgaccagagcaaggaggaaggccaaggcggccaggacggatgcagcatccctgaggagtgacagtgaggattcacatttgggttatttcaagatgagcttcctactgcccaagctgactagcaaaaaggaagtagaccaggcgataaaaagtactgctgagaaggtgttggttctcaggtttgggagagatgaagatcctgtctgtctgcagctagatgatattctttctaagacctcttctgacttaagtaaaatggctgctatatacctggtagatgtggaccaaactgcagtttatacacagtattttgacatcagttatattccatctactgtctttttcttcaatgggcagcatatgaaagtggattatggatctccagatcacactaagtttgtgggaagcttcaaaaccaaacaagacttcatagatttgattgaagtaatctatcgaggagcaatgagggggaagcttattgtccaaagtcctattgatcccaagaatattcccaaatatgaccttctctatcaagacatttagtacattaattgctgtcaaagatgaagaagaaggcacatcttgacacagtacctgaatccagctgtgctgtgtttctggagtcctttggaaacatgtgtcccagaggagaagaggtttgacttgcgtgtagaaaacccggcccctgaggaaaagaccccactggttctctgatgacctgggatgcctaactgtctactccctgcaagcctcagagcagccaagtcattggtgttcattttccccacagtgatttttgtaacttctctttctaatgtttttctttatccctttaatacagaaccctcccaaacattggctagtacaacttgatttcatcatgttcatttgatacacaagtgaactggaaagtcacttcccatagaagcaaaagtacttattttctaccctagctgggtgcatgtgtgtgcacacacacacacacacacacccccacacccctttgccggttcctcgactcatacatccctcgtgctttcccatctccagtctgtattactgtaggttctcttcaaataattaattgagcagacaagtttgttttattttggagcctttttggctctggcttttaaacattgtcctggttggctcatttaatttttttttttttttttgagaccgagtcactcttgtcacccaggctggagtgcagtggcgcgatctcggctcactgcaagctccacctcctgggttcatgccattttcctgcttcagcctcctgagtagctgggactacaggcgcccgccaccatgcccagctaattttttgtatttttatagaggcgcagtttcaccgtgttagccaagatggtctcgatctcctgacctcgtgatctgccctcctcagcctcccaggtgctgggattataggcgtgagccaccgcgcgcaccccatttaattattttttatgttataaaatttaatatggaaagtgagaatttgaaccttcaccatccaccactctattcaggtaaaacaatgaatgagccaccttagcaggagcagatttttcccagaagctgctgcctcttcctgaggcagaaaattggattactaaggctcaaaactaaaagagatgtcagcattgttggatagaaatgtcacctatatgggatttgcctgttttaataactttgtaaggaattcttgctcttctaggggtgcctggcgcaaccgtgggcaagttactgctcctctttaaacctcgtggtggttattgaaacagatttattagaaggagagggtaggtgcagagctggagagccatgggtgaggcagcttgtgacctgcctagcagccgctgaccacctctccaacagaagcctagtcctgttcagagcagcactgtcactgcaagtccagccccctttgccaggggctccattccacccctttcctgcagggaggggtgccatgagtcttgcttttggctcatacaggagagagggaaggctgccaggcactgcttgtatccctgctgataagaggagggagtcactccaggaataagacaaaaggagaggaggaggccatcacctctggcctcttccatcgtacacttcctgtctctggtttaatcatgatgcatggagctacaacagccatcttaggtccccgaggtgcccagcatcacgtaaaacatcgatatgctaagaagaacaaaaagagcccaatctctgatgttattgagctcctgcatgaactctggacctgcctgcctcagacttctgtgaaagaataaaatttctttttgcctaagtc

SEQ ID NO: 10466 - protein, 149 aa, Homo sapiens; identical to SEQ ID NO: 1689

SEQ ID NO: 10467 - DNA, 923 bp, Homo sapiens
gagcaaggtgggcggtgactagaagctcttccgtttattgggctgttgagcgggggccgaccgacggccaggagtttcttttctgcgcttgtgcgttttctgttcggtttccttcccgctagcggggccacgagggttgctaggcaacagcccctgggtgacttggtcttagggtcctgtccggcttggggctgatgaaaggagctgtccgcgcccgggctcttccgagaagtggttgctgacagccacaaagtgaaagggagtgaggcggcgtggacgagtaaggagtgacagtgaggattcacatttgggttatttcaagatgagcttcctactgcccaagctgactagcaaaaaggaagtagaccaggcgataaaaagtactgctgagaaggtgttggttctcaggtttgggagagatgaagatcctgtctgtctgcagctagatgatattctttctaagacctcttctgacttaagtaaaatggctgctatatacctggtagatgtggaccaaactgcagtttatacacagtattttgacatcagttatattccatctactgtctttttcttcaatgggcagcatatgaaagtggattatgggagagagggaaggctgccaggcactgcttgtatccctgctgataagaggagggagtcactccaggaataagacaaaaggagaggaggaggccatcacctctggcctcttccatcgtacacttcctgtctctggtttaatcatgatgcatggagctacaacagccatcttaggtccccgaggtgcccagcatcacgtaaaacatcgatatgctaagaagaacaaaaagagcccaatctctgatgttattgagctcctgcatgaactctggacctgcctgcctcagacttctgtgaaagaataaaatttctttttgcct

SEQ ID NO: 10468 - protein, 117 aa, Homo sapiens
MSFLLPKLTSKKEVDQAIKSTAEKVLVLRFGRDEDPVCLQLDDILSKTSSDLSKMAAIYLVDVDQTAVYTQYFDISYIPSTVFFFNGQHMKVDYGREGRLPGTACIPADKRRESLQE

SEQ ID NO: 10469 - DNA, 1136 bp, Homo sapiens
ttattgggctgttgagcgggggccgaccgacggccaggagtttcttttctgcgcttgtgcgttttctgttcggtttccttcccgctagcggggccacgagggttgctaggcaacagcccctgggtgacttggtcttagggtcctgtccggcttggggctgatgaaaggagctgtccgcgcccgggctcttccgagaagtggttgctgacagccacaaagtgaaagggagtgaggcggcgtggacgagtaaggagtgacagtgaggattcacatttgggttatttcaagatgagcttcctactgcccaagctgactagcaaaaaggaagtagaccaggcgataaaaagtactgctgagaaggtgttggttctcaggtttgggagagatgaagatcctgtctgtctgcagctagatgatatttgtgctgcctccagtatgtgcctgatgcagagagagacctaacccagaactaagacctcttaccgccatttctactgctaccatcccctttctaagacctcttctgacttaagtaaaatggctgctatatacctggtagatgtggaccaaactgcagtttatacacagtattttgacatcagttatattccatctactgtctttttcttcaatgggcagcatatgaaagtggattatggatctccagatcacactaagtttgtgggaagcttcaaaaccaaacaagacttcatagatttgattgaagtaatctatcgaggagcaatgagggggaagcttattgtccaaagtcctattgatcccaagaatattcccaaatatgaccttctctatcaagacatttagtacattaattgctgtcaaagatgaagaagaaggcacatcttgacacagtacctgaatccagctgtgctgtgtttctggagtcctttggaaacatgtgtcccagaggagaagaggtttgacttgcgtgtagaaaacccggcccctgaggaaaagaccccactggttctctgatgacctgggatgcctaactgtctactccctgcaagcctcagagcagccaagtcattggtgttcattttccccacagtgatttttgtaacttctctttctaatgtttttctttatccctttaatacagaaccctcccaaac

SEQ ID NO: 10470 - protein, 95 aa, Homo sapiens; identical to SEQ ID NO: 10462

SEQ ID NO: 10471 - DNA, 1083 bp, Homo sapiens
gagcaaggtgggcggtgactagaagctcttccgtttattgggctgttgagcgggggccgaccgacggccaggagtttcttttctgcgcttgtgcgttttctgttcggtttccttcccgctagcggggccacgagggttgctaggcaacagcccctgggtgacttggtcttagggtcctgtccggcttggggctgatgaaaggagctgtccgcgcccgggctcttccgagaagtggttgctgacagccacaaagtgaaagggagtgaggcggcgtggacgagtaaggagtgacagtgaggattcacatttgggttatttcaagatgagcttcctactgcccaagctgactagcaaaaaggaagtagaccaggcgataaaaagtactgctgagaaggtgttggttctcaggtttgggagagatgaagatcctgtctgtctgcagctagatgatattctttctaagacctcttctgacttaagtaaaatggctgctatatacctggtagatgtggaccaaactgcagtttatacacagtattttgacatcagttatattccatctactgtctttttcttcaatgggcagcatatgaaagtggattatggatctccagatcacactaagtttgtgggaagcttcaaaaccaaacaagacttcatagatttgattgaagtaatctatcgaggagcaatgagggggaagcttattgtccaaagtcctattgatcccaagaatattcccaaatatgaccttctctatcaagacatttagtacattaattgctgtcaaagatgaagaagaaggcacatcttgacacagtacctgaatccagctgtgctgtgtttctggagtcctttggaaacatgtgtcccagaggagaagaggtttgacttgcgtgtagaaaacccggcccctgaggaaaagaccccactggttctctgatgacctgggatgcctaactgtctactccctgcaagcctcagagcagccaagtcattggtgttcattttccccacagtgatttttgtaacttctctttctaatgtttttctttatccctttaatacagaaccctcccaaac

SEQ ID NO: 10472 - protein, 149 aa, Homo sapiens; identical to SEQ ID NO: 1689

SEQ ID NO: 10473 - DNA, 1036 bp, Homo sapiens
gagatcgcccaccagattgcctggtataaatgacactgtgagagagcagaggaagacacaaggagtcctactcgggctcggtgacagtctggggtgggttaaagcggaggcctgggagagggaccaaggccactccaggcagcatccctggatctcagcgaggccgctccaggcagcaggatttgaccagagcaaggaggaaggccaaggcggccaggacggatgcagcatccctgaggagtgacagtgaggattcacatttgggttatttcaagatgagcttcctactgcccaagctgactagcaaaaaggaagtagaccaggcgataaaaagtactgctgagaaggtgttggttctcaggtttgggagagatgaagatcctgtctgtctgcagctagatgatattctttctaagacctcttctgacttaagtaaaatggctgctatatacctggtagatgtggaccaaactgcagtttatacacagtattttgacatcagttatattccatctactgtctttttcttcaatgggcagcatatgaaagtggattatggatctccagatcacactaagtttgtgggaagcttcaaaaccaaacaagacttcatagatttgattgaagtaatctatcgaggagcaatgagggggaagcttattgtccaaagtcctattgatcccaagaatattcccaaatatgaccttctctatcaagacatttagtacattaattgctgtcaaagatgaagaagaaggcacatcttgacacagtacctgaatccagctgtgctgtgtttctggagtcctttggaaacatgtgtcccagaggagaagaggtttgacttgcgtgtagaaaacccggcccctgaggaaaagaccccactggttctctgatgacctgggatgcctaactgtctactccctgcaagcctcagagcagccaagtcattggtgttcattttccccacagtgatttttgtaacttctctttctaatgtttttctttatccctttaatacagaaccctcccaaac

SEQ ID NO: 10474 - protein, 149 aa, Homo sapiens; identical to SEQ ID NO: 1689

SEQ ID NO: 10475 - DNA, 932 bp, Homo sapiens
cttttcctgcccccagactagaggcgggatgtagtctcttaggctaagagtgattggtcacaaggagactcggaagtgtctgatcagagccccagaggaggccttgagagcctgttggcgtaccgttccacacttggatccaggaatcgggcgtgttccaggctgctctctatggtagctttgggcggatagagggggcgcgcaaagtattaagggacaataatggccgctttcaaggtgtggattttggctccttgagcctgtctgagcgaggggtggcagcgccggcgccccagaatccgggacagaagggtcccaagagtcgcgcttggtgagagaaatcccagatcctgtgatgggggacaccagtgaggatgcctcgatccatcgattggaaggcactgatctggactgtcaggttggtggtcttatttgcaagtccaaaagtgcggccagcgagcagcatgtcttcaaggctcctgctccccgcccttcattactcggactggacttgctggcttccctgaaacggagagagcgagaggagaaggacgatggggaggacaagaagaagtccaaagtctcctcctacaaggactgggaagagagcaaggatgaccagaaggatgctgaggaagagggcggtgaccaggctggccaaaatatccggaaagacagacattatcggtctgctcgggtagagactccatcccatccgggtggtgtgagcgaagagttttgggaacgcagtcggcagagagagcgggagcggcgggaacatggtgtctatgcctcgtccaaagaagaaaaggattggaagaaggagaaatcgcgggatcgagactatgaccgcaagagggacagagatggatgcggagaagtttgctgccttttttgggaatgtccccatcttccacatccctggccgtacc

SEQ ID NO: 10476 - protein, 191 aa, Homo sapiens
MGDTSEDASIHRLEGTDLDCQVGGLICKSKSAASEQHVFKAPAPRPSLLGLDLLASLKRREREEKDDGEDKKKSKVSSYKDWEESKDDQKDAEEEGGDQAGQNIRKDRHYRSARVETPSHPGGVSEEFWERSRQRERERREHGVYASSKEEKDWKKEKSRDRDYDRKRDRDGCGEVCCLFWECPHLPHPWP

SEQ ID NO: 10477 - DNA, 4454 bp, Homo sapiens
cttttcctgcccccagactagaggcgggatgtagtctcttaggctaagagtgattggtcacaaggagactcggaagtgtctgatcagagccccagaggaggccttgagagcctgttggcgtaccgttccacacttggatccaggaatcgggcgtgttccaggctgctctctatggtagctttgggcggatagagggggcgcgcaaagtattaagggacaataatggccgctttcaaggtgtggattttggctccttgagcctgtctgagcgaggggtggcagcgccggcgccccagaatccgggacagaagggtcccaagagtcgcgcttggtgagagaaatcccagatcctgtgatgggggacaccagtgaggatgcctcgatccatcgattggaaggcactgatctggactgtcaggttggtggtcttatttgcaagtccaaaagtgcggccagcgagcagcatgtcttcaaggctcctgctccccgcccttcattactcggactggacttgctggcttccctgaaacggagagagcgagaggagaaggacgatggggaggacaagaagaagtccaaagtctcctcctacaaggactgggaagagagcaaggatgaccagaaggatgctgaggaagagggcggtgaccaggctggccaaaatatccggaaagacagacattatcggtctgctcgggtagagactccatcccatccgggtggtgtgagcgaagagttttgggaacgcagtcggcagagagagcgggagcggcgggaacatggtgtctatgcctcgtccaaagaagaaaaggattggaagaaggagaaatcgcgggatcgagactatgaccgcaagagggacagagatgagcgggatagaagtaggcacagcagcagatcagagcgagatggagggtcagagcgtagcagcagaagaaatgaacccgagagcccacgacatcgacctaaagatgcagccaccccttcaaggtctacctgggaggaagaggacagtggctatggctcctcaaggcgctcacagtgggaatcgccctccccgacgccttcctatcgggattctgagcggagccatcggctgtccactcgagatcgagacaggtctgtgaggggcaagtactcggatgacacgcctctgccaactccctcctacaaatataacgagtgggccgatgacagaagacacttggggtccaccccgcgtctgtccaggggccgaggaagacgtgaggagggcgaagaaggaatttcatttgacacggaggaggagcggcagcagtgggaagatgaccagaggcaagccgatcgggattggtacatgatggacgagggctatgacgagttccacaacccgctggcctactcctccgaggactacgtgaggaggcgggagcagcacctgcataaacagaagcagaagcgcatttcagctcagcggagacagatcaatgaggataacgagcgctgggagacaaaccgcatgctcaccagtggggtggtccatcggctggaggtggatgaggactttgaagaggacaacgcggccaaggtgcatctgatggtgcacaatctggtgcctccctttctggatgggcgcattgtcttcaccaagcagccggagccggtgattccagtgaaggatgctacttctgacctggccatcattgctcggaaaggcagccagacagtgcggaagcacagggagcagaaggagcgcaagaaggctcagcacaaacactgggaactggcggggaccaaactgggagatataatgggcgtcaagaaggaggaagagccagataaagctgtgacggaggatgggaaggtggactacaggacagagcagaagtttgcagatcacatgaagagaaagagcgaagccagcagtgaatttgcaaagaagaagtccatcctggagcagaggcagtacctgcccatctttgcagtgcagcaggagctgctcactattatcagagacaacagcatcgtgatcgtggttggggagacggggagtggtaagaccactcagctgacgcagtacctgcatgaagatggttacacggactatgggatgattgggtgtacccagccccggcgtgtagctgccatgtcagtggccaagagagtcagtgaagagatggggggaaaccttggcgaggaggtgggctatgccatccgctttgaagactgcacttcagagaacaccttgatcaaatacatgactgacgggatcctgctccgagagtccctccgggaagccgacctggatcactacagtgccatcatcatggacgaggcccacgagcgctccctcaacactgacgtgctctttgggctgctccgggaggtagtggctcggcgctcagacctgaagctcatcgtcacatcagccacgatggatgcggagaagtttgctgccttttttgggaatgtccccatcttccacatccctggccgtaccttccctgttgacatcctcttcagcaagaccccacaggaggattacgtggaggctgcagtgaagcagtccttgcaggtgcacctgtcgggggcccctggagacatccttatcttcatgcctggccaagaggacattgaggtgacctcagaccagattgtggagcatctggaggaactggagaacgcgcctgccctggctgtgctgcccatctactctcagctgccttctgacctccaggccaaaatcttccagaaggctccagatggcgttcggaagtgcatcgttgccaccaatattgccgagacgtctctcactgttgacggcatcatgtttgttatcgattctggttattgcaaattaaaggtcttcaaccccaggattggcatggatgctctgcagatctatcccattagccaggccaatgccaaccagcggtcagggcgagccggcaggacgggcccaggtcagtgtttcaggctctacacccagagcgcctacaagaatgagctcctgaccaccacagtgcccgagatccagaggactaacctggccaacgtggtgctgctgctcaagtccctcggggtgcaggacctgctgcagttccacttcatggacccgcccccggaggacaacatgctcaactctatgtatcagctctggatcctcggggccctggacaacacaggtggtctgacctctaccgggcggctgatggtggagttcccgctggaccctgccctgtccaagatgctcatcgtgtcctgtgacatgggctgcagctccgagatcctgctcatcgtttccatgctctcggtcccagccatcttctacaggcccaagggtcgagaggaggagagtgatcaaatccgggagaagttcgctgttcctgagagcgatcatttgacctacctgaatgtttacctgcagtggaagaacaataattactccaccatctggtgtaacgatcatttcatccatgctaaggccatgcggaaggtccgggaggtgcgagctcaactcaaggacatcatggtgcagcagcggatgagcctggcctcgtgtggcactgactgggacatcgtcaggaagtgcatctgtgctgcctatttccaccaagcagccaagctcaagggaatcggggagtacgtgaacatccgcacagggatgccctgccacttgcaccccaccagctccctttttggaatgggctacaccccagattacatagtgtatcacgagttggtcatgaccaccaaggagtatatgcagtgtgtgaccgctgtggacggggagtggctggcggagctgggccccatgttctatagcgtgaaacaggcgggcaagtcacggcaggagaaccgtcgtcgggccaaagaggaagcctctgccatggaggaggagatggcgctggccgaggagcagctgcgagcccggcggcaggagcaggagaagcgcagccccctgggcagtgtcaggtctacgaagatctacactccaggccggaaagagcaaggggagcccatgacccctcgccgcacgccagcccgctttggtctgtgagctgaggctgtccccagagaggatggcagcaggtattgggtcctcagccttctggcgggagccctgaggctgcggacaaagccctttcatctgaggactttcatctgtgcatatcacggccccccagggcagttcctgctggaccagactctctggcagaggaggtggagttcttccatgcaggagcacggcatggcgggagcggggctgcagagtatccgaggtgctgccggggcagcgggaggtggctggacccatcgcatctaaaactggcccaggacacttggtgtatgcgtgacttggctgtggctgtcttttttaatccttgtgtaaagcagcaaaaaagacctaaagggaattgtaatttggttataattcaggatttggaaataaatttattatttgtaaaacatga

SEQ ID NO: 10478 - protein, 1227 aa, Homo sapiens; identical to SEQ ID NO: 1691

SEQ ID NO: 10479 - DNA, 230 bp, Homo sapiens
cagaatcccgataggaaggcgtcggggagggcgattcccactgtgagcgccttgaggagccatagccactgtcctcttcctcccaggaaccatatccaccccaagtgcagagctgtgcccacctgactcagaaccaactatcccaagatgttcatggtagaatcgggaattctgactcaatgcctcagcaatctcactgaagacgagagtcactcactctgccttttata

SEQ ID NO: 10480 - protein, 41 aa, Homo sapiens
QNPDRKASGRAIPTVSALRSHSHCPLPPRNHIHPKCRAVPT

SEQ ID NO: 10481 - DNA, 474 bp, Homo sapiens
ttgcagaccccacaggaggattacgtggaggctgcagtgaagcagtccttgcaggtgcacctgtcgggggcccctggagacatccttatcttcatgtggtctgacctctaccgggcggctgatggtggagttcccgctggaccctgccctgtccaagatgctcatcgtgtcctgtgacatgggctgcagctccgagatcctgctcatcgtttccatgctctcggtcccagccatcttctacaggcccaagggtcgagaggaggagagtgatcaatatccgaggtgctgccggggcagcgggaggtggctggacccatcgcatctaaaactggcccaggacacttggtgtatgcgtgacttggctgtggctgtcttttttaatccttgtgtaaagcagcaaaaaagacctaaagggaattgtaatttggttataattcaggatttggaaataaatttattatttgtaaaacatga

SEQ ID NO: 10482 - protein, 116 aa, Homo sapiens
MVEFPLDPALSKMLIVSCDMGCSSEILLIVSMLSVPAIFYRPKGREEESDQYPRCCRGSGRWLDPSHLKLAQDTWCMRDLAVAVFFNPCVKQQKRPKGNCNLVIIQDLEINLLFVK

SEQ ID NO: 10483 - DNA, 884 bp, Homo sapiens
cccctcccagcctgatacctgtataagggcaaagttcttcctttgtcctggtgtggttctgcagatctgggcttccgccaaaggctgtgtcaagagtgttaagggatggggtcgctgcccaaatgggtgttgttttcctgatgtggctgcctgttgtgtctcctccctagggaatcggggagtacgtgaacatccgcacagggatgccctgccacttgcaccccaccagctccctttttggaatgggctacaccccagattacatagtgtatcacgagttggtcatgaccaccaaggagtatatgcagtgtgtgaccgctgtggacggggagtggctggcggagctgggccccatgttctatagcgtgaaacaggcgggcaagtcacggcaggtgaggattctgtgctcttcgcaggggtgctgtttgcctgtggggtcggtgttccctccgcttggtattgaagacttgcggtcatccaacccacttacttctctctgcaaacataaaggctgtgatccagcaggctgggtctgtctgattccccaccacccactccagttgtttggtaggctgagcctttaaaaacaaaaccaaaaaactcattattgaaaagtccaaatattcatgaaagtgggaaaaacagtacaacaggccaccatgaattcgttgccttgcctctataattgtcaacgtttgttcaatttcactattcctaccccactccacacacatccattttttttttctggaatattttaaagcttatctcatacattattcatccataaatacttgagtatgtgtctctgactaaaaggacttaaaattttaaatataacctctgtgccgttatcactcataaaaaaatgaatacttaatgtc

SEQ ID NO: 10484 - protein, 126 aa, Homo sapiens
MPCHLHPTSSLFGMGYTPDYIVYHELVMTTKEYMQCVTAVDGEWLAELGPMFYSVKQAGKSRQVRILCSSQGCCLPVGSVFPPLGIEDLRSSNPLTSLCKHKGCDPAGWVCLIPHHPLQLFGRLSL

SEQ ID NO: 10485 - DNA, 809 bp, Homo sapiens
ttgcctgtggggtcggtgttccctccgcttggtattgaagacttgcggtcatccaacccacttacttctctctgcaaacataaaggctgtgatccagcaggctgggtctgtctgattccccaccacccactccagttgtttggtaggctgagcctttaaaaacaaaaccaaaaaactcattattgaaaagtccaaatattcatgaaagtgggaaaaacagtacaacaggccaccatgaattcgttgccttgcctctataattgtcaacgtttgttcaatttcactattcctaccccactccacacacatccattttttttttctggaatattttaaagcttatctcatacattattcatccataaatacttgagtatgtgtctctgactaaaaggacttaaaattttaaatataacctctgtgccgttatcactcataaaaaaatgaatacttaatgtcacctaagtctccagtccgcatttggatttctccatttatctcaaagataacttcttatgatcgatttgcttgaattaggatccaggcattgcaactgcttatgtgtgttaactgtttcattctagaacaggctccaccccacgctttttttcatgacattgatttattggagcagccaggtcatttgtcccatcgcatctaaaactggcccaggacacttggtgtatgcgtgacttggctgtggctgtcttttttaatccttgtgtaaagcagcaaaaaagacctaaagggaattgtaatttggttataattcaggatttggaaataaatttattatttgtaaaacatga

SEQ ID NO: 10486 - protein, 33 aa, Homo sapiens
MCVNCFILEQAPPHAFFHDIDLLEQPGHLSHRI

SEQ ID NO: 10487 - DNA, 408 bp, Homo sapiens
catggaggaggagatggcgctggccgaggagcagctgcgaccttctggcgggagccctgaggctgcggacaaagccctttcatctgaggactttcatctgtgcatatcacggccccccagggcagttcctgctggaccagactctctggcagaggaggtggagttcttccatgcaggagcacggcatggcgggagcggggctgcagagtatccgaggtgctgccggggcagcgggaggtggctggacccatcgcatctaaaactggcccaggacacttggtgtatgcgtgacttggctgtggctgtcttttttaatccttgtgtaaagcagcaaaaaagacctaaagggaattgtaatttggttataattcaggatttggaaataaatttattatttgtaaaacatga

SEQ ID NO: 10488 - protein, 134 aa, Homo sapiens
MEEEMALAEEQLRPSGGSPEAADKALSSEDFHLCISRPPRAVPAGPDSLAEEVEFFHAGARHGGSGAAEYPRCCRGSGRWLDPSHLKLAQDTWCMRDLAVAVFFNPCVKQQKRPKGNCNLVIIQDLEINLLFVK

SEQ ID NO: 10489 - DNA, 3423 bp, Homo sapiens
attctttcttcctcttggcttatattagggataggggatgtggtttgttacaaaggatgagtattttgatagcttctcattccttgaactattctgcaggtttataacaaagctcagaaaatactaaaggttaaaggagaattgagagctgccaaggaaatgaaagatgaggcgggggagagagacagagaagtgagcagcctgaacagcaagctgttaagcctgcaacttgacatcaagaatctgcacgatgtctgcaagagacagaggaagaccttgcaggacaatcagctctgcatggaggaggcaatgaacagcagccacgacaagaagcaagcacaggcattagcattcgaggagtcagaggtggaatttgggtccagtaaacagtgtcatctgagacaactccagcaactgaagaaaaaattgctggtccttcaacaagaactggagtttcacacagaggagttgcagacttcttactattctctccgccagtatcagtccatcctagagaagcagacttccgacctggttcttctgcaccatcactgcaaactgaaagaagatgaggtgattctctatgaggaggaaatgggaaatcacaacgagaacacaggggagaagctccatttggcgcaggagcaactcgccttggccggggacaagatcgcctctctagagaggagcttaaacctctacagggataaataccagtcttccctgagcaacatcgagttactagaatgccaagtgaagatgttgcagggggaactcggcgggatcatgggtcaggagcctgagaacaagggtgatcattcaaaggtacggatatacacttctccttgcatgattcaagagcatcaggagactcagaaacgactgtctgaagtctggcaaaaggtctctcaacaggatgatctcattcaagaacttcgaaataagctggcctgcagtaacgctttggttctggagcgtgaaaaggctttgataaaactacaagccgattttgcttcctgtacagccacccacagataccctcctagctcctcagaagagtgtgaagacatcaaaaagatactgaagcacttgcaggagcagaaagacagccagtgcctgcatgtggaggagtaccagaacctggtgaaggatctgcgcgtggaactagaggccgtgtcggaacagaagagaaacatcatgaaggacatgatgaagctggagctggacctgcacggactgcgggaggagacatctgcccacattgagaggaaggataaggacatcaccatcctgcagtgccggctgcaggagctgcagctggagttcaccgagacccaaaagctcactttgaagaaagacaagttcctccaagagaaagatgagatgctgcaagagctggagaagaaactgacacaggttcagaacagcctcctgaaaaaggagaaggagctggagaagcagcagtgcatggccacagaacttgaaatgacagtcaaggaggctaagcaggacaagtccaaggaggcggagtgcaaggccctgcaggctgaggtccagaagctgaagaacagtctcgaagaggccaagcagcaggagaggctggctgctcagcaagcagcccagtgcaaagaagaggctgcactggcaggctgtcacctggaggacacccagaggaaactgcagaagggtctcctcctggacaagcagaaggcagacaccatccaggaactacagagagaacttcagatgctgcagaaggagtcctcgatggctgagaaggaacaaacctccaacagaaaacgggtggaggagctgtcattagaactctctgaagccctgaggaagcttgaaaattcagacaaggaaaagaggcagcttcagaagacagtggctgagcaggatatgaaaatgaatgacatgcttgatcgtatcaagcaccagcacagggagcaaggctccatcaaatgcaagttagaagaagatcttcaggaggccacaaagcttctggaggacaaacgggagcagttgaagaagagcaaagagcatgagaagctgatggagggagaacttgaagctttgcggcaggaatttaaaaagaaagacaagacgttgaaagagaattccagaaagttggaggaagaaaatgagaatctccgagcagagctacagtgttgttctacacaactggaatcctctctcaacaaatacaacaccagccagcaagtcatccaagacttgaataaagagatagcccttcagaaggagtccttaatgagcctgcaggcccagctggacaaagctctgcagaaggagaagcactatctccagactaccatcaccaaagaagcctatgatgcattatcccggaagtcagccgcctgccaggatgacctgacacaagccctcgagaagctcaatcacgtgacctcagagacaaagagcctgcagcaaagcttgacacagacccaagagaagaaagctcagctggaagaggaaatcattgcttatgaggaaaggatgaaaaagctcaatacggaattaagaaaactgcggggcttccaccaggagagtgagctggaggtgcacgcctttgacaagaagctagaggagatgagctgccaggtgctgcagtggcagaagcaacaccagaatgacctcaagatgctggcagccaaagaggagcagctcagggagttccaggaggagatggccgccttaaaagagaacctccttgaggacgataaggagccctgctgcctgccccagtggtctgtgcccaaagacacctgtaggctctaccgagggaatgatcagattatgaccaacttggagcaatgggcaaaacagcagaaggtcgccaatgagaaactaggaaaccagctccgagagcaggtgaaatacattgccaagctgagtggcgaaaaggaccacctccacagtgtaatggtccacttgcagcaggaaaacaagaagctgaagaaggagatagaagagaagaagatgaaagccgagaacacaaggctatgcaccaaagccctaggcccgagcagaacggagtccacacagagggagaaagtgtgcggcaccttgggctggaaggggttgccccaggatatgggtcaaagaatggacctcaccaagtacatcgggatgccccactgcccgggttcctcatactgctagaatccacatctagccctgagcagcatttccacgggtgtttcttcagaggacagtgagttcccagccctccctctctcttgacctggatcagctcttacaggagtatatcacggtcccagcctattttgcaagacactaacttttgttgagttttgtccacttcctgccatggagtgagctttagaaccatactaccatctccaggcccaaactctgaaataaagacatgagcatgagcac

SEQ ID NO: 10490 - protein, 1007 aa, Homo sapiens
MKDEAGERDREVSSLNSKLLSLQLDIKNLHDVCKRQRKTLQDNQLCMEEAMNSSHDKKQAQALAFEESEVEFGSSKQCHLRQLQQLKKKLLVLQQELEFHTEELQTSYYSLRQYQSILEKQTSDLVLLHHHCKLKEDEVILYEEEMGNHNENTGEKLHLAQEQLALAGDKIASLERSLNLYRDKYQSSLSNIELLECQVKMLQGELGGIMGQEPENKGDHSKVRIYTSPCMIQEHQETQKRLSEVWQKVSQQDDLIQELRNKLACSNALVLEREKALIKLQADFASCTATHRYPPSSSEECEDIKKILKHLQEQKDSQCLHVEEYQNLVKDLRVELEAVSEQKRNIMKDMMKLELDLHGLREETSAHIERKDKDITILQCRLQELQLEFTETQKLTLKKDKFLQEKDEMLQELEKKLTQVQNSLLKKEKELEKQQCMATELEMTVKEAKQDKSKEAECKALQAEVQKLKNSLEEAKQQERLAAQQAAQCKEEAALAGCHLEDTQRKLQKGLLLDKQKADTIQELQRELQMLQKESSMAEKEQTSNRKRVEELSLELSEALRKLENSDKEKRQLQKTVAEQDMKMNDMLDRIKHQHREQGSIKCKLEEDLQEATKLLEDKREQLKKSKEHEKLMEGELEALRQEFKKKDKTLKENSRKLEEENENLRAELQCCSTQLESSLNKYNTSQQVIQDLNKEIALQKESLMSLQAQLDKALQKEKHYLQTTITKEAYDALSRKSAACQDDLTQALEKLNHVTSETKSLQQSLTQTQEKKAQLEEEIIAYEERMKKLNTELRKLRGFHQESELEVHAFDKKLEEMSCQVLQWQKQHQNDLKMLAAKEEQLREFQEEMAALKENLLEDDKEPCCLPQWSVPKDTCRLYRGNDQIMTNLEQWAKQQKVANEKLGNQLREQVKYIAKLSGEKDHLHSVMVHLQQENKKLKKEIEEKKMKAENTRLCTKALGPSRTESTQREKVCGTLGWKGLPQDMGQRMDLTKYIGMPHCPGSSYC

SEQ ID NO: 10491 - DNA, 3919 bp, Homo sapiens
attctttcttcctcttggcttatattagggataggggatgtggtttgttacaaaggatgagtattttgatagcttctcattccttgaactattctgcaggtttataacaaagctcagaaaatactaaaggttaaaggagaattgagagctgccaaggaaatgaaagatgaggcgggggagagagacagagaagtgagcagcctgaacagcaagctgttaagcctgcaacttgacatcaagaatctgcacgatgtctgcaagagacagaggaagaccttgcaggacaatcagctctgcatggaggaggcaatgaacagcagccacgacaagaagcaagcacaggcattagcattcgaggagtcagaggtggaatttgggtccagtaaacagtgtcatctgagacaactccagcaactgaagaaaaaattgctggtccttcaacaagaactggagtttcacacagaggagttgcagacttcttactattctctccgccagtatcagtccatcctagagaagcagacttccgacctggttcttctgcaccatcactgcaaactgaaagaagatgaggtgattctctatgaggaggaaatgggaaatcacaacgagaacacaggggagaagctccatttggcgcaggagcaactcgccttggccggggacaagatcgcctctctagagaggagcttaaacctctacagggataaataccagtcttccctgagcaacatcgagttactagaatgccaagtgaagatgttgcagggggaactcggcgggatcatgggtcaggagcctgagaacaagggtgatcattcaaaggtacggatatacacttctccttgcatgattcaagagcatcaggagactcagaaacgactgtctgaagtctggcaaaaggtctctcaacaggatgatctcattcaagaacttcgaaataagctggcctgcagtaacgctttggttctggagcgtgaaaaggctttgataaaactacaagccgattttgcttcctgtacagccacccacagataccctcctagctcctcagaagagtgtgaagacatcaaaaagatactgaagcacttgcaggagcagaaagacagccagtgcctgcatgtggaggagtaccagaacctggtgaaggatctgcgcgtggaactagaggccgtgtcggaacagaagagaaacatcatgaaggacatgatgaagctggagctggacctgcacggactgcgggaggagacatctgcccacattgagaggaaggataaggacatcaccatcctgcagtgccggctgcaggagctgcagctggagttcaccgagacccaaaagctcactttgaagaaagacaagttcctccaagagaaagatgagatgctgcaagagctggagaagaaactgacacaggttcagaacagcctcctgaaaaaggagaaggagctggagaagcagcagtgcatggccacagaacttgaaatgacagtcaaggaggctaagcaggacaagtccaaggaggcggagtgcaaggccctgcaggctgaggtccagaagctgaagaacagtctcgaagaggccaagcagcaggagaggctggctgctcagcaagcagcccagtgcaaagaagaggctgcactggcaggctgtcacctggaggacacccagaggaaactgcagaagggtctcctcctggacaagcagaaggcagacaccatccaggaactacagagagaacttcagatgctgcagaaggagtcctcgatggctgagaaggaacaaacctccaacagaaaacgggtggaggagctgtcattagaactctctgaagccctgaggaagcttgaaaattcagacaaggaaaagaggcagcttcagaagacagtggctgagcaggatatgaaaatgaatgacatgcttgatcgtatcaagcaccagcacagggagcaaggctccatcaaatgcaagttagaagaagatcttcaggaggccacaaagcttctggaggacaaacgggagcagttgaagaagagcaaagagcatgagaagctgatggagggagaacttgaagctttgcggcaggaatttaaaaagaaagacaagacgttgaaagagaattccagaaagttggaggaagaaaatgagaatctccgagcagagctacagtgttgttctacacaactggaatcctctctcaacaaatacaacaccagccagcaagtcatccaagacttgaataaagagatagcccttcagaaggagtccttaatgagcctgcaggcccagctggacaaagctctgcagaaggagaagcactatctccagactaccatcaccaaagaagcctatgatgcattatcccggaagtcagccgcctgccaggatgacctgacacaagccctcgagaagctcaatcacgtgacctcagagacaaagagcctgcagcaaagcttgacacagacccaagagaagaaagctcagctggaagaggaaatcattgcttatgaggaaaggatgaaaaagctcaatacggaattaagaaaactgcggggcttccaccaggagagtgagctggaggtgcacgcctttgacaagaagctagaggagatgagctgccaggtgctgcagtggcagaagcaacaccagaatgacctcaagatgctggcagccaaagaggagcagctcagggagttccaggaggagatggccgccttaaaagagaacctccttgaggacgataaggagccctgctgcctgccccagtggtctgtgcccaaagacacctgtaggctctaccgagggaatgatcagattatgaccaacttggagcaatgggcaaaacagcagaaggtcgccaatgagaaactaggaaaccagctccgagagcaggtgaaatacattgccaagctgagtggcgaaaaggaccacctccacagtgtaatggtccacttgcagcaggaaaacaagaagctgaagaaggagatagaagagaagaagatgaaagccgagaacacaaggctatgcaccaaagccctaggcccgagcagaacggagtccacacagagggagaaagtgtgcggcaccttgggctggaaggggttgccccaggatatgggtcaaagaatggacctcaccaagtacatcgggatgccccactgcccgggtacgtctgccatttgtcaaaaaaataagtgtgatttttttctttaaatcactggattgagaattcaagtaggaagaagaaaataggccttttgtggcctcaagtcattttcttagcgactttggaccaaagatcgttgttttcacatctgtaaagggaggaggcaaattaagaccccttctgatctaagaacatctgaagcatacccaagtgcctcacatctcagacctgccccctcccctgacccagacccattttagggaacaggtagaagaggcatcttccttctacgtctggaaaccccgtaagagcaccccagccacctacccagcctgggtccacagccgcctttcctgccacctgtaaactccatgttaccccagaggcaagaagtcaccctgcagcagagctgcctggccatgcggccagcccttgaggaatcacctcgttaatttctcctcgaatcaaaactctcatttcctccctgttccctcaggttcctcatactgctagaatccacatctagccctgagcagcatttccacgggtgtttcttcagaggacagtgagttcccagccctccctctctcttgacctggatcagctcttacaggagtatatcacggtcccagcctattttgcaagacactaacttttgttgagttttgtccacttcctgccatggagtgagctttagaaccatactaccatctccaggcccaaactctgaaataaagacatgagcatgagcac

SEQ ID NO: 10492 - protein, 1017 aa, Homo sapiens
MKDEAGERDREVSSLNSKLLSLQLDIKNLHDVCKRQRKTLQDNQLCMEEAMNSSHDKKQAQALAFEESEVEFGSSKQCHLRQLQQLKKKLLVLQQELEFHTEELQTSYYSLRQYQSILEKQTSDLVLLHHHCKLKEDEVILYEEEMGNHNENTGEKLHLAQEQLALAGDKIASLERSLNLYRDKYQSSLSNIELLECQVKMLQGELGGIMGQEPENKGDHSKVRIYTSPCMIQEHQETQKRLSEVWQKVSQQDDLIQELRNKLACSNALVLEREKALIKLQADFASCTATHRYPPSSSEECEDIKKILKHLQEQKDSQCLHVEEYQNLVKDLRVELEAVSEQKRNIMKDMMKLELDLHGLREETSAHIERKDKDITILQCRLQELQLEFTETQKLTLKKDKFLQEKDEMLQELEKKLTQVQNSLLKKEKELEKQQCMATELEMTVKEAKQDKSKEAECKALQAEVQKLKNSLEEAKQQERLAAQQAAQCKEEAALAGCHLEDTQRKLQKGLLLDKQKADTIQELQRELQMLQKESSMAEKEQTSNRKRVEELSLELSEALRKLENSDKEKRQLQKTVAEQDMKMNDMLDRIKHQHREQGSIKCKLEEDLQEATKLLEDKREQLKKSKEHEKLMEGELEALRQEFKKKDKTLKENSRKLEEENENLRAELQCCSTQLESSLNKYNTSQQVIQDLNKEIALQKESLMSLQAQLDKALQKEKHYLQTTITKEAYDALSRKSAACQDDLTQALEKLNHVTSETKSLQQSLTQTQEKKAQLEEEIIAYEERMKKLNTELRKLRGFHQESELEVHAFDKKLEEMSCQVLQWQKQHQNDLKMLAAKEEQLREFQEEMAALKENLLEDDKEPCCLPQWSVPKDTCRLYRGNDQIMTNLEQWAKQQKVANEKLGNQLREQVKYIAKLSGEKDHLHSVMVHLQQENKKLKKEIEEKKMKAENTRLCTKALGPSRTESTQREKVCGTLGWKGLPQDMGQRMDLTKYIGMPHCPGTSAICQKNKCDFFL

SEQ ID NO: 10493 - DNA, 2803 bp, Homo sapiens
atcaccaacattctttcttcctcttggcttatattagggataggggatgtggtttgttacaaaggatgagtattttgatagcttctcattccttgaactattctgcaggtttataacaaagctcagaaaatactaaaggttaaaggagaattgagagctgccaaggaaatgaaagatgaggcgggggagagagacagagaagtgagcagcctgaacagcaagctgttaagcctgcaacttgacatcaagaatctgcacgatgtctgcaagagacagaggaagaccttgcaggacaatcagctctgcatggaggaggcaatgaacagcagccacgacaagaagcaagcacaggcattagcattcgaggagtcagaggtggaatttgggtccagtaaacagtgtcatctgagacaactccagcaactgaagaaaaaattgctggtccttcaacaagaactggagtttcacacagaggagttgcagacttcttactattctctccgccagtatcagtccatcctagagaagcagacttccgacctggttcttctgcaccatcactgcaaactgaaagaagatgaggtgattctctatgaggaggaaatgggaaatcacaacgagaacacaggggagaagctccatttggcgcaggagcaactcgccttggccggggacaagatcgcctctctagagaggagcttaaacctctacagggataaataccagtcttccctgagcaacatcgagttactagaatgccaagtgaagatgttgcagggggaactcggcgggatcatgggtcaggagcctgagaacaagggtgatcattcaaaggtacggatatacacttctccttgcatgattcaagagcatcaggagactcagaaacgactgtctgaagtctggcaaaaggtctctcaacaggatgatctcattcaagaacttcgaaataagctggcctgcagtaacgctttggttctggagcgtgaaaaggctttgataaaactacaagccgattttgcttcctgtacagccacccacagataccctcctagctcctcagaagagtgtgaagacatcaaaaagatactgaagcacttgcaggagcagaaagacagccagtgcctgcatgtggaggagtaccagaacctggtgaaggatctgcgcgtggaactagaggccgtgtcggaacagaagagaaacatcatgaaggacatgatgaagctggagctggacctgcacggactgcgggaggagacatctgcccacattgagaggaaggataaggacatcaccatcctgcagtgccggctgcaggagctgcagctggagttcaccgagacccaaaagctcactttgaagaaagacaagttcctccaagagaaagatgagatgctgcaagagctggagaagaaactgacacaggttcagaacagcctcctgaaaaaggagaaggagctggagaagcagcagtgcatggccacagaacttgaaatgacagtcaaggaggctaagcaggacaagtccaaggaggcggagtgcaaggccctgcaggctgaggtccagaagctgaagaacagtctcgaagaggccaagcagcaggagaggctggctgctcagcaagcagcccagtgcaaagaagaggctgcactggcaggctgtcacctggaggacacccagaggaaactgcagaaggcactatctccagactaccatcaccaaagaagcctatgatgcattatcccggaagtcagccgcctgccaggatgacctgacacaagccctcgagaagctcaatcacgtgacctcagagacaaagagcctgcagcaaagcttgacacagacccaagagaagaaagctcagctggaagaggaaatcattgcttatgaggaaaggatgaaaaagctcaatacggaattaagaaaactgcggggcttccaccaggagagtgagctggaggtgcacgcctttgacaagaagctagaggagatgagctgccaggtgctgcagtggcagaagcaacaccagaatgacctcaagatgctggcagccaaagaggagcagctcagggagttccaggaggagatggccgccttaaaagagaacctccttgaggacgataaggagccctgctgcctgccccagtggtctgtgcccaaagacacctgtaggctctaccgagggaatgatcagattatgaccaacttggagcaatgggcaaaacagcagaaggtcgccaatgagaaactaggaaaccagctccgagagcaggtgaaatacattgccaagctgagtggcgaaaaggaccacctccacagtgtaatggtccacttgcagcaggaaaacaagaagctgaagaaggagatagaagagaagaagatgaaagccgagaacacaaggctatgcaccaaagccctaggcccgagcagaacggagtccacacagagggagaaagtgtgcggcaccttgggctggaaggggttgccccaggatatgggtcaaagaatggacctcaccaagtacatcgggatgccccactgcccgggttcctcatactgctagaatccacatctagccctgagcagcatttccacgggtgtttcttcagaggacagtgagttcccagccctccctctctcttgacctggatcagctcttacaggagtatatcacggtcccagcctattttgcaagacactaacttttgttgagttttgtccacttcctgccatggagtgagctttagaaccatactaccatctccaggcccaaactctgaaataaagacatgagcatgagcac

SEQ ID NO: 10494 - protein, 521 aa, Homo sapiens
MKDEAGERDREVSSLNSKLLSLQLDIKNLHDVCKRQRKTLQDNQLCMEEAMNSSHDKKQAQALAFEESEVEFGSSKQCHLRQLQQLKKKLLVLQQELEFHTEELQTSYYSLRQYQSILEKQTSDLVLLHHHCKLKEDEVILYEEEMGNHNENTGEKLHLAQEQLALAGDKIASLERSLNLYRDKYQSSLSNIELLECQVKMLQGELGGIMGQEPENKGDHSKVRIYTSPCMIQEHQETQKRLSEVWQKVSQQDDLIQELRNKLACSNALVLEREKALIKLQADFASCTATHRYPPSSSEECEDIKKILKHLQEQKDSQCLHVEEYQNLVKDLRVELEAVSEQKRNIMKDMMKLELDLHGLREETSAHIERKDKDITILQCRLQELQLEFTETQKLTLKKDKFLQEKDEMLQELEKKLTQVQNSLLKKEKELEKQQCMATELEMTVKEAKQDKSKEAECKALQAEVQKLKNSLEEAKQQERLAAQQAAQCKEEAALAGCHLEDTQRKLQKALSPDYHHQRSL

SEQ ID NO: 10495 - DNA, 3671 bp, Homo sapiens
aatagaagttcaccagctgaggactacgaggatattgaggacaatgtggagcagagccccagctgactcataaaggacatgtagcatgagtaaaaaataaaccttcacggtcgtaagccactgagacttgggggttgtttgttactacaccatcacctagcctgtccccaccaggtttataacaaagctcagaaaatactaaaggttaaaggagaattgagagctgccaaggaaatgaaagatgaggcgggggagagagacagagaagtgagcagcctgaacagcaagctgttaagcctgcaacttgacatcaagaatctgcacgatgtctgcaagagacagaggaagaccttgcaggacaatcagctctgcatggaggaggcaatgaacagcagccacctcattgccctgaaaatatcagatcatagtgatacaaggggagcagcgtctgctatggatctcagacaaacttctaagtcaaccatgaaaataaaaaccatcacacctgctctaaggacaagaagcaagcacaggcattagcattcgaggagtcagaggtggaatttgggtccagtaaacagtgtcatctgagacaactccagcaactgaagaaaaaattgctggtccttcaacaagaactggagtttcacacagaggagttgcagacttcttactattctctccgccagtatcagtccatcctagagaagcagacttccgacctggttcttctgcaccatcactgcaaactgaaagaagatgaggtgattctctatgaggaggaaatgggaaatcacaacgagaacacaggggagaagctccatttggcgcaggagcaactcgccttggccggggacaagatcgcctctctagagaggagcttaaacctctacagggataaataccagtcttccctgagcaacatcgagttactagaatgccaagtgaagatgttgcagggggaactcggcgggatcatgggtcaggagcctgagaacaagggtgatcattcaaaggtacggatatacacttctccttgcatgattcaagagcatcaggagactcagaaacgactgtctgaagtctggcaaaaggtctctcaacaggatgatctcattcaagaacttcgaaataagctggcctgcagtaacgctttggttctggagcgtgaaaaggctttgataaaactacaagccgattttgcttcctgtacagccacccacagataccctcctagctcctcagaagagtgtgaagacatcaaaaagatactgaagcacttgcaggagcagaaagacagccagtgcctgcatgtggaggagtaccagaacctggtgaaggatctgcgcgtggaactagaggccgtgtcggaacagaagagaaacatcatgaaggacatgatgaagctggagctggacctgcacggactgcgggaggagacatctgcccacattgagaggaaggataaggacatcaccatcctgcagtgccggctgcaggagctgcagctggagttcaccgagacccaaaagctcactttgaagaaagacaagttcctccaagagaaagatgagatgctgcaagagctggagaagaaactgacacaggttcagaacagcctcctgaaaaaggagaaggagctggagaagcagcagtgcatggccacagaacttgaaatgacagtcaaggaggctaagcaggacaagtccaaggaggcggagtgcaaggccctgcaggctgaggtccagaagctgaagaacagtctcgaagaggccaagcagcaggagaggctggctgctcagcaagcagcccagtgcaaagaagaggctgcactggcaggctgtcacctggaggacacccagaggaaactgcagaagggtctcctcctggacaagcagaaggcagacaccatccaggaactacagagagaacttcagatgctgcagaaggagtcctcgatggctgagaaggaacaaacctccaacagaaaacgggtggaggagctgtcattagaactctctgaagccctgaggaagcttgaaaattcagacaaggaaaagaggcagcttcagaagacagtggctgagcaggatatgaaaatgaatgacatgcttgatcgtatcaagcaccagcacagggagcaaggctccatcaaatgcaagttagaagaagatcttcaggaggccacaaagcttctggaggacaaacgggagcagttgaagaagagcaaagagcatgagaagctgatggagggagaacttgaagctttgcggcaggaatttaaaaagaaagacaagacgttgaaagagaattccagaaagttggaggaagaaaatgagaatctccgagcagagctacagtgttgttctacacaactggaatcctctctcaacaaatacaacaccagccagcaagtcatccaagacttgaataaagagatagcccttcagaaggagtccttaatgagcctgcaggcccagctggacaaagctctgcagaaggagaagcactatctccagactaccatcaccaaagaagcctatgatgcattatcccggaagtcagccgcctgccaggatgacctgacacaagccctcgagaagctcaatcacgtgacctcagagacaaagagcctgcagcaaagcttgacacagacccaagagaagaaagctcagctggaagaggaaatcattgcttatgaggaaaggatgaaaaagctcaatacggaattaagaaaactgcggggcttccaccaggagagtgagctggaggtgcacgcctttgacaagaagctagaggagatgagctgccaggtgctgcagtggcagaagcaacaccagaatgacctcaagatgctggcagccaaagaggagcagctcagggagttccaggaggagatggccgccttaaaagagaacctccttgaggacgataaggagccctgctgcctgccccagtggtctgtgcccaaagacacctgtaggctctaccgagggaatgatcagattatgaccaacttggagcaatgggcaaaacagcagaaggtcgccaatgagaaactaggaaaccagctccgagagcaggtgaaatacattgccaagctgagtggcgaaaaggacagggaaccaaccagagccagcagccccaacacaacccgtccttcctctccttcccacagccacctccacagtgtaatggtccacttgcagcaggaaaacaagaagctgaagaaggagatagaagagaagaagatgaaagccgagaacacaaggctatgcaccaaagccctaggcccgagcagaacggagtccacacagagggagaaagtgtgcggcaccttgggctggaaggggttgccccaggatatgggtcaaagaatggacctcaccaagtacatcgggatgccccactgcccgggttcctcatactgctagaatccacatctagccctgagcagcatttccacgggtgtttcttcagaggacagtgagttcccagccctccctctctcttgacctggatcagctcttacaggagtatatcacggtcccagcctattttgcaagacactaacttttgttgagttttgtccacttcctgccatggagtgagctttagaaccatactaccatctccaggcccaaactctgaaataaagacatgagcatgag

SEQ ID NO: 10496 - protein, 882 aa, Homo sapiens
MGNHNENTGEKLHLAQEQLALAGDKIASLERSLNLYRDKYQSSLSNIELLECQVKMLQGELGGIMGQEPENKGDHSKVRIYTSPCMIQEHQETQKRLSEVWQKVSQQDDLIQELRNKLACSNALVLEREKALIKLQADFASCTATHRYPPSSSEECEDIKKILKHLQEQKDSQCLHVEEYQNLVKDLRVELEAVSEQKRNIMKDMMKLELDLHGLREETSAHIERKDKDITILQCRLQELQLEFTETQKLTLKKDKFLQEKDEMLQELEKKLTQVQNSLLKKEKELEKQQCMATELEMTVKEAKQDKSKEAECKALQAEVQKLKNSLEEAKQQERLAAQQAAQCKEEAALAGCHLEDTQRKLQKGLLLDKQKADTIQELQRELQMLQKESSMAEKEQTSNRKRVEELSLELSEALRKLENSDKEKRQLQKTVAEQDMKMNDMLDRIKHQHREQGSIKCKLEEDLQEATKLLEDKREQLKKSKEHEKLMEGELEALRQEFKKKDKTLKENSRKLEEENENLRAELQCCSTQLESSLNKYNTSQQVIQDLNKEIALQKESLMSLQAQLDKALQKEKHYLQTTITKEAYDALSRKSAACQDDLTQALEKLNHVTSETKSLQQSLTQTQEKKAQLEEEIIAYEERMKKLNTELRKLRGFHQESELEVHAFDKKLEEMSCQVLQWQKQHQNDLKMLAAKEEQLREFQEEMAALKENLLEDDKEPCCLPQWSVPKDTCRLYRGNDQIMTNLEQWAKQQKVANEKLGNQLREQVKYIAKLSGEKDREPTRASSPNTTRPSSPSHSHLHSVMVHLQQENKKLKKEIEEKKMKAENTRLCTKALGPSRTESTQREKVCGTLGWKGLPQDMGQRMDLTKYIGMPHCPGSSYC

SEQ ID NO: 10497 - DNA, 873 bp, Homo sapiens
aaaactccctgctagagagactaggagatttggggctgcggccgtttcctccggagcacccacgggactgtgtgctggggtccctccaccggctgtgtcctttattcttctttctcacccaacgatttacctgaacggttataaagtgcacgttatttccctaagcactttgagtatattggcccactgcattctggacttcaaaatttctgatgcgaaatatgctgatacttttgttgaagaaatctgggctttgagcatctgtaagatatttgttggaaggttttgtctggtccttcttactgatgtgttgctcttcttcatggctcgtgaaaactattagagtcatccaagggtgggaagagagatcagcaacgttaactgggtgtcaagaaaacataccgagattgaagccatccacttctgcaggaacaccgaaaagaaagcttacaatctgaaggtgtccgttcctacactggtcagaccactgtccttggggcagctggggtctttgggaccctccaccgggctcgccggtccgtcggacttttggctgagatccgtgtcagactcctccgaatagtcgtctgttggcatcgagggctgaacccctgaggtgctgcatgaacttgaggtaaccgttgaagatgaggagagaggaggaaaagaagggggcttcgctgccgaagcccgggagaccacttgcggccaagacttcctggaggcgtggggggaagcggaggagggggcggcggccgacgggggaggggggctgtcgtttgagtgagcggcagactgcgaggtagatgcggtgctaggatcggggaagcaggcagagtgaggtaataaactagggtgctctttggcgtttct

SEQ ID NO: 10498 - protein, 50 aa, Homo sapiens
MCCSSSWLVKTIRVIQGWEERSATLTGCQENIPRLKPSTSAGTPKRKLTI

SEQ ID NO: 10499 - DNA, 807 bp, Homo sapiens
aaactccctgctagagagactaggagatttggggctgcggccgtttcctccggagcacccacgggactgtgtgctggggtccctccaccggctgtgtcctttattcttctttctcacccaacgatttacctgaacggttataaagtgcacgttatttccctaaggtccttcttactgatgtgttgctcttcttcatggctcgtgaaaactattagagtcatccaaggtttggagacagaaaggagcaccgccaagtgaggcagagcagtctcagaaacataggaaaatggtgggaagagagatcagcaacgttaactgggtgtcaagaaaacataccgagattgaagccatccacttctgcaggaacaccgaaaagaaagcttacaatctgaaggtgtccgttcctacactggtcagaccactgtccttggggcagctggggtctttgggaccctccaccgggctcgccggtccgtcggacttttggctgagatccgtgtcagactcctccgaatagtcgtctgttggcatcgagggctgaacccctgaggtgctgcatgaacttgaggtaaccgttgaagatgaggagagaggaggaaaagaagggggcttcgctgccgaagcccgggagaccacttgcggccaagacttcctggaggcgtggggggaagcggaggagggggcggcggccgacgggggaggggggctgtcgtttgagtgagcggcagactgcgaggtagatgcggtgctaggatcggggaagcaggcagagtgaggtaataaactagggtgctctttggcgtttct

SEQ ID NO: 10500 - protein, 76 aa, Homo sapiens
MVGREISNVNWVSRKHTEIEAIHFCRNTEKKAYNLKVSVPTLVRPLSLGQLGSLGPSTGLAGPSDFWLRSVSDSSE

SEQ ID NO: 10501 - DNA, 322 bp, Homo sapiens
tgatgcgaaatatgctgatacttttgttgaagaaatctggtccttcttactgatgtgttgctcttcttcatggctcgtgaaaactattagagtcatccaaggtcctgacatccactgccttcactcaaacccttctggccagttccatcctacagattctaagttcctgactcagaatcttactgttgtgaacctttacacccaggtttggagacagaaaggagcaccgccaagtgaggcagagcagtctcagaaacataggaaaatcttctagcagagatggaataatagagaccagatgtaccctcccagctgaaacaac

SEQ ID NO: 10502 - protein, 73 aa, Homo sapiens
MCCSSSWLVKTIRVIQGPDIHCLHSNPSGQFHPTDSKFLTQNLTVVNLYTQVWRQKGAPPSEAEQSQKHRKIF

SEQ ID NO: 10503 - DNA, 16064 bp, Homo sapiens
ccgcgcgtccctgtgcgtccccgggtccctgcgggcgggcgggcgcggtcgccgccgagcaacccggcctgcgcccggcacgactgtagatgtcaggctttgcccggggagccgagcggcagcggggctgtgagtttcaaattaaccttccgctttgttgctgtgtaatgtggatccccgaaggccccccgccccgcccgccccccttccccgggcggtgcgcgctgcaaactgcgagttgggcttcatttacataaagcgattccgggcgggcggcggcagaggaggaggcggcggcggcgggcaggccggggacccggacgccagcgccgcgccccgtgggtgaatccccgccgcgtcccggggacctccctccggggacgggccgaccgccagccctgccgccaccatgagctcccctcccctgtctccgggccccctgctcctgaccagagccacctccgagtcctggggccagcgggaggtggggagcatgccgcctggggtgggtgagctcggggctcgggtgccactggaatttcccgttgttgcgcatggcggcgcggcccccggacctgcaagtgccgcctccctccggaggtgcgcggaggcttggtgtgccaggtccgagcctccgtactgggtgcaatgaaagctccacgcaggccttaccatggaaggctgtgactcgcccgtcgtctcggggaaggacaatgggtgcggtatccctcagcaccagcaatggactgaactcaacagcacccacctccctgacaaacccagtagcatggagcagtccacaggcgagagccacgggcccttggacagcctgagggcccccttcaatgagcgcctcgcggagagcaccgcgtcggccgggcccccctccgagcccgccagcaaggaggtcacctgcaacgaatgttcggcctcctttgccagcctccagacctacatggagcaccactgccccagcgcgcgccccccgccacccctgagagaggagagcgccagcgacaccggtgaggagggggacgaggagagtgacgtggagaacctggccggggagatcgtctaccagccggacggctccgcgtacattgtggagagcctgagccagctgacccagggcgggggcgcctgtgggagtggcagtggcagtgggcctctcccctcgcttttcctgaactctctccctggcgcggggggcaagcaaggggacccttcgtgtgctgcacccgtgtacccgcagatcatcaacactttccacatagcctcatccttcgggaaatggtttgagggcccagaccaggctttcccgaatacctcagccctggcggggctcagccccgtcctgcacagcttccgcgtgtttgacgtgcgacacaaaagcaacaaggattacctgaacagcgacggttctgccaaaagctcctgcgtatccaaagatgttcccaacaatgtggacctgtccaaattcgatggctttgtgctctatggcaagaggaagcccatcctgatgtgtttcttgtgcaaactctcctttgggtacgtccgttcgtttgtgacccacgcggtgcatgaccatcgaatgaccctgagcgaagacgagcggaaaattcttagcaataagaacatctccgctatcatccaagggatcggcaaagacaaggaaccccttgtaagttttctggaaccaaaaaacaaaaactttcaacaccctttagtttccacagctaacctcataggccccggacacagtttttatggtaaatttagtggcattcgaatggaaggggaggaagctctcccagcgggctccgccgctggccccgagcagccccaggctggtctcttgacccccagcaccctgttgaaccttggcgggctcaccagctcggtactgaagacccccattacctcagtccccctggggcctctggcttccagtcctaccaaatcctcagagggcaaggactctggggcggcagaaggagagaagcaggaagtgggcgacggggattgcttctctgagaaggtagagccagccgaagaggaggcggaggaggaagaggaggaggaagaggcggaggaggaggaggaagaagaggaggaggaagaagaggaggaggaagacgagggttgcaaaggactctttccaagcgagttggatgaggaactggaggacaggccccatgaggagcctggggccgcagcaggtagtagcagcaaaaaggaccttgctctctcaaaccaaagcatttctaactcccccttaatgcctaacgtgctccagaccctgtcgaggggcacagcttctactagttctaattctgcttcttcctttgttgtctttgatggtgcgaacaggaggaatcgtttaagctttaacagtgagggcgtcagggccaatgtggcagagggcggcaggaggctggacttcgctgacgaaagtgccaataaagacaatgccacagcaccagaaccaaatgaaagcacagagggtgacgatgggggcttcgttccccatcaccagcacgctggctccctctgcgagcttggggttggggagtgcccctcggggagtggcgtggagtgccccaaatgcgacacggtcctgggctcctcccgctcgctgggcggccacatgaccatgatgcattctcgtaactcgtgtaagacactcaagtgccccaagtgcaactggcactataagtaccagcagaccctggaggcacacatgaaggagaagcacccggagccggggggctcctgtgtctactgcaaaagcgggcagccccacccccggctggcacgaggcgagagctacacgtgtggttacaagcctttccgctgcgaggtgtgtaactactccacaactaccaaaggcaacctcagtattcatatgcagtctgacaagcatctcaacaacatgcagaacctgcagaatggagggggggagcaggtcttcagccacactgccggggcggcggcggcggcggtggctgcggcggcggcggcagccaatatcagtagctcctgcggggccccctcgccgaccaaaccaaaaaccaaacccacctggcggtgcgaggtgtgtgattatgagaccaacgtggccaggaacctccgcattcacatgaccagtgagaagcacatgcataacatgatgttactgcaacagaacatgacccagatccaacacaaccgccacctgggcctcggcagcctgccctcacccgccgaggccgagctctaccaatactacctggcccagaacatgaacctgcccaacctgaagatggacagtgctgcctcggacgcccagttcatgatgagcggattccagctggatcccgccgggcccatggccgccatgacgcctgctctagtgggcggtgagatccccctagacatgcggctcgggggcgggcagctggtgtcagaggagctgatgaacctgggcgagagcttcatccagaccaacgacccgtcgctgaagctcttccagtgcgccgtctgcaacaagttcacgacggacaacctggacatgctgggcctgcacatgaacgtggagcgcagcctgtcggaggacgagtggaaggcggtgatgggggactcataccagtgcaagctctgccgctacaacacccagctcaaggccaacttccagctgcactgcaagacagacaagcacgtgcagaagtaccagctggtggcccacatcaaggagggcggcaaggccaacgagtggaggctcaagtgtgtggccatcggcaaccccgtgcacctcaagtgcaacgcctgtgactactacaccaacagcctggagaagctgcggctgcacacggtcaactccaggcacgaggccagcctgaagttgtacaagcacctgcagcagcatgagagtggtgtagaaggtgagagctgctactaccactgcgttctgtgcaactactccaccaaggccaagctcaacctcatccagcatgtgcgctccatgaagcaccagcgaagcgagagcctgcgaaagctgcagcggctgcagaagggccttccagaggaggacgaggacctggggcagatcttcaccatccgcaggtgcccctccacggacccagaagaagccattgaagatgttgaaggacccagtgaaacagctgctgatccagaggagcttgctaaggaccaagagggcggagcatcgtccagccaagcagagaaggagctgacagattctcctgcaacctccaaacgcatctccttcccaggtagctcagagtctcccctctcttcgaagcgaccaaaaacagctgaggagatcaaaccggagcagatgtaccagtgtccctactgcaagtacagtaatgccgatgtcaaccggctccgggtgcatgccatgacgcagcactcggtgcaacccatgcttcgctgccccctgtgccaggacatgctcaacaacaagatccacctccagctgcacctcacccacctccacagcgtggcacctgactgcgtggagaagctcattatgacggtgaccacccctgagatggtgatgccaagcagcatgttcctcccagcagctgttccagatcgagatgggaattccaatttggaagaggcaggaaagcagcctgaaacctcagaggatctgggaaagaacatcttgccatccgcaagcacagagcaaagcggagatttgaaaccatcccctgctgacccaggctctgtgagagaagactcaggcttcatctgctggaagaaggggtgcaaccaggttttcaaaacttctgctgcccttcagacgcattttaatgaagtgcatgccaagaggcctcagctgccggtgtcagatcgccatgtgtacaagtaccgctgtaatcagtgtagcctggccttcaagaccattgaaaagttgcagctccattctcagtaccatgtgatcagagctgccaccatgtgctgtctttgtcagcgcagtttccgaactttccaggctctgaagaagcaccttgagacaagccacctggagctgagtgaggctgacatccaacagctttatggtggcctgctggccaatggggacctcctggcaatgggagaccccactctggcagaggaccataccataattgttgaggaagacaaggaggaagagagtgacttggaagataaacagagcccaacgggcagtgactctgggtcagtacaagaagactcgggctcagagccaaagagagctctgcctttcagaaaaggtcccaattttactatggaaaagttcctagacccttctcgcccttacaagtgtaccgtctgcaaggaatctttcactcaaaagaatatcctgctagtacactacaattctgtctcccacctgcataagttaaagagagcccttcaagaatcagcaaccggtcagccagaacccaccagcagcccagacaacaaaccttttaagtgtaacacttgtaatgtggcctacagccagagttccactctggagatccatatgaggtctgtgttacatcaaaccaaggcccgggcagccaagctggaggctgcaagtggcagcagcaatgggactgggaacagcagcagtatttccttgagctcctccacgccaagtcctgtgagcaccagtggcagtaacacctttaccacctccaatccaagcagtgctggcattgctccaagctctaacttactaagccaagtgcccactgagagtgtagggatgccacccctggggaatcctattggtgccaacattgcttccccttcagagcccaaagaggccaatcggaagaaactggcagatatgattgcatccaggcagcagcaacaacagcagcagcaacagcaacaacaacaacaacaacaacaacaacaagcacaaacgctggcccaggcccaggctcaagttcaagctcacctgcagcaggagctgcagcaacaggctgccctgatccagtctcagctgtttaaccccaccctccttcctcacttccccatgacaactgagaccctgctgcaactacagcagcagcagcacctcctcttccctttctacatccccagtgctgagttccagcttaaccccgaggtgagcttgccagtgaccagtggggcactgacactgactgggacaggcccaggcctgctggaagatctgaaggctcaggttcaggtcccacagcagagccatcagcagatcttgccgcagcagcagcagaaccaactctctatagcccagagtcactctgccctccttcagccaagccagcaccccgaaaagaagaacaaattggtcatcaaagaaaaggaaaaagaaagccagagagagagggacagcgccgaggggggagagggcaacaccggtccgaaggaaacactgccagatgccttgaaggccaaagagaagaaagagttggcaccagggggtggttctgagccttccatgctccctccacgcattgcttcagatgccagagggaacgccaccaaggccctgctggagaactttggctttgagttggtcatccagtataatgagaacaagcagaaggtgcagaaaaagaatgggaagactgaccagggagagaacctggaaaagctcgagtgtgactcctgcggcaagttgttttccaacatcttgattttaaagagtcatcaagagcacgttcatcagaattactttcctttcaaacagctcgagaggtttgccaaacagtacagagaccactacgataaactgtacccactgaggccccagaccccagagccaccaccacctccccctccaccccctccacccccacttccggcagcgccgcctcagccggcgtccacaccagccatccccgcatcagccccacccatcacctcacctacaattgcaccggcccagccatcagtgccgctcacccagctctccatgccgatggagctgcccatcttctcgccgctgatgatgcagacgatgccgctgcagaccttgccggctcagctacccccgcagctgggacctgtggagcctctgcctgcggacctggcccaactctaccagcatcagctcaatccaaccctgctccagcagcagaacaagaggcctcgcaccaggatcacagatgatcagctccgagtcttgcggcaatattttgacattaacaactcccccagtgaagagcaaataaaagagatggcagacaagtccgggttgccccagaaagtgatcaagcactggttcaggaacactctcttcaaagagaggcagcgtaacaaggactccccttacaacttcagtaatcctcctatcaccagcctggaggagctcaagattgactcccggcccccttcgccggaacctccaaagcaggagtactggggaagcaagaggtcttcaagaacaaggtttacggactaccagctgagggtcttacaggacttcttcgatgccaatgcttacccaaaggatgatgaatttgagcaactctctaatttactgaaccttccaacccgagtgatagtggtgtggtttcagaatgcccgacagaaggccaggaagaattatgagaatcagggagagggcaaagatggagagcggcgtgagcttacaaatgatagatacattcgaacaagcaacttgaactaccagtgcaaaaaatgtagcctggtgtttcagcgcatctttgatctcatcaagcaccagaagaagctgtgttacaaggatgaggatgaggaggggcaggacgacagccaaaatgaggattccatggatgccatggaaatcctgacgcctaccagctcatcctgcagtaccccgatgccctcacaggcttacagcgccccagcaccatcagccaataatacagcttcctccgctttcttgcagcttacagcggaggctgaggaactggccaccttcaattcaaaaacagaggcaggcgatgagaaaccaaagctggcggaagctcccagtgcacagccaaaccaaacccaagaaaagcaaggacaaccaaagccagagctgcagcagcaagagcagcccgagcagaagaccaacactccccagcagaagctcccccagctggtgtccctgccttcgttgccacagcctcctccacaagcgccccctccacagtgccccttaccccagtcgagccccagtccttcccagctctcccacctgcccctcaagcccctccacacatcaactcctcaacagctcgcaaacctacctcctcagctaatcccctaccagtgtgaccagtgtaagttggcatttccgtcatttgagcactggcaggagcatcagcagctccacttcctgagcgcgcagaaccagttcatccacccccagtttttggacaggtccctggatatgcctttcatgctctttgatcccagtaacccactcctggccagccagctgctctctggggccatacctcagattccagcaagctcagccacttctccttcaactccaacctccacaatgaacactctcaagaggaagctggaggaaaaggccagtgcaagccctggcgaaaacgacagtgggacaggaggagaagagcctcagagagacaagcgtttgagaacaaccatcacaccggaacaactagaaattctctaccagaagtatctactggattccaatccgactcgaaagatgttggatcacattgcacacgaggtgggcttgaagaaacgtgtggtacaagtctggtttcagaacacccgagctcgggaaaggaaaggacagttccgggctgtaggcccagcgcaggcccacaggagatgccctttttgcagagcgctcttcaaagccaagactgctcttgaggctcatatccggtcccgtcactggcatgaagccaagagagctggctacaacctaactctgtctgcgatgctcttagactgtgatgggggactccagatgaaaggagatatttttgacggaactagcttttcccacctacccccaagcagtagtgatggtcagggtgtccccctctcacctgtgagtaaaaccatggaattgtcacccagaactcttctaagcccttcctccattaaggtggaagggattgaagactttgaaagcccctccatgtcctcagttaatctaaactttgaccaaactaagctggacaacgatgactgttcctctgtcaacacagcaatcacagataccacaactggagacgagggcaacgcagataacgacagtgcaacgggaatagcaactgaaaccaaatcctcttctgcacccaacgaagggttgaccaaagcggccatgatggcaatgtctgagtatgaagatcggttgtcatctggtctggtcagcccggccccgagcttttatagcaaggaatatgacaatgaaggtacagtggactacagtgaaacctcaagccttgcagatccctgctccccgagtcctggtgcgagtggatctgcaggcaaatctggtgacagcggagatcggcctgggcagaaacgttttcgcactcaaatgaccaatctgcagctgaaggtcctcaagtcatgctttaatgactacaggacacccactatgctagaatgtgaggtcctgggcaatgacattggactgccaaagagagtcgttcaggtctggttccagaatgcccgggcaaaagaaaagaagtccaagttaagcatggccaagcattttggtataaaccaaacgagttatgagggacccaaaacagagtgcactttgtgtggcatcaagtacagcgctcggctgtctgtacgtgaccatatcttttcccaacagcatatctccaaagttaaagacaccattggaagccagctggacaaggagaaagaatactttgacccagccaccgtacgtcagttgatggctcaacaagagttggaccggattaaaaaggccaacgaggtccttggactggcagctcagcagcaagggatgtttgacaacacccctcttcaggcccttaaccttcctacagcatatccagcgctccagggcattcctcctgtgttgctcccgggcctcaacagcccctccttgccaggctttactccatccaacacagctttaacgtctcctaagccgaacttgatgggtctgcccagcacaactgttccttcccctggcctccccacttctggattaccaaataaaccgtcctcagcgtcgctgagctccccaaccccagcacaagccacgatggcgatgggccctcagcaacccccccagcagcagcagcagcagcagcaaccacaggtgcagcagcctcccccgccgccagcagcccagccgccacccacaccacagctcccactgcaacagcagcagcaacgcaaggacaaagacagtgagaaagtaaaggagaaggaaaaggcacacaaagggaaaggggaacccctgcctgtccccaagaaggagaaaggagaggcccccacggcaactgcagccacgatctcagccccgctgcccaccatggagtatgcggtagaccctgcacagctgcaggccctgcaggccgcgttgacttcggaccccacagcattgctcacaagccagttccttccttactttgtaccaggcttttctccttattatgctccccagatccctggcgccctgcagagcgggtacctgcagcctatgtatggcatggaaggcctgttcccctacagccctgcactgtcgcaggccctgatggggctgtccccaggctccctactgcagcagtaccagcaataccagcagagtctgcaggaggcaattcagcagcagcagcagcggcaactacagcagcagcagcagcaaaaagtgcagcagcagcagcccaaagcaagccaaaccccagtcccccccggggctccttccccagacaaagaccctgccaaagaatcccccaaaccagaagaacagaaaaacaccccccgtgaggtgtcccccctcctgccgaaactccctgaagagccagaagcagaaagcaaaagtgcggactccctctacgaccccttcattgttccaaaggtgcagtacaagttggtctgccgcaagtgccaggcgggcttcagcgacgaggaggcagcgaggagccacctgaagtccctctgcttcttcggccagtctgtggtgaacctgcaagagatggtgcttcacgtccccaccggcggcggcggcggtggcagtggcggcggcggcggcggtggcggcggcggcggcggcggcggctcgtaccactgcctggcgtgcgagagcgcgctctgtggggaggaagctctgagtcaacatctcgagtcggccttgcacaaacacagaacaatcacgagagcagcaagaaacgccaaagagcaccctagtttattacctcactctgcctgcttccccgatcctagcaccgcatctacctcgcagtctgccgctcactcaaacgacagcccccctcccccgtcggccgccgccccctcctccgcttccccccacgcctccaggaagtcttggccgcaagtggtctcccgggcttcggcagcgaagcccccttcttttcctcctctctcctcatcttcaacggttacctcaagttcatgcagcacctcaggggttcagccctcgatgccaacagacgactattcggaggagtctgacacggatctcagccaaaagtccgacggaccggcgagcccggtggagggtcccaaagaccccagctgccccaaggacagtggtctgaccagtgtaggaacggacaccttcagattgtaagctttgaagatgaacaatacaaacaaatgaatttaaatacaaaaattaataacaaaccaatttcaaaaatagactaactgcaattccaaagcttctaaccaaaaaacaaaaaaaaaaaaaaaaagaaaaaaaagaaaaagcgtgggttgttttcccatatacctatctatgccggtgattttacattcttgtctttttcttttcttttaatattaaaaaaaaaaaaaaagccctaaccctgttacattgtgtccttttgaaggtactattggtctgggaaacagaagtccgcagggcctccctaatgtctttggagcttaaaccccttgtatatttgccccttttcaataaacgccccacgctgatagcacagaggagcccggcatgcactgtatgggaaagcagtccaccttgttacagttttaaatttcttgctatcttagcattcagataccaatggcttgctaaaagaaaaaaagaaatgtaatgtctttttattctcaggtcaatcgctcacactttgttttcagaatcattgttttatatattattgttttttcagtttttttttttttttttgttccagaaaagattttttgttttgttaacttaaaaatgggcagaaagtattcaagaaaaacaatgtgaactgctttagctttctggggatttttaaggatagcttttctgctgaagccaatttcaaggggaaaagttaagcactcccactttcaaaaaaaaaaaaaaataataacccacacacacaaagagtgttgaggacttgtagcttaaaaaaaataagttttaaaaactgactttctgtatttatgatagatatgaccatttttggtgttgagtagattgttgcattggaaatgaactgaagcagtatggtagatttaaaaggaaaaaaaaaaaaaaaccttttgtgtacatttagctttttgtatggtccagctgacagctcctcatttgatgttgtcttgttcattcctagcagatgatagattgcaatccgttgattcgcctaagcttttctccccttgtcccttaattccactttctctttcttgtcccttaattccactttctctttccttctcccacctcccgtcctataatctcccacttaaggtagctgccttcatttcttagagggagctgcagaattattttataaaactaaagaaagaatttcaagggattctaggggtcattaggatcctcacagattatttttggttggggagttgaaactttttaaaggcatataattctagttacctgtgtctgttagctttgtgcatttattttttatttatccttcttttggcttttttttctttgtaccccttcttttcctccttgtttggtaggagcttcaaatattctttttttttctatactaaaggatttgtttccatttgtgtaattggctgtgtacttttcttttctaaaaaaagtttttggttagggatttggtttttggttttgtgtttgttttttctttcctctctcagaaaaaaaaatttcatgctttaaataaaatccaaagacacaccctttcactgctgatgcagaaaaaagggaaagggttcttgttacttgagaatttgtttctgatttaaacaaacaagacttagtttaataaaagaaagagaaaaacaaaagattcccaggttgttatgtgcttcttctgcaagcagagaggcaaatgttaatgacaattccatataccaaaagacacattttttacttcaaagttttgtccttgtgttaggcagtctgagcagcgagtgatccagagcgcagccaacaaagcagcagatagcagtgtacagaaagcaaaaaaggaactgtatgtgaggcacttgtttctgttaatatccatattcctgttaacacacaccctttctcatgtaaaaagaaaaataaataaatggtctgaactttgaaaactttgtgctgctaaaacatagattttggagacaaataaatagatgctttgctgtttcactttcatagctaaacatcaacagaaaccatctccccttgcccccaaagtgtgaaatccttcttcccttcgttttcttccttatgtttcaaaagggaactttgaagactgtgaatacaggttccattggtcacctttcgggcttctttccccagtgctgaagccactcatcgactttgcaaaagactggagcattccaagatctgaaaatggattttttttctttttttcttttttagccgggactattttatttttatgaatttgtttttagtttaatgaaatagtagatcctgaaatgttgtacatatttctaactaggctgatgcacagtgcaaattccttttttaattgttttttttaagtagaaatactaaagaaagaataccatctaactattcataccagtatccagttgtagcataaggtgtcaaaagcaagtacgcaaaacatttactgttttaacaagctatttccttttaacaagaaatcttgtatttcttcctgtgtttgagatgaacatttttaaattttaaagttgtacagttttttgttttccattattttatcttgtttgtaactctatgaaatatatatatatatattttttgccatttaactgttgtatgttactctgtgtctgtaccatatagaaaaaaaattgtttttgtttttggttctctatgtgatatcagttaacaatgtaacactagctttacctgtcaaattctgctaggtcttctctgaaaacgttgtttttaaaaatgatattgcttggtaatagtgcaatttctatccttttccctcccccctcaacttttaagttcttttctttataattttgctgccccctccctgatggtttgggtttttgtttttgtttttgtttttttttttcatggagctactatgccatcctccctctgtgaggcagagtgactgtcagtgttttgttatgccatgccttgagctgtgggtgtttggcgacaataaggtggttgaatagattggctgagcacacttccacccacctagtgttctcagaggggttatgtgattgtttcaacctggagtgggttgcacccttaatgctttcctctgcaactaaaccgcccacatatatgttcattgaaaaaagtaagaataattctcagcactaacccagaagtagcaaagcagtcagtgatggtgaacattagaggtcaaacatgagttagatgtttgtgggctgacagccatcgtggctatgaccagtactatttacaaagcatgaattcactacaatgctcaactgtttgtttagctttatctcacttggggaatttattcctgtctgctgcattgtaggtagctgggtaggatatatttccacttgctttttaaattagttcttcacctccattgacactcgttttttggttttctccctatagtgtgggttggtgctagacaccagtctgacccacagaatgggagttatttcatccatctttcctccatccttccaaaaaccacatatctacacaaggaaaaatttaatacatctaggaattttttttttaattacaagctatttaaagagatgaatgtggccaaagttttacacaattgaaaataaagtaaaacagacggcatgtgtttaaacctgagtttatcaggcatggcaggaagttgcaggagagagaggcagtgacccaagccagtgcacttgatgttcatggacatatattttttttaaataataaattaaaacattttaaatagaagcataaattgagttgtttgttggcgctgagatactgcccactgtgaaacaaagctttgactagttttttgtttgtttactttcttcaggggggaggggggcaagtttgggtaggaaagaaagcataaatgaacgtgaccctgaggtgaagaggtatatgaacagcctttgcaatgtacaaaaagaaaaaaaaacaaaaaacaacaaaaaaaatagagcaagtgaaaccaaaaatgatgttcttggtgtttttctataatgtagtcttgttagcttttttgttactgtaacaatgctgatctcgaactgtaccaaaatacatggagactaacaaacagaaccacatggaactttcaaactgaaaaaaaaatttgtcacaaaaactttgttgtcatagttaagttgattgtagatggtaattgaatatactcctttgaaaatatttcatcaagtatgtttcctgctcattgtgatacattaaaaaaaaaatatgagcaaaa

SEQ ID NO: 10504 - protein, 3703 aa, Homo sapiens
MEGCDSPVVSGKDNGCGIPQHQQWTELNSTHLPDKPSSMEQSTGESHGPLDSLRAPFNERLAESTASAGPPSEPASKEVTCNECSASFASLQTYMEHHCPSARPPPPLREESASDTGEEGDEESDVENLAGEIVYQPDGSAYIVESLSQLTQGGGACGSGSGSGPLPSLFLNSLPGAGGKQGDPSCAAPVYPQIINTFHIASSFGKWFEGPDQAFPNTSALAGLSPVLHSFRVFDVRHKSNKDYLNSDGSAKSSCVSKDVPNNVDLSKFDGFVLYGKRKPILMCFLCKLSFGYVRSFVTHAVHDHRMTLSEDERKILSNKNISAIIQGIGKDKEPLVSFLEPKNKNFQHPLVSTANLIGPGHSFYGKFSGIRMEGEEALPAGSAAGPEQPQAGLLTPSTLLNLGGLTSSVLKTPITSVPLGPLASSPTKSSEGKDSGAAEGEKQEVGDGDCFSEKVEPAEEEAEEEEEEEEAEEEEEEEEEEEEEEEDEGCKGLFPSELDEELEDRPHEEPGAAAGSSSKKDLALSNQSISNSPLMPNVLQTLSRGTASTSSNSASSFVVFDGANRRNRLSFNSEGVRANVAEGGRRLDFADESANKDNATAPEPNESTEGDDGGFVPHHQHAGSLCELGVGECPSGSGVECPKCDTVLGSSRSLGGHMTMMHSRNSCKTLKCPKCNWHYKYQQTLEAHMKEKHPEPGGSCVYCKSGQPHPRLARGESYTCGYKPFRCEVCNYSTTTKGNLSIHMQSDKHLNNMQNLQNGGGEQVFSHTAGAAAAAVAAAAAAANISSSCGAPSPTKPKTKPTWRCEVCDYETNVARNLRIHMTSEKHMHNMMLLQQNMTQIQHNRHLGLGSLPSPAEAELYQYYLAQNMNLPNLKMDSAASDAQFMMSGFQLDPAGPMAAMTPALVGGEIPLDMRLGGGQLVSEELMNLGESFIQTNDPSLKLFQCAVCNKFTTDNLDMLGLHMNVERSLSEDEWKAVMGDSYQCKLCRYNTQLKANFQLHCKTDKHVQKYQLVAHIKEGGKANEWRLKCVAIGNPVHLKCNACDYYTNSLEKLRLHTVNSRHEASLKLYKHLQQHESGVEGESCYYHCVLCNYSTKAKLNLIQHVRSMKHQRSESLRKLQRLQKGLPEEDEDLGQIFTIRRCPSTDPEEAIEDVEGPSETAADPEELAKDQEGGASSSQAEKELTDSPATSKRISFPGSSESPLSSKRPKTAEEIKPEQMYQCPYCKYSNADVNRLRVHAMTQHSVQPMLRCPLCQDMLNNKIHLQLHLTHLHSVAPDCVEKLIMTVTTPEMVMPSSMFLPAAVPDRDGNSNLEEAGKQPETSEDLGKNILPSASTEQSGDLKPSPADPGSVREDSGFICWKKGCNQVFKTSAALQTHFNEVHAKRPQLPVSDRHVYKYRCNQCSLAFKTIEKLQLHSQYHVIRAATMCCLCQRSFRTFQALKKHLETSHLELSEADIQQLYGGLLANGDLLAMGDPTLAEDHTIIVEEDKEEESDLEDKQSPTGSDSGSVQEDSGSEPKRALPFRKGPNFTMEKFLDPSRPYKCTVCKESFTQKNILLVHYNSVSHLHKLKRALQESATGQPEPTSSPDNKPFKCNTCNVAYSQSSTLEIHMRSVLHQTKARAAKLEAASGSSNGTGNSSSISLSSSTPSPVSTSGSNTFTTSNPSSAGIAPSSNLLSQVPTESVGMPPLGNPIGANIASPSEPKEANRKKLADMIASRQQQQQQQQQQQQQQQQQQQAQTLAQAQAQVQAHLQQELQQQAALIQSQLFNPTLLPHFPMTTETLLQLQQQQHLLFPFYIPSAEFQLNPEVSLPVTSGALTLTGTGPGLLEDLKAQVQVPQQSHQQILPQQQQNQLSIAQSHSALLQPSQHPEKKNKLVIKEKEKESQRERDSAEGGEGNTGPKETLPDALKAKEKKELAPGGGSEPSMLPPRIASDARGNATKALLENFGFELVIQYNENKQKVQKKNGKTDQGENLEKLECDSCGKLFSNILILKSHQEHVHQNYFPFKQLERFAKQYRDHYDKLYPLRPQTPEPPPPPPPPPPPPLPAAPPQPASTPAIPASAPPITSPTIAPAQPSVPLTQLSMPMELPIFSPLMMQTMPLQTLPAQLPPQLGPVEPLPADLAQLYQHQLNPTLLQQQNKRPRTRITDDQLRVLRQYFDINNSPSEEQIKEMADKSGLPQKVIKHWFRNTLFKERQRNKDSPYNFSNPPITSLEELKIDSRPPSPEPPKQEYWGSKRSSRTRFTDYQLRVLQDFFDANAYPKDDEFEQLSNLLNLPTRVIVVWFQNARQKARKNYENQGEGKDGERRELTNDRYIRTSNLNYQCKKCSLVFQRIFDLIKHQKKLCYKDEDEEGQDDSQNEDSMDAMEILTPTSSSCSTPMPSQAYSAPAPSANNTASSAFLQLTAEAEELATFNSKTEAGDEKPKLAEAPSAQPNQTQEKQGQPKPELQQQEQPEQKTNTPQQKLPQLVSLPSLPQPPPQAPPPQCPLPQSSPSPSQLSHLPLKPLHTSTPQQLANLPPQLIPYQCDQCKLAFPSFEHWQEHQQLHFLSAQNQFIHPQFLDRSLDMPFMLFDPSNPLLASQLLSGAIPQIPASSATSPSTPTSTMNTLKRKLEEKASASPGENDSGTGGEEPQRDKRLRTTITPEQLEILYQKYLLDSNPTRKMLDHIAHEVGLKKRVVQVWFQNTRARERKGQFRAVGPAQAHRRCPFCRALFKAKTALEAHIRSRHWHEAKRAGYNLTLSAMLLDCDGGLQMKGDIFDGTSFSHLPPSSSDGQGVPLSPVSKTMELSPRTLLSPSSIKVEGIEDFESPSMSSVNLNFDQTKLDNDDCSSVNTAITDTTTGDEGNADNDSATGIATETKSSSAPNEGLTKAAMMAMSEYEDRLSSGLVSPAPSFYSKEYDNEGTVDYSETSSLADPCSPSPGASGSAGKSGDSGDRPGQKRFRTQMTNLQLKVLKSCFNDYRTPTMLECEVLGNDIGLPKRVVQVWFQNARAKEKKSKLSMAKHFGINQTSYEGPKTECTLCGIKYSARLSVRDHIFSQQHISKVKDTIGSQLDKEKEYFDPATVRQLMAQQELDRIKKANEVLGLAAQQQGMFDNTPLQALNLPTAYPALQGIPPVLLPGLNSPSLPGFTPSNTALTSPKPNLMGLPSTTVPSPGLPTSGLPNKPSSASLSSPTPAQATMAMGPQQPPQQQQQQQQPQVQQPPPPPAAQPPPTPQLPLQQQQQRKDKDSEKVKEKEKAHKGKGEPLPVPKKEKGEAPTATAATISAPLPTMEYAVDPAQLQALQAALTSDPTALLTSQFLPYFVPGFSPYYAPQIPGALQSGYLQPMYGMEGLFPYSPALSQALMGLSPGSLLQQYQQYQQSLQEAIQQQQQRQLQQQQQQKVQQQQPKASQTPVPPGAPSPDKDPAKESPKPEEQKNTPREVSPLLPKLPEEPEAESKSADSLYDPFIVPKVQYKLVCRKCQAGFSDEEAARSHLKSLCFFGQSVVNLQEMVLHVPTGGGGGGSGGGGGGGGGGGGGGSYHCLACESALCGEEALSQHLESALHKHRTITRAARNAKEHPSLLPHSACFPDPSTASTSQSAAHSNDSPPPPSAAAPSSASPHASRKSWPQVVSRASAAKPPSFPPLSSSSTVTSSSCSTSGVQPSMPTDDYSEESDTDLSQKSDGPASPVEGPKDPSCPKDSGLTSVGTDTFRL

SEQ ID NO: 10505 - DNA, 12778 bp, Homo sapiens
cgcggcccgagcgcctcttttcgggattaaaagcgccgccagctcccgccgccgccgccgtcgccagcagcgccgctgcagccgccgccgccggagaagcaaccgctgggcggtgagatccccctagacatgcggctcgggggcgggcagctggtgtcagaggagctgatgaacctgggcgagagcttcatccagaccaacgacccgtcgctgaagctcttccagtgcgccgtctgcaacaagttcacgacggacaacctggacatgctgggcctgcacatgaacgtggagcgcagcctgtcggaggacgagtggaaggcggtgatgggggactcataccagtgcaagctctgccgctacaacacccagctcaaggccaacttccagctgcactgcaagacagacaagcacgtgcagaagtaccagctggtggcccacatcaaggagggcggcaaggccaacgagtggaggctcaagtgtgtggccatcggcaaccccgtgcacctcaagtgcaacgcctgtgactactacaccaacagcctggagaagctgcggctgcacacggtcaactccaggcacgaggccagcctgaagttgtacaagcacctgcagcagcatgagagtggtgtagaaggtgagagctgctactaccactgcgttctgtgcaactactccaccaaggccaagctcaacctcatccagcatgtgcgctccatgaagcaccagcgaagcgagagcctgcgaaagctgcagcggctgcagaagggccttccagaggaggacgaggacctggggcagatcttcaccatccgcaggtgcccctccacggacccagaagaagccattgaagatgttgaaggacccagtgaaacagctgctgatccagaggagcttgctaaggaccaagagggcggagcatcgtccagccaagcagagaaggagctgacagattctcctgcaacctccaaacgcatctccttcccaggtagctcagagtctcccctctcttcgaagcgaccaaaaacagctgaggagatcaaaccggagcagatgtaccagtgtccctactgcaagtacagtaatgccgatgtcaaccggctccgggtgcatgccatgacgcagcactcggtgcaacccatgcttcgctgccccctgtgccaggacatgctcaacaacaagatccacctccagctgcacctcacccacctccacagcgtggcacctgactgcgtggagaagctcattatgacggtgaccacccctgagatggtgatgccaagcagcatgttcctcccagcagctgttccagatcgagatgggaattccaatttggaagaggcaggaaagcagcctgaaacctcagaggatctgggaaagaacatcttgccatccgcaagcacagagcaaagcggagatttgaaaccatcccctgctgacccaggctctgtgagagaagactcaggcttcatctgctggaagaaggggtgcaaccaggttttcaaaacttctgctgcccttcagacgcattttaatgaagtgcatgccaagaggcctcagctgccggtgtcagatcgccatgtgtacaagtaccgctgtaatcagtgtagcctggccttcaagaccattgaaaagttgcagctccattctcagtaccatgtgatcagagctgccaccatgtgctgtctttgtcagcgcagtttccgaactttccaggctctgaagaagcaccttgagacaagccacctggagctgagtgaggctgacatccaacagctttatggtggcctgctggccaatggggacctcctggcaatgggagaccccactctggcagaggaccataccataattgttgaggaagacaaggaggaagagagtgacttggaagataaacagagcccaacgggcagtgactctgggtcagtacaagaagactcgggctcagagccaaagagagctctgcctttcagaaaaggtcccaattttactatggaaaagttcctagacccttctcgcccttacaagtgtaccgtctgcaaggaatctttcactcaaaagaatatcctgctagtacactacaattctgtctcccacctgcataagttaaagagagcccttcaagaatcagcaaccggtcagccagaacccaccagcagcccagacaacaaaccttttaagtgtaacacttgtaatgtggcctacagccagagttccactctggagatccatatgaggtctgtgttacatcaaaccaaggcccgggcagccaagctggaggctgcaagtggcagcagcaatgggactgggaacagcagcagtatttccttgagctcctccacgccaagtcctgtgagcaccagtggcagtaacacctttaccacctccaatccaagcagtgctggcattgctccaagctctaacttactaagccaagtgcccactgagagtgtagggatgccacccctggggaatcctattggtgccaacattgcttccccttcagagcccaaagaggccaatcggaagaaactggcagatatgattgcatccaggcagcagcaacaacagcagcagcaacagcaacaacaacaacaacaacaacaacaacaagcacaaacgctggcccaggcccaggctcaagttcaagctcacctgcagcaggagctgcagcaacaggctgccctgatccagtctcagctgtttaaccccaccctccttcctcacttccccatgacaactgagaccctgctgcaactacagcagcagcagcacctcctcttccctttctacatccccagtgctgagttccagcttaaccccgaggtgagcttgccagtgaccagtggggcactgacactgactgggacaggcccaggcctgctggaagatctgaaggctcaggttcaggtcccacagcagagccatcagcagatcttgccgcagcagcagcagaaccaactctctatagcccagagtcactctgccctccttcagccaagccagcaccccgaaaagaagaacaaattggtcatcaaagaaaaggaaaaagaaagccagagagagagggacagcgccgaggggggagagggcaacaccggtccgaaggaaacactgccagatgccttgaaggccaaagagaagaaagagttggcaccagggggtggttctgagccttccatgctccctccacgcattgcttcagatgccagagggaacgccaccaaggccctgctggagaactttggctttgagttggtcatccagtataatgagaacaagcagaaggtgcagaaaaagaatgggaagactgaccagggagagaacctggaaaagctcgagtgtgactcctgcggcaagttgttttccaacatcttgattttaaagagtcatcaagagcacgttcatcagaattactttcctttcaaacagctcgagaggtttgccaaacagtacagagaccactacgataaactgtacccactgaggccccagaccccagagccaccaccacctccccctccaccccctccacccccacttccggcagcgccgcctcagccggcgtccacaccagccatccccgcatcagccccacccatcacctcacctacaattgcaccggcccagccatcagtgccgctcacccagctctccatgccgatggagctgcccatcttctcgccgctgatgatgcagacgatgccgctgcagaccttgccggctcagctacccccgcagctgggacctgtggagcctctgcctgcggacctggcccaactctaccagcatcagctcaatccaaccctgctccagcagcagaacaagaggcctcgcaccaggatcacagatgatcagctccgagtcttgcggcaatattttgacattaacaactcccccagtgaagagcaaataaaagagatggcagacaagtccgggttgccccagaaagtgatcaagcactggttcaggaacactctcttcaaagagaggcagcgtaacaaggactccccttacaacttcagtaatcctcctatcaccagcctggaggagctcaagattgactcccggcccccttcgccggaacctccaaagcaggagtactggggaagcaagaggtcttcaagaacaaggtttacggactaccagctgagggtcttacaggacttcttcgatgccaatgcttacccaaaggatgatgaatttgagcaactctctaatttactgaaccttccaacccgagtgatagtggtgtggtttcagaatgcccgacagaaggccaggaagaattatgagaatcagggagagggcaaagatggagagcggcgtgagcttacaaatgatagatacattcgaacaagcaacttgaactaccagtgcaaaaaatgtagcctggtgtttcagcgcatctttgatctcatcaagcaccagaagaagctgtgttacaaggatgaggatgaggaggggcaggacgacagccaaaatgaggattccatggatgccatggaaatcctgacgcctaccagctcatcctgcagtaccccgatgccctcacaggcttacagcgccccagcaccatcagccaataatacagcttcctccgctttcttgcagcttacagcggaggctgaggaactggccaccttcaattcaaaaacagaggcaggcgatgagaaaccaaagctggcggaagctcccagtgcacagccaaaccaaacccaagaaaagcaaggacaaccaaagccagagctgcagcagcaagagcagcccgagcagaagaccaacactccccagcagaagctcccccagctggtgtccctgccttcgttgccacagcctcctccacaagcgccccctccacagtgccccttaccccagtcgagccccagtccttcccagctctcccacctgcccctcaagcccctccacacatcaactcctcaacagctcgcaaacctacctcctcagctaatcccctaccagtgtgaccagtgtaagttggcatttccgtcatttgagcactggcaggagcatcagcagctccacttcctgagcgcgcagaaccagttcatccacccccagtttttggacaggtccctggatatgcctttcatgctctttgatcccagtaacccactcctggccagccagctgctctctggggccatacctcagattccagcaagctcagccacttctccttcaactccaacctccacaatgaacactctcaagaggaagctggaggaaaaggccagtgcaagccctggcgaaaacgacagtgggacaggaggagaagagcctcagagagacaagcgtttgagaacaaccatcacaccggaacaactagaaattctctaccagaagtatctactggattccaatccgactcgaaagatgttggatcacattgcacacgaggtgggcttgaagaaacgtgtggtacaagtctggtttcagaacacccgagctcgggaaaggaaaggacagttccgggctgtaggcccagcgcaggcccacaggagatgccctttttgcagagcgctcttcaaagccaagactgctcttgaggctcatatccggtcccgtcactggcatgaagccaagagagctggctacaacctaactctgtctgcgatgctcttagactgtgatgggggactccagatgaaaggagatatttttgacggaactagcttttcccacctacccccaagcagtagtgatggtcagggtgtccccctctcacctgtgagtaaaaccatggaattgtcacccagaactcttctaagcccttcctccattaaggtggaagggattgaagactttgaaagcccctccatgtcctcagttaatctaaactttgaccaaactaagctggacaacgatgactgttcctctgtcaacacagcaatcacagataccacaactggagacgagggcaacgcagataacgacagtgcaacgggaatagcaactgaaaccaaatcctcttctgcacccaacgaagggttgaccaaagcggccatgatggcaatgtctgagtatgaagatcggttgtcatctggtctggtcagcccggccccgagcttttatagcaaggaatatgacaatgaaggtacagtggactacagtgaaacctcaagccttgcagatccctgctccccgagtcctggtgcgagtggatctgcaggcaaatctggtgacagcggagatcggcctgggcagaaacgttttcgcactcaaatgaccaatctgcagctgaaggtcctcaagtcatgctttaatgactacaggacacccactatgctagaatgtgaggtcctgggcaatgacattggactgccaaagagagtcgttcaggtctggttccagaatgcccgggcaaaagaaaagaagtccaagttaagcatggccaagcattttggtataaaccaaacgagttatgagggacccaaaacagagtgcactttgtgtggcatcaagtacagcgctcggctgtctgtacgtgaccatatcttttcccaacagcatatctccaaagttaaagacaccattggaagccagctggacaaggagaaagaatactttgacccagccaccgtacgtcagttgatggctcaacaagagttggaccggattaaaaaggccaacgaggtccttggactggcagctcagcagcaagggatgtttgacaacacccctcttcaggcccttaaccttcctacagcatatccagcgctccagggcattcctcctgtgttgctcccgggcctcaacagcccctccttgccaggctttactccatccaacacagctttaacgtctcctaagccgaacttgatgggtctgcccagcacaactgttccttcccctggcctccccacttctggattaccaaataaaccgtcctcagcgtcgctgagctccccaaccccagcacaagccacgatggcgatgggccctcagcaacccccccagcagcagcagcagcagcagcaaccacaggtgcagcagcctcccccgccgccagcagcccagccgccacccacaccacagctcccactgcaacagcagcagcaacgcaaggacaaagacagtgagaaagtaaaggagaaggaaaaggcacacaaagggaaaggggaacccctgcctgtccccaagaaggagaaaggagaggcccccacggcaactgcagccacgatctcagccccgctgcccaccatggagtatgcggtagaccctgcacagctgcaggccctgcaggccgcgttgacttcggaccccacagcattgctcacaagccagttccttccttactttgtaccaggcttttctccttattatgctccccagatccctggcgccctgcagagcgggtacctgcagcctatgtatggcatggaaggcctgttcccctacagccctgcactgtcgcaggccctgatggggctgtccccaggctccctactgcagcagtaccagcaataccagcagagtctgcaggaggcaattcagcagcagcagcagcggcaactacagcagcagcagcagcaaaaagtgcagcagcagcagcccaaagcaagccaaaccccagtcccccccggggctccttccccagacaaagaccctgccaaagaatcccccaaaccagaagaacagaaaaacaccccccgtgaggtgtcccccctcctgccgaaactccctgaagagccagaagcagaaagcaaaagtgcggactccctctacgaccccttcattgttccaaaggtgcagtacaagttggtctgccgcaagtgccaggcgggcttcagcgacgaggaggcagcgaggagccacctgaagtccctctgcttcttcggccagtctgtggtgaacctgcaagagatggtgcttcacgtccccaccggcggcggcggcggtggcagtggcggcggcggcggcggtggcggcggcggcggcggcggcggctcgtaccactgcctggcgtgcgagagcgcgctctgtggggaggaagctctgagtcaacatctcgagtcggccttgcacaaacacagaacaatcacgagagcagcaagaaacgccaaagagcaccctagtttattacctcactctgcctgcttccccgatcctagcaccgcatctacctcgcagtctgccgctcactcaaacgacagcccccctcccccgtcggccgccgccccctcctccgcttccccccacgcctccaggaagtcttggccgcaagtggtctcccgggcttcggcagcgaagcccccttcttttcctcctctctcctcatcttcaacggttacctcaagttcatgcagcacctcaggggttcagccctcgatgccaacagacgactattcggaggagtctgacacggatctcagccaaaagtccgacggaccggcgagcccggtggagggtcccaaagaccccagctgccccaaggacagtggtctgaccagtgtaggaacggacaccttcagattgtaagctttgaagatgaacaatacaaacaaatgaatttaaatacaaaaattaataacaaaccaatttcaaaaatagactaactgcaattccaaagcttctaaccaaaaaacaaaaaaaaaaaaaaaaagaaaaaaaagaaaaagcgtgggttgttttcccatatacctatctatgccggtgattttacattcttgtctttttcttttcttttaatattaaaaaaaaaaaaaaagccctaaccctgttacattgtgtccttttgaaggtactattggtctgggaaacagaagtccgcagggcctccctaatgtctttggagcttaaaccccttgtatatttgccccttttcaataaacgccccacgctgatagcacagaggagcccggcatgcactgtatgggaaagcagtccaccttgttacagttttaaatttcttgctatcttagcattcagataccaatggcttgctaaaagaaaaaaagaaatgtaatgtctttttattctcaggtcaatcgctcacactttgttttcagaatcattgttttatatattattgttttttcagtttttttttttttttttgttccagaaaagattttttgttttgttaacttaaaaatgggcagaaagtattcaagaaaaacaatgtgaactgctttagctttctggggatttttaaggatagcttttctgctgaagccaatttcaaggggaaaagttaagcactcccactttcaaaaaaaaaaaaaaataataacccacacacacaaagagtgttgaggacttgtagcttaaaaaaaataagttttaaaaactgactttctgtatttatgatagatatgaccatttttggtgttgagtagattgttgcattggaaatgaactgaagcagtatggtagatttaaaaggaaaaaaaaaaaaaaaccttttgtgtacatttagctttttgtatggtccagctgacagctcctcatttgatgttgtcttgttcattcctagcagatgatagattgcaatccgttgattcgcctaagcttttctccccttgtcccttaattccactttctctttcttgtcccttaattccactttctctttccttctcccacctcccgtcctataatctcccacttaaggtagctgccttcatttcttagagggagctgcagaattattttataaaactaaagaaagaatttcaagggattctaggggtcattaggatcctcacagattatttttggttggggagttgaaactttttaaaggcatataattctagttacctgtgtctgttagctttgtgcatttattttttatttatccttcttttggcttttttttctttgtaccccttcttttcctccttgtttggtaggagcttcaaatattctttttttttctatactaaaggatttgtttccatttgtgtaattggctgtgtacttttcttttctaaaaaaagtttttggttagggatttggtttttggttttgtgtttgttttttctttcctctctcagaaaaaaaaatttcatgctttaaataaaatccaaagacacaccctttcactgctgatgcagaaaaaagggaaagggttcttgttacttgagaatttgtttctgatttaaacaaacaagacttagtttaataaaagaaagagaaaaacaaaagattcccaggttgttatgtgcttcttctgcaagcagagaggcaaatgttaatgacaattccatataccaaaagacacattttttacttcaaagttttgtccttgtgttaggcagtctgagcagcgagtgatccagagcgcagccaacaaagcagcagatagcagtgtacagaaagcaaaaaaggaactgtatgtgaggcacttgtttctgttaatatccatattcctgttaacacacaccctttctcatgtaaaaagaaaaataaataaatggtctgaactttgaaaactttgtgctgctaaaacatagattttggagacaaataaatagatgctttgctgtttcactttcatagctaaacatcaacagaaaccatctccccttgcccccaaagtgtgaaatccttcttcccttcgttttcttccttatgtttcaaaagggaactttgaagactgtgaatacaggttccattggtcacctttcgggcttctttccccagtgctgaagccactcatcgactttgcaaaagactggagcattccaagatctgaaaatggattttttttctttttttcttttttagccgggactattttatttttatgaatttgtttttagtttaatgaaatagtagatcctgaaatgttgtacatatttctaactaggctgatgcacagtgcaaattccttttttaattgttttttttaagtagaaatactaaagaaagaataccatctaactattcataccagtatccagttgtagcataaggtgtcaaaagcaagtacgcaaaacatttactgttttaacaagctatttccttttaacaagaaatcttgtatttcttcctgtgtttgagatgaacatttttaaattttaaagttgtacagttttttgttttccattattttatcttgtttgtaactctatgaaatatatatatatatattttttgccatttaactgttgtatgttactctgtgtctgtaccatatagaaaaaaaattgtttttgtttttggttctctatgtgatatcagttaacaatgtaacactagctttacctgtcaaattctgctaggtcttctctgaaaacgttgtttttaaaaatgatattgcttggtaatagtgcaatttctatccttttccctcccccctcaacttttaagttcttttctttataattttgctgccccctccctgatggtttgggtttttgtttttgtttttgtttttttttttcatggagctactatgccatcctccctctgtgaggcagagtgactgtcagtgttttgttatgccatgccttgagctgtgggtgtttggcgacaataaggtggttgaatagattggctgagcacacttccacccacctagtgttctcagaggggttatgtgattgtttcaacctggagtgggttgcacccttaatgctttcctctgcaactaaaccgcccacatatatgttcattgaaaaaagtaagaataattctcagcactaacccagaagtagcaaagcagtcagtgatggtgaacattagaggtcaaacatgagttagatgtttgtgggctgacagccatcgtggctatgaccagtactatttacaaagcatgaattcactacaatgctcaactgtttgtttagctttatctcacttggggaatttattcctgtctgctgcattgtaggtagctgggtaggatatatttccacttgctttttaaattagttcttcacctccattgacactcgttttttggttttctccctatagtgtgggttggtgctagacaccagtctgacccacagaatgggagttatttcatccatctttcctccatccttccaaaaaccacatatctacacaaggaaaaatttaatacatctaggaattttttttttaattacaagctatttaaagagatgaatgtggccaaagttttacacaattgaaaataaagtaaaacagacggcatgtgtttaaacctgagtttatcaggcatggcaggaagttgcaggagagagaggcagtgacccaagccagtgcacttgatgttcatggacatatattttttttaaataataaattaaaacattttaaatagaagcataaattgagttgtttgttggcgctgagatactgcccactgtgaaacaaagctttgactagttttttgtttgtttactttcttcaggggggaggggggcaagtttgggtaggaaagaaagcataaatgaacgtgaccctgaggtgaagaggtatatgaacagcctttgcaatgtacaaaaagaaaaaaaaacaaaaaacaacaaaaaaaatagagcaagtgaaaccaaaaatgatgttcttggtgtttttctataatgtagtcttgttagcttttttgttactgtaacaatgctgatctcgaactgtaccaaaatacatggagactaacaaacagaaccacatggaactttcaaactgaaaaaaaaatttgtcacaaaaactttgttgtcatagttaagttgattgtagatggtaattgaatatactcctttgaaaatatttcatcaagtatgtttcctgctcattgtgatacattaaaaaaaaaatatgagcaaaa

SEQ ID NO: 10506 - protein, 2789 aa, Homo sapiens
MRLGGGQLVSEELMNLGESFIQTNDPSLKLFQCAVCNKFTTDNLDMLGLHMNVERSLSEDEWKAVMGDSYQCKLCRYNTQLKANFQLHCKTDKHVQKYQLVAHIKEGGKANEWRLKCVAIGNPVHLKCNACDYYTNSLEKLRLHTVNSRHEASLKLYKHLQQHESGVEGESCYYHCVLCNYSTKAKLNLIQHVRSMKHQRSESLRKLQRLQKGLPEEDEDLGQIFTIRRCPSTDPEEAIEDVEGPSETAADPEELAKDQEGGASSSQAEKELTDSPATSKRISFPGSSESPLSSKRPKTAEEIKPEQMYQCPYCKYSNADVNRLRVHAMTQHSVQPMLRCPLCQDMLNNKIHLQLHLTHLHSVAPDCVEKLIMTVTTPEMVMPSSMFLPAAVPDRDGNSNLEEAGKQPETSEDLGKNILPSASTEQSGDLKPSPADPGSVREDSGFICWKKGCNQVFKTSAALQTHFNEVHAKRPQLPVSDRHVYKYRCNQCSLAFKTIEKLQLHSQYHVIRAATMCCLCQRSFRTFQALKKHLETSHLELSEADIQQLYGGLLANGDLLAMGDPTLAEDHTIIVEEDKEEESDLEDKQSPTGSDSGSVQEDSGSEPKRALPFRKGPNFTMEKFLDPSRPYKCTVCKESFTQKNILLVHYNSVSHLHKLKRALQESATGQPEPTSSPDNKPFKCNTCNVAYSQSSTLEIHMRSVLHQTKARAAKLEAASGSSNGTGNSSSISLSSSTPSPVSTSGSNTFTTSNPSSAGIAPSSNLLSQVPTESVGMPPLGNPIGANIASPSEPKEANRKKLADMIASRQQQQQQQQQQQQQQQQQQQAQTLAQAQAQVQAHLQQELQQQAALIQSQLFNPTLLPHFPMTTETLLQLQQQQHLLFPFYIPSAEFQLNPEVSLPVTSGALTLTGTGPGLLEDLKAQVQVPQQSHQQILPQQQQNQLSIAQSHSALLQPSQHPEKKNKLVIKEKEKESQRERDSAEGGEGNTGPKETLPDALKAKEKKELAPGGGSEPSMLPPRIASDARGNATKALLENFGFELVIQYNENKQKVQKKNGKTDQGENLEKLECDSCGKLFSNILILKSHQEHVHQNYFPFKQLERFAKQYRDHYDKLYPLRPQTPEPPPPPPPPPPPPLPAAPPQPASTPAIPASAPPITSPTIAPAQPSVPLTQLSMPMELPIFSPLMMQTMPLQTLPAQLPPQLGPVEPLPADLAQLYQHQLNPTLLQQQNKRPRTRITDDQLRVLRQYFDINNSPSEEQIKEMADKSGLPQKVIKHWFRNTLFKERQRNKDSPYNFSNPPITSLEELKIDSRPPSPEPPKQEYWGSKRSSRTRFTDYQLRVLQDFFDANAYPKDDEFEQLSNLLNLPTRVIVVWFQNARQKARKNYENQGEGKDGERRELTNDRYIRTSNLNYQCKKCSLVFQRIFDLIKHQKKLCYKDEDEEGQDDSQNEDSMDAMEILTPTSSSCSTPMPSQAYSAPAPSANNTASSAFLQLTAEAEELATFNSKTEAGDEKPKLAEAPSAQPNQTQEKQGQPKPELQQQEQPEQKTNTPQQKLPQLVSLPSLPQPPPQAPPPQCPLPQSSPSPSQLSHLPLKPLHTSTPQQLANLPPQLIPYQCDQCKLAFPSFEHWQEHQQLHFLSAQNQFIHPQFLDRSLDMPFMLFDPSNPLLASQLLSGAIPQIPASSATSPSTPTSTMNTLKRKLEEKASASPGENDSGTGGEEPQRDKRLRTTITPEQLEILYQKYLLDSNPTRKMLDHIAHEVGLKKRVVQVWFQNTRARERKGQFRAVGPAQAHRRCPFCRALFKAKTALEAHIRSRHWHEAKRAGYNLTLSAMLLDCDGGLQMKGDIFDGTSFSHLPPSSSDGQGVPLSPVSKTMELSPRTLLSPSSIKVEGIEDFESPSMSSVNLNFDQTKLDNDDCSSVNTAITDTTTGDEGNADNDSATGIATETKSSSAPNEGLTKAAMMAMSEYEDRLSSGLVSPAPSFYSKEYDNEGTVDYSETSSLADPCSPSPGASGSAGKSGDSGDRPGQKRFRTQMTNLQLKVLKSCFNDYRTPTMLECEVLGNDIGLPKRVVQVWFQNARAKEKKSKLSMAKHFGINQTSYEGPKTECTLCGIKYSARLSVRDHIFSQQHISKVKDTIGSQLDKEKEYFDPATVRQLMAQQELDRIKKANEVLGLAAQQQGMFDNTPLQALNLPTAYPALQGIPPVLLPGLNSPSLPGFTPSNTALTSPKPNLMGLPSTTVPSPGLPTSGLPNKPSSASLSSPTPAQATMAMGPQQPPQQQQQQQQPQVQQPPPPPAAQPPPTPQLPLQQQQQRKDKDSEKVKEKEKAHKGKGEPLPVPKKEKGEAPTATAATISAPLPTMEYAVDPAQLQALQAALTSDPTALLTSQFLPYFVPGFSPYYAPQIPGALQSGYLQPMYGMEGLFPYSPALSQALMGLSPGSLLQQYQQYQQSLQEAIQQQQQRQLQQQQQQKVQQQQPKASQTPVPPGAPSPDKDPAKESPKPEEQKNTPREVSPLLPKLPEEPEAESKSADSLYDPFIVPKVQYKLVCRKCQAGFSDEEAARSHLKSLCFFGQSVVNLQEMVLHVPTGGGGGGSGGGGGGGGGGGGGGSYHCLACESALCGEEALSQHLESALHKHRTITRAARNAKEHPSLLPHSACFPDPSTASTSQSAAHSNDSPPPPSAAAPSSASPHASRKSWPQVVSRASAAKPPSFPPLSSSSTVTSSSCSTSGVQPSMPTDDYSEESDTDLSQKSDGPASPVEGPKDPSCPKDSGLTSVGTDTFRL

SEQ ID NO: 10507 - DNA, 4922 bp, Homo sapiens
cactcatcagctcccacttccagcgcgtcccctccgaccgctgcagccgccaccgccgccgcctcctcctcctcctcctcccggcggtggcggcggcggcggcggcggcggctcgtaccactgcctggcgtgcgagagcgcgctctgtggggaggaagctctgagtcaacatctcgagtcggccttgcacaaacacagaacaatcacgagagcagcaagaaacgccaaagagcaccctagtttattacctcactctgcctgcttccccgatcctagcaccgcatctacctcgcagtctgccgctcactcaaacgacagcccccctcccccgtcggccgccgccccctcctccgcttccccccacgcctccaggaagtcttggccgcaagtggtctcccgggcttcggcagcgaagcccccttcttttcctcctctctcctcatcttcaacggttacctcaagttcatgcagcacctcaggggttcagccctcgatgccaacagacgactattcggaggagtctgacacggatctcagccaaaagtccgacggaccggcgagcccggtggagggtcccaaagaccccagctgccccaaggacagtggtctgaccagtgtaggaacggacaccttcagattgtaagctttgaagatgaacaatacaaacaaatgaatttaaatacaaaaattaataacaaaccaatttcaaaaatagactaactgcaattccaaagcttctaaccaaaaaacaaaaaaaaaaaaaaaaagaaaaaaaagaaaaagcgtgggttgttttcccatatacctatctatgccggtgattttacattcttgtctttttcttttcttttaatattaaaaaaaaaaaaaaagccctaaccctgttacattgtgtccttttgaaggtactattggtctgggaaacagaagtccgcagggcctccctaatgtctttggagcttaaaccccttgtatatttgccccttttcaataaacgccccacgctgatagcacagaggagcccggcatgcactgtatgggaaagcagtccaccttgttacagttttaaatttcttgctatcttagcattcagataccaatggcttgctaaaagaaaaaaagaaatgtaatgtctttttattctcaggtcaatcgctcacactttgttttcagaatcattgttttatatattattgttttttcagtttttttttttttttttgttccagaaaagattttttgttttgttaacttaaaaatgggcagaaagtattcaagaaaaacaatgtgaactgctttagctttctggggatttttaaggatagcttttctgctgaagccaatttcaaggggaaaagttaagcactcccactttcaaaaaaaaaaaaaaataataacccacacacacaaagagtgttgaggacttgtagcttaaaaaaaataagttttaaaaactgactttctgtatttatgatagatatgaccatttttggtgttgagtagattgttgcattggaaatgaactgaagcagtatggtagatttaaaaggaaaaaaaaaaaaaaaccttttgtgtacatttagctttttgtatggtccagctgacagctcctcatttgatgttgtcttgttcattcctagcagatgatagattgcaatccgttgattcgcctaagcttttctccccttgtcccttaattccactttctctttcttgtcccttaattccactttctctttccttctcccacctcccgtcctataatctcccacttaaggtagctgccttcatttcttagagggagctgcagaattattttataaaactaaagaaagaatttcaagggattctaggggtcattaggatcctcacagattatttttggttggggagttgaaactttttaaaggcatataattctagttacctgtgtctgttagctttgtgcatttattttttatttatccttcttttggcttttttttctttgtaccccttcttttcctccttgtttggtaggagcttcaaatattctttttttttctatactaaaggatttgtttccatttgtgtaattggctgtgtacttttcttttctaaaaaaagtttttggttagggatttggtttttggttttgtgtttgttttttctttcctctctcagaaaaaaaaatttcatgctttaaataaaatccaaagacacaccctttcactgctgatgcagaaaaaagggaaagggttcttgttacttgagaatttgtttctgatttaaacaaacaagacttagtttaataaaagaaagagaaaaacaaaagattcccaggttgttatgtgcttcttctgcaagcagagaggcaaatgttaatgacaattccatataccaaaagacacattttttacttcaaagttttgtccttgtgttaggcagtctgagcagcgagtgatccagagcgcagccaacaaagcagcagatagcagtgtacagaaagcaaaaaaggaactgtatgtgaggcacttgtttctgttaatatccatattcctgttaacacacaccctttctcatgtaaaaagaaaaataaataaatggtctgaactttgaaaactttgtgctgctaaaacatagattttggagacaaataaatagatgctttgctgtttcactttcatagctaaacatcaacagaaaccatctccccttgcccccaaagtgtgaaatccttcttcccttcgttttcttccttatgtttcaaaagggaactttgaagactgtgaatacaggttccattggtcacctttcgggcttctttccccagtgctgaagccactcatcgactttgcaaaagactggagcattccaagatctgaaaatggattttttttctttttttcttttttagccgggactattttatttttatgaatttgtttttagtttaatgaaatagtagatcctgaaatgttgtacatatttctaactaggctgatgcacagtgcaaattccttttttaattgttttttttaagtagaaatactaaagaaagaataccatctaactattcataccagtatccagttgtagcataaggtgtcaaaagcaagtacgcaaaacatttactgttttaacaagctatttccttttaacaagaaatcttgtatttcttcctgtgtttgagatgaacatttttaaattttaaagttgtacagttttttgttttccattattttatcttgtttgtaactctatgaaatatatatatatatattttttgccatttaactgttgtatgttactctgtgtctgtaccatatagaaaaaaaattgtttttgtttttggttctctatgtgatatcagttaacaatgtaacactagctttacctgtcaaattctgctaggtcttctctgaaaacgttgtttttaaaaatgatattgcttggtaatagtgcaatttctatccttttccctcccccctcaacttttaagttcttttctttataattttgctgccccctccctgatggtttgggtttttgtttttgtttttgtttttttttttcatggagctactatgccatcctccctctgtgaggcagagtgactgtcagtgttttgttatgccatgccttgagctgtgggtgtttggcgacaataaggtggttgaatagattggctgagcacacttccacccacctagtgttctcagaggggttatgtgattgtttcaacctggagtgggttgcacccttaatgctttcctctgcaactaaaccgcccacatatatgttcattgaaaaaagtaagaataattctcagcactaacccagaagtagcaaagcagtcagtgatggtgaacattagaggtcaaacatgagttagatgtttgtgggctgacagccatcgtggctatgaccagtactatttacaaagcatgaattcactacaatgctcaactgtttgtttagctttatctcacttggggaatttattcctgtctgctgcattgtaggtagctgggtaggatatatttccacttgctttttaaattagttcttcacctccattgacactcgttttttggttttctccctatagtgtgggttggtgctagacaccagtctgacccacagaatgggagttatttcatccatctttcctccatccttccaaaaaccacatatctacacaaggaaaaatttaatacatctaggaattttttttttaattacaagctatttaaagagatgaatgtggccaaagttttacacaattgaaaataaagtaaaacagacggcatgtgtttaaacctgagtttatcaggcatggcaggaagttgcaggagagagaggcagtgacccaagccagtgcacttgatgttcatggacatatattttttttaaataataaattaaaacattttaaatagaagcataaattgagttgtttgttggcgctgagatactgcccactgtgaaacaaagctttgactagttttttgtttgtttactttcttcaggggggaggggggcaagtttgggtaggaaagaaagcataaatgaacgtgaccctgaggtgaagaggtatatgaacagcctttgcaatgtacaaaaagaaaaaaaaacaaaaaacaacaaaaaaaatagagcaagtgaaaccaaaaatgatgttcttggtgtttttctataatgtagtcttgttagcttttttgttactgtaacaatgctgatctcgaactgtaccaaaatacatggagactaacaaacagaaccacatggaactttcaaactgaaaaaaaaatttgtcacaaaaactttgttgtcatagttaagttgattgtagatggtaattgaatatactcctttgaaaatatttcatcaagtatgtttcctgctcattgtgatacattaaaaaaaaaatatgagcaaaa

SEQ ID NO: 10508 - protein, 68 aa, Homo sapiens
MVQLTAPHLMLSCSFLADDRLQSVDSPKLFSPCPLIPLSLSCPLIPLSLSFSHLPSYNLPLKVAAFIS

SEQ ID NO: 10509 - DNA, 567 bp, Homo sapiens
gcagtaacacctttaccacctccaatccaagcagtgctggcattgctccaagctctaacttactaagccaagtgcccactgagagtgtagggatgccacccctggggaatcctattggtgccaacattgcttccccttcagagcccaaagaggccaatcggaagaaactggcagatatgattgcatccaggcagcagcaacaacagcagcagcaacagcaacaacaacaacaacaacaacaacaacaagcacaaacgctggcccaggcccaggctcaagttcaagctcacctgcagcaggagctgcagcaacaggctgccctgatccagtctcagctgtttaaccccaccctccttcctcacttccccagtgctgagttccagcttaaccccgaggtgagcttgccagtgaccagtggggcactgacactgactgggacaggcccaggcctgctggaagatctgaaggctcaggttcaggtcccacagcagagccatcagcagatcttgccgcagcagcagcagaaccaactctctatagcccagagtcactctgccctccttcagc

SEQ ID NO: 10510 - protein, 157 aa, Homo sapiens
MPPLGNPIGANIASPSEPKEANRKKLADMIASRQQQQQQQQQQQQQQQQQQQAQTLAQAQAQVQAHLQQELQQQAALIQSQLFNPTLLPHFPSAEFQLNPEVSLPVTSGALTLTGTGPGLLEDLKAQVQVPQQSHQQILPQQQQNQLSIAQSHSALL

SEQ ID NO: 10511 - DNA, 372 bp, Homo sapiens
acccagtaggtcctccgatactcaagaactccttcccggagcggagacacagatcatggctatcagatgggtcccttggcagctcagctgcagtgtcactctgtccacccaggctggagcgtaatggcacgatctcagctcactgcaacctccatctccagggttcaagcaattctcctgcctcagcctctcgatgaaaccaacttcataaaggctgtggcatttcttccaagacactacgatgaagatgacatcatcaggagacttagggaaagctacgacttttcaagtaactaaagtgggtgaccctcactactttgtgggctcaatagctgtgtcttcatttataaaaataaaatggtagagactgta

SEQ ID NO: 10512 - protein, 76 aa, Homo sapiens
MGPLAAQLQCHSVHPGWSVMARSQLTATSISRVQAILLPQPLDETNFIKAVAFLPRHYDEDDIIRRLRESYDFSSN

SEQ ID NO: 10513 - DNA, 504 bp, Homo sapiens
gcacgcagtgtgccatctgcaaaggcttcacgttccagtgtgccatctggtgtggatgtcactgtgtgaagataaggacagaagtgcagagctgcgctttgtgtgttgtctatgtcggctgagctaccaaggtggaagttttcatggagaaaagcacctggctccagggccagtgttacagtgttaccctgtaaggtgttagccttaaaccaccgagcagcgttctcttgatgccagtgcagagaccagagtcagatgcccgaggacagtgggtaggaatttcatcaacaaatggacctatggcatcatggctttagaagctggtacatttactgagctgatggacagtggccttctaaaatatgacacttaaattgtaaatatgcactgtacttaaggattcttaagatgtatttttttgttatttctcctccagctgctatcccttggctaataaaattctagtaatttgaaaaaaaaaaaaaagagagaaagttaaacaac

SEQ ID NO: 10514 - protein, 48 aa, Homo sapiens
MSLCEDKDRSAELRFVCCLCRLSYQGGSFHGEKHLAPGPVLQCYPVRC

SEQ ID NO: 10515 - DNA, 1219 bp, Homo sapiens
cttatgagactcttcagatattttccatgccttctctgattgccatcttcccttcccatttgattttcttcagcgggaagagaggcagagcacttgtcctccccttggggagaatcctcaccagaagagctccgctttgggagtctgacctacagtgatccccgtgagcgagaacgcgaccagcatgataaaaataaaaggctcctggaccccgccaatacccagcaatttgatgactttaagaaatgctatggggaaatcctctaccgttggggtctgagagagaagcgagctgaagtgttgaagtttgtctcctgtcctcctgaccctcacaaagggatcgagttcggcgtgtactgcagccactgccggagtgaggtccgtggcacgcagtgtgccatctgcaaaggcttcacgttccagtgtgccatctgtcacgtggctgtgcggggatcgtccaatttctgcctgacctgtgggcacggtggccacaccagccacatgatggagtggtttcggacccaggaggtgtgtcccaccgggtgtgggtgccactgcctgcttgaaagcactttctgaacctacagaagttgggtattgtctgaaatcccagaggacccataagtgccggtgacaagctgtctgtcaggggagaggctccagaacctgggttcgtccccagtgagaccggaggatgatcccccaaggactgcgcagcatcagctcttggtgggcctctgccttctcttctgtttggccacctggtgtggatgtcactgtgtgaagataaggacagaagtgcagagctgcgctttgtgtgttgtctatgtcggctgagctaccaaggtggaagttttcatggagaaaagcacctggctccagggccagtgttacagtgttaccctgtaaggtgttagccttaaaccaccgagcagcgttctcttgatgccagtgcagagaccagagtcagatgcccgaggacagtgggtaggaatttcatcaacaaatggacctatggcatcatggctttagaagctggtacatttactgagctgatggacagtggccttctaaaatatgacacttaaattgtaaatatgcactgtacttaaggattcttaagatgtatttttttgttatttctcctccagctgctatcccttggctaataaaattctagtaatttgaaaaaaaaaaaaaagagagaaagttaaacaac

SEQ ID NO: 10516 - protein, 31 aa, Homo sapiens
MIKIKGSWTPPIPSNLMTLRNAMGKSSTVGV

SEQ ID NO: 10517 - DNA, 1898 bp, Homo sapiens
gtgctgggattccaggcatgagccacaacgcccagcccatcatttgcgttagcatcatgtgtgtgtacttagtgatcaagttctcttagtaataaatacctgcgcaaaaaggcaagggtaggagagagttctatttagttatatttctcagaatattcagcctcgcttaacatttcttctgggaaatccattggccacgtgctgtcttatgagactcttcagatattttccatgccttctctgattgccatcttcccttcccatttgattttcttcagcgggaagagaggcagagcacttgtcctccccttggggagaatcctcaccagaagagctccgctttgggagtctgacctacagtgatccccgtgagcgagaacgcgaccagcatgataaaaataaaaggtaaccaccctcccaggtgagagctgcaatgccaggactccaggcaggactccagtttctccacaatcacaactcttactttttttttttttggacacagaatcttacccggtcactaggttggagtgcagtggcgggatctcggctctctgcaacctctgcttcccaggctcaagtgattctcctgcctcagcctcctgagtagctgggattacaggcacacgccaccatgactggctaattttttgtatttttagtacagacagggtttcaccatgttggccaggctggtctcaaactcctgacctcaagtgatccacccgcctcagcctcccaaagtgctgggagtgacaggtgttagccaccgtgcctggccaggactgttgctttaagaagggtatattaagtgccatttaggatgaagcttgttttttcttaaaggaactgacaggaaatctttttaactttatccaggctcctggaccccgccaatacccagcaatttgatgactttaagaaatgctatggggaaatcctctaccgttggggtctgagagagaagcgagctgaagtgttgaagtttgtctcctgtcctcctgaccctcacaaagggatcgagttcggcgtgtactgcagccactgccggagtgaggtccgtggcacgcagtgtgccatctgcaaaggcttcacgttccagtgtgccatctgtcacgtggctgtgcggggatcgtccaatttctgcctgacctgtgggcacggtggccacaccagccacatgatggagtggtttcggacccaggaggtgtgtcccaccgggtgtgggtgccactgcctgcttgaaagcactttctgaacctacagaagttgggtattgtctgaaatcccagaggacccataagtgccggtgacaagctgtctgtcaggggagaggctccagaacctgggttcgtccccagtgagaccggaggatgatcccccaaggactgcgcagcatcagctcttggtgggcctctgccttctcttctgtttggccacctggtgtggatgtcactgtgtgaagataaggacagaagtgcagagctgcgctttgtgtgttgtctatgtcggctgagctaccaaggtggaagttttcatggagaaaagcacctggctccagggccagtgttacagtgttaccctgtaaggtgttagccttaaaccaccgagcagcgttctcttgatgccagtgcagagaccagagtcagatgcccgaggacagtgggtaggaatttcatcaacaaatggacctatggcatcatggctttagaagctggtacatttactgagctgatggacagtggccttctaaaatatgacacttaaattgtaaatatgcactgtacttaaggattcttaagatgtatttttttgttatttctcctccagctgctatcccttggctaataaaattctagtaatttgaaaaaaaaaaaaaagagagaaagttaaacaac

SEQ ID NO: 10518 - protein, 58 aa, Homo sapiens
MPGLQAGLQFLHNHNSYFFFFWTQNLTRSLGWSAVAGSRLSATSASQAQVILLPQPPE

SEQ ID NO: 10519 - DNA, 2099 bp, Homo sapiens
ttcaaattcacttattctagtagtttgtagattcctttgaattttttatgtctgtaatcatagaagcattctatgcttgtgcagataaagcatttttcagtgttaaaagttttattgacttctttttctggagtttccatcttctcattttgtcttctccttttggtatcaagtgctaagaatagcaccacttggaaatatgacaggactgcagccagtgtggataattatcattttcaactacagatctctctcagccttgtctgcttatcacactggcttgatcgcgcccatgaagatccgcacagaggcccctgggaaccttcgtttatacagtgggagccccactcgcagcgagaaagagcaggtctccatcagctccttctactacaaggagcggaaatcaagacgatggaaaagtaagcgtgagggatcagactctggcaatcgacagatcaaggctgctgggaaagtcatcatccaggatattgcttgcctcctgcctgttcacaaatcgctgggagagctgtacatattgaatgtgaatgatattcaggaaacatgtcagaagaatgccgcctctgccttgctcgttggaagaaaggatcttgtccaggtttggtcgctggctacggtagctacagatctttgccttggtccgaaatctgacccagatttggaaacaccctgggctcgacatccatttgggcggcagctgctggagtccctgttggctcactattgccggctccgggatgttcagacactggcgatgctctgtagcgtgtttgaagcccagtctcggcctcaggggctaccaaacccctttgggccttttcctaaccgttcttctaatcttgtggtgtcccatagtcgatatcctagctttacctcttctggttcctgctccagtatgtcagacccagggctcaacactggcggctggaacatagcgggaagagaggcagagcacttgtcctccccttggggagaatcctcaccagaagagctccgctttgggagtctgacctacagtgatccccgtgagcgagaacgcgaccagcatgataaaaataaaaggctcctggaccccgccaatacccagcaatttgatgactttaagaaatgctatggggaaatcctctaccgttggggtctgagagagaagcgagctgaagtgttgaagtttgtctcctgtcctcctgaccctcacaaagggatcgagttcggcgtgtactgcagccactgccggagtgaggtccgtggcacgcagtgtgccatctgcaaaggcttcacgttccagtgtgccatctgtcacgtggctgtgcggggatcgtccaatttctgcctgacctgtgggcacggtggccacaccagccacatgatggagtggtttcggacccaggaggtgtgtcccaccgggtgtgggtgccactgcctgcttgaaagcactttctgaacctacagaagttgggtattgtctgaaatcccagaggacccataagtgccggtgacaagctgtctgtcaggggagaggctccagaacctgggttcgtccccagtgagaccggaggatgatcccccaaggactgcgcagcatcagctcttggtgggcctctgccttctcttctgtttggccacctggtgtggatgtcactgtgtgaagataaggacagaagtgcagagctgcgctttgtgtgttgtctatgtcggctgagctaccaaggtggaagttttcatggagaaaagcacctggctccagggccagtgttacagtgttaccctgtaaggtgttagccttaaaccaccgagcagcgttctcttgatgccagtgcagagaccagagtcagatgcccgaggacagtgggtaggaatttcatcaacaaatggacctatggcatcatggctttagaagctggtacatttactgagctgatggacagtggccttctaaaatatgacacttaaattgtaaatatgcactgtacttaaggattcttaagatgtatttttttgttatttctcctccagctgctatcccttggctaataaaattctagtaatttgaaaaaaaaaaaaaagagagaaagttaaacaac

SEQ ID NO: 10520 - protein, 419 aa, Homo sapiens
MTGLQPVWIIIIFNYRSLSALSAYHTGLIAPMKIRTEAPGNLRLYSGSPTRSEKEQVSISSFYYKERKSRRWKSKREGSDSGNRQIKAAGKVIIQDIACLLPVHKSLGELYILNVNDIQETCQKNAASALLVGRKDLVQVWSLATVATDLCLGPKSDPDLETPWARHPFGRQLLESLLAHYCRLRDVQTLAMLCSVFEAQSRPQGLPNPFGPFPNRSSNLVVSHSRYPSFTSSGSCSSMSDPGLNTGGWNIAGREAEHLSSPWGESSPEELRFGSLTYSDPRERERDQHDKNKRLLDPANTQQFDDFKKCYGEILYRWGLREKRAEVLKFVSCPPDPHKGIEFGVYCSHCRSEVRGTQCAICKGFTFQCAICHVAVRGSSNFCLTCGHGGHTSHMMEWFRTQEVCPTGCGCHCLLESTF

SEQ ID NO: 10521 - DNA, 2652 bp, Homo sapiens
tgcacactgaagatacagatcaccagcacactgcaagccatggggaggaagaaggtaatttgtcaaactgatgtctcaggtaaggtgccactctacgcattgcagagttgtggcagataccccagacctgttctctgtttcattttcaaaaatgctttccaacattgaacttctctctcctgctagccctaaaagaagatccccctagaaatctcctggaagagaggaaatcagatcaactggggctgcctcagaccttgcagcaggaattctccctgatcaatgtgcaaatccggaatgtcaatgtggagatggatgcggcagacaggagctgcacagtgtctgtgcactgcagcaaccatcgtgtcaagatgctggtgaagttccctgcacagtacccaaacaacgccgccccttccttccagtttattaaccccacaaccatcacatccaccatgaaagctaagctgctgaagatcctgaaggacacagccctgcagaaagtgaagcgtggccagagctgcctggagccctgcctgcgccagctcgtctcctgccttgagtcctttgtgaaccaggaagacagcgcttccagcaacccgtttgcactccccaactctgtcactccccccttaccgacgtttgcgcgggtgaccacggcttacgggtcgtaccaggacgccaacattccctttcctaggacttctggggccaggttctgcggagcaggttacctggtatatttcacaaggcccatgacaatgcatcgggcggtgtctcccacagagcctactccgagatctctctcagccttgtctgcttatcacactggcttgatcgcgcccatgaagatccgcacagaggcccctgggaaccttcgtttatacagtgggagccccactcgcagcgagaaagagcaggtctccatcagctccttctactacaaggagcggaaatcaagacgatggaaaagtaagcgtgagggatcagactctggcaatcgacagatcaaggctgctgggaaagtcatcatccaggatattgcttgcctcctgcctgttcacaaatcgctgggagagctgtacatattgaatgtgaatgatattcaggaaacatgtcagaagaatgccgcctctgccttgctcgttggaagaaaggatcttgtccaggtttggtcgctggctacggtagctacagatctttgccttggtccgaaatctgacccagatttggaaacaccctgggctcgacatccatttgggcggcagctgctggagtccctgttggctcactattgccggctccgggatgttcagacactggcgatgctctgtagcgtgtttgaagcccagtctcggcctcaggggctaccaaacccctttgggccttttcctaaccgttcttctaatcttgtggtgtcccatagtcgatatcctagctttacctcttctggttcctgctccagtatgtcagacccagggctcaacactggcggctggaacatagcgggaagagaggcagagcacttgtcctccccttggggagaatcctcaccagaagagctccgctttgggagtctgacctacagtgatccccgtgagcgagaacgcgaccagcatgataaaaataaaaggctcctggaccccgccaatacccagcaatttgatgactttaagaaatgctatggggaaatcctctaccgttggggtctgagagagaagcgagctgaagtgttgaagtttgtctcctgtcctcctgaccctcacaaagggatcgagttcggcgtgtactgcagccactgccggagtgaggtccgtggcacgcagtgtgccatctgcaaaggcttcacgttccagtgtgccatctgtcacgtggctgtgcggggatcgtccaatttctgcctgacctgtgggcacggtggccacaccagccacatgatggagtggtttcggacccaggaggtgtgtcccaccgggtgtgggtgccactgcctgcttgaaagcactttctgaacctacagaagttgggtattgtctgaaatcccagaggacccataagtgccggtgacaagctgtctgtcaggggagaggctccagaacctgggttcgtccccagtgagaccggaggatgatcccccaaggactgcgcagcatcagctcttggtgggcctctgccttctcttctgtttggccacctggtgtggatgtcactgtgtgaagataaggacagaagtgcagagctgcgctttgtgtgttgtctatgtcggctgagctaccaaggtggaagttttcatggagaaaagcacctggctccagggccagtgttacagtgttaccctgtaaggtgttagccttaaaccaccgagcagcgttctcttgatgccagtgcagagaccagagtcagatgcccgaggacagtgggtaggaatttcatcaacaaatggacctatggcatcatggctttagaagctggtacatttactgagctgatggacagtggccttctaaaatatgacacttaaattgtaaatatgcactgtacttaaggattcttaagatgtatttttttgttatttctcctccagctgctatcccttggctaataaaattctagtaatttgaaaaaaaaaaaaaagagagaaagttaaacaac

SEQ ID NO: 10522 - protein, 566 aa, Homo sapiens
MDAADRSCTVSVHCSNHRVKMLVKFPAQYPNNAAPSFQFINPTTITSTMKAKLLKILKDTALQKVKRGQSCLEPCLRQLVSCLESFVNQEDSASSNPFALPNSVTPPLPTFARVTTAYGSYQDANIPFPRTSGARFCGAGYLVYFTRPMTMHRAVSPTEPTPRSLSALSAYHTGLIAPMKIRTEAPGNLRLYSGSPTRSEKEQVSISSFYYKERKSRRWKSKREGSDSGNRQIKAAGKVIIQDIACLLPVHKSLGELYILNVNDIQETCQKNAASALLVGRKDLVQVWSLATVATDLCLGPKSDPDLETPWARHPFGRQLLESLLAHYCRLRDVQTLAMLCSVFEAQSRPQGLPNPFGPFPNRSSNLVVSHSRYPSFTSSGSCSSMSDPGLNTGGWNIAGREAEHLSSPWGESSPEELRFGSLTYSDPRERERDQHDKNKRLLDPANTQQFDDFKKCYGEILYRWGLREKRAEVLKFVSCPPDPHKGIEFGVYCSHCRSEVRGTQCAICKGFTFQCAICHVAVRGSSNFCLTCGHGGHTSHMMEWFRTQEVCPTGCGCHCLLESTF

SEQ ID NO: 10523 - DNA, 3694 bp, Homo sapiens
caggagcaaccagggcacggggcgtgtcggggctgattctctggctgtgtggggcgcacggtcccgggatactggggacggcggggtgggagggcgccgtcctggggccgcggcggccgggcgggggagatggcggcgcgatggagcagcgaaaacgtggttgtagagttccgtgactcccaggcaactgcgatgtctgtggactgtcttgggcagcatgcagtgctttctggccgcagattcttatacatcgtcaatctagatgcccctttcgaaggtcaccgaaagatctctcgccagagcaaatgggacattggagctgtgcagtggaatcctcatgacagctttgcacactattttgcggcttcgagtaaccaacgagtagacctttacaagtggaaagacggcagtggggaagttggcacaaccttacaaggccacactcgtgtcatcagcgacttggactgggcggtgtttgagcctgacctcctggttaccagctctgtggacacctacatctacatttgggatatcaaagacacaaggaaacctactgttgcactgtctgctgttgcgggtgcctcccaggtcaaatggaataaaaaaaatgctaactgccttgccaccagccatgacggcgatgtgcggatatgggataagaggaaacccagtacagcagtggaatatctagccgcccacctctccaaaatccatggcctggactggcacccagacagcgagcacattcttgctacctccagtcaagacaattctgtgaagttctgggattaccgccagcctcggaaatacctcaatattcttccttgccaggtgcctgtctggaaggccagatacacacctttcagcaatggattggtgactgtgatggttccccagctgcggagggaaaacagccttctcctgtggaatgtctttgacttgaacaccccagtccacaccttcgtggggcatgatgatgtggtcctggagttccagtggaggaagcagaaggaagggtccaaggactatcaactggtgacgtggtcccgggatcagaccttgagaatgtggcgggtggattcccagatgcagaggctttgtgcaaatgacatattagatggtgttgatgagttcattgagagtatttcccttctgccggaacctgagaagaccctgcacactgaagatacagatcaccagcacactgcaagccatggggaggaagaagccctaaaagaagatccccctagaaatctcctggaagagaggaaatcagatcaactggggctgcctcagaccttgcagcaggaattctccctgatcaatgtgcaaatccggaatgtcaatgtggagatggatgcggcagacaggagctgcacagtgtctgtgcactgcagcaaccatcgtgtcaagatgctggtgaagttccctgcacagtacccaaacaacgccgccccttccttccagtttattaaccccacaaccatcacatccaccatgaaagctaagctgctgaagatcctgaaggacacagccctgcagaaagtgaagcgtggccagagctgcctggagccctgcctgcgccagctcgtctcctgccttgagtcctttgtgaaccaggaagacagcgcttccagcaacccgtttgcactccccaactctgtcactccccccttaccgacgtttgcgcgggtgaccacggcttacgggtcgtaccaggacgccaacattccctttcctaggacttctggggccaggttctgcggagcaggttacctggtatatttcacaaggcccatgacaatgcatcgggcggtgtctcccacagagcctactccgagatctctctcagccttgtctgcttatcacactggcttgatcgcgcccatgaagatccgcacagaggcccctgggaaccttcgtttatacagtgggagccccactcgcagcgagaaagagcaggtctccatcagctccttctactacaaggagcggaaatcaagacgatggaaaagtaagcgtgagggatcagactctggcaatcgacagatcaaggctgctgggaaagtcatcatccaggatattgcttgcctcctgcctgttcacaaatcgctgggagagctgtacatattgaatgtgaatgatattcaggaaacatgtcagaagaatgccgcctctgccttgctcgttggaagaaaggatcttgtccaggtttggtcgctggctacggtagctacagatctttgccttggtccgaaatctgacccagatttggaaacaccctgggctcgacatccatttgggcggcagctgctggagtccctgttggctcactattgccggctccgggatgttcagacactggcgatgctctgtagcgtgtttgaagcccagtctcggcctcaggggctaccaaacccctttgggccttttcctaaccgttcttctaatcttgtggtgtcccatagtcgatatcctagctttacctcttctggttcctgctccagtatgtcagacccagggctcaacactggcggctggaacatagcgggaagagaggcagagcacttgtcctccccttggggagaatcctcaccagaagagctccgctttgggagtctgacctacagtgatccccgtgagcgagaacgcgaccagcatgataaaaataaaaggctcctggaccccgccaatacccagcaatttgatgactttaagaaatgctatggggaaatcctctaccgttggggtctgagagagaagcgagctgaagtgttgaagtttgtctcctgtcctcctgaccctcacaaagggatcgagttcggcgtgtactgcagccactgccggagtgaggtccgtggcacgcagtgtgccatctgcaaaggcttcacgttccagtgtgccatctgtcacgtggctgtgcggggatcgtccaatttctgcctgacctgtgggcacggtggccacaccagccacatgatggagtggtttcggacccaggaggtgtgtcccaccgggtgtgggtgccactgcctgcttgaaagcactttctgaacctacagaagttgggtattgtctgaaatcccagaggacccataagtgccggtgacaagctgtctgtcaggggagaggctccagaacctgggttcgtccccagtgagaccggaggatgatcccccaaggactgcgcagcatcagctcttggtgggcctctgccttctcttctgtttggccacctggtgtggatgtcactgtgtgaagataaggacagaagtgcagagctgcgctttgtgtgttgtctatgtcggctgagctaccaaggtggaagttttcatggagaaaagcacctggctccagggccagtgttacagtgttaccctgtaaggtgttagccttaaaccaccgagcagcgttctcttgatgccagtgcagagaccagagtcagatgcccgaggacagtgggtaggaatttcatcaacaaatggacctatggcatcatggctttagaagctggtacatttactgagctgatggacagtggccttctaaaatatgacacttaaattgtaaatatgcactgtacttaaggattcttaagatgtatttttttgttatttctcctccagctgctatcccttggctaataaaattctagtaatttgaaaaaaaaaaaaaagagagaaagttaaacaac

SEQ ID NO: 10524 - protein, 974 aa, Homo sapiens; identical to SEQ ID NO: 1695

SEQ ID NO: 10525 - DNA, 2015 bp, Homo sapiens
caggagcaaccagggcacggggcgtgtcggggctgattctctggctgtgtggggcgcacggtcccgggatactggggacggcggggtgggagggcgccgtcctggggccgcggcggccgggcgggggagatggcggcgcgatggagcagcgaaaacgtggttgtagagttccgtgactcccaggcaactgcgatgtctgtggactgtcttgggcagcatgcagtgctttctggccgcagattcttatacatcgtcaatctagatgcccctttcgaaggtcaccgaaagatctctcgccagagcaaatgggacattggagctgtgcagtggaatcctcatgacagctttgcacactattttgcggcttcgagtaaccaacgagtagacctttacaagtggaaagacggcagtggggaagttggcacaaccttacaaggccacactcgtgtcatcagcgacttggactgggcggtgtttgagcctgacctcctggttaccagctctgtggacacctacatctacatttgggatatcaaagacacaaggaaacctactgttgcactgtctgctgttgcgggtgcctcccaggtcaaatggaataaaaaaaatgctaactgccttgccaccagccatgacggcgatgtgcggatatgggataagaggaaacccagtacagcagtggaatatctagccgcccacctctccaaaatccatggcctggactggcacccagacagcgagcacattcttgctacctccagtcaagacaattctgtgaagttctgggattaccgccagcctcggaaatacctcaatattcttccttgccaggtgcctgtctggaaggccagatacacacctttcagcaatggattggtgactgtgatggttccccagctgcggagggaaaacagccttctcctgtggaatgtctttgacttgaacaccccagtccacaccttcgtggggcatgatgatgtggtcctggagttccagtggaggaagcagaaggaagggtccaaggactatcaactggtgacgtggtcccgggatcagaccttgagaatgtggcgggtggattcccagatgcagaggctttgtgcaaatgacatattagatggtgttgatgagttcattgagagtatttcccttctgccggaacctgagaagaccctgcacactgaagatacagatcaccagcacactgcaagccatggggaggaagaagccctaaaagaagatccccctagaaatctcctggaagagaggaaatcagatcaactggggctgcctcagaccttgcagcaggaattctccctgatcaatgtgcaaatccggaatgtcaatgtggagatggatgcggcagacaggagctgcacagtgtctgtgcactgcagcaaccatcgtgtcaagatgctggtgaagttccctgcacagtacccaaacaacgccgccccttccttccagtttattaaccccacaaccatcacatccaccatgaaagctaagctgctgaagatcctgaaggacacagccctgcagaaagtgaagcgtggccagagctgcctggagccctgcctgcgccagctcgtctcctgccttgagtcctttgtgaaccaggaagacagcgcttccagcaacccgtttgcactccccaactctgtcactccccccttaccgacgtttgcgcgggtgaccacggcttacgggtcgtaccaggacgccaacattccctttcctaggacttctggggccaggttctgcggagcaggttacctggtatatttcacaaggcccatgacaatgcatcgggcggtgtctcccacagagcctactccgaggtgagtcagggagatgcagaagccgctctacgttcccggggccagaagtggccagagacctgggaaggaccactgagtttgcttttggacagtgcatttcagttcttcagtaaactcccattataagatttatttgagaaagattgaagtcaattaaattgcaaaaaagctgtg

SEQ ID NO: 10526 - protein, 571 aa, Homo sapiens
MAARWSSENVVVEFRDSQATAMSVDCLGQHAVLSGRRFLYIVNLDAPFEGHRKISRQSKWDIGAVQWNPHDSFAHYFAASSNQRVDLYKWKDGSGEVGTTLQGHTRVISDLDWAVFEPDLLVTSSVDTYIYIWDIKDTRKPTVALSAVAGASQVKWNKKNANCLATSHDGDVRIWDKRKPSTAVEYLAAHLSKIHGLDWHPDSEHILATSSQDNSVKFWDYRQPRKYLNILPCQVPVWKARYTPFSNGLVTVMVPQLRRENSLLLWNVFDLNTPVHTFVGHDDVVLEFQWRKQKEGSKDYQLVTWSRDQTLRMWRVDSQMQRLCANDILDGVDEFIESISLLPEPEKTLHTEDTDHQHTASHGEEEALKEDPPRNLLEERKSDQLGLPQTLQQEFSLINVQIRNVNVEMDAADRSCTVSVHCSNHRVKMLVKFPAQYPNNAAPSFQFINPTTITSTMKAKLLKILKDTALQKVKRGQSCLEPCLRQLVSCLESFVNQEDSASSNPFALPNSVTPPLPTFARVTTAYGSYQDANIPFPRTSGARFCGAGYLVYFTRPMTMHRAVSPTEPTPR

SEQ ID NO: 10527 - DNA, 556 bp, Homo sapiens
tgcacactgaagatacagatcaccagcacactgcaagccatggggaggaagaaggtaatttgtcaaactgatgtctcaggtaaggtgccactctacgcattgcagagttgtggcagataccccagacctgttctctgtttcattttcaaaaatgctttccaacattgaacttctctctcctgctagccctaaaagaagatccccctagaaatctcctggaagagaggaaatcagatcaactggggctgcctcagaccttgcagcaggaattctccctgatcaatgtgcaaatccggaatgtcaatgtggagatggatgcggcagacaggagctgcacagtgtctgtgcactgcagcaaccatcgtgtcaagatgctggtgaagttccctgcacagtacccaaacaacgccgccccttccttccagtttattaaccccacaaccatcacatccaccatgaaagctaagctgctgaaggtgggggtctgggttcccaaattctccttgctgttctgcatcattgtctagatggattagtaaagaagaatgaaaactcc

SEQ ID NO: 10528 - protein, 71 aa, Homo sapiens [sequence omitted]

SEQ ID NO: 10529 - DNA, 1265 bp, Homo sapiens
gcagtgcgcaggcgtgagcggtcgggccccgacgcgcgcgggtctcgtttggagcgggagtgagttcctgagcgagtggacccggcagcgggcgataggggggccaggtgcctccacagtcagccatggcagcgctgcgctacgcggggctggacgacacggacagtgaggacgagctgcctccgggctgggaggagagaaccaccaaggacggctgggtttactacgccaatcacaccgaggagaagactcagtgggaacatccaaaaactggaaaaagaaaacgagtggcaggagatttgccatacggatgggaacaagaaactgatgagaacggacaagtgttttttgttgaccatataaataaaagaaccacctacttggacccaagactggcgtttactgtggatgataatccgaccaagccaaccacccggcaaagatacgacggcagcaccactgccatggaaattctccagggccgggatttcactggcaaagtggttgtggtcactggagctaattcaggaatagggttcgaaaccgccaagtcttttgccctccatggtgcacatgtgatcttggcctgcaggaacatggcaagggcgagtgaagcagtgtcacgcattttagaagaatggcataaagccaaggtagaagcaatgaccctggacctcgctctgctccgtagcgtgcagcattttgctgaagcattcaaggccaagaatgtgcctcttcatgtgcttgtgtgcaacgcagcaacttttgctctaccctggagtctcaccaaagatggcctggagaccacctttcaagtgaatcatctggggcacttctaccttgtccagctcctccaggatgttttgtgccgctcagctcctgcccgtgtcattgtggtctcctcagagtcccatcgatttacagatattaacgactccttgggaaaactggacttcagtcgcctctctccaacaaaaaacgactattgggcgatgctggcttataacaggtccaagctctgcaacatcctcttctccaacgagctgcaccgtcgcctctccccacgcggggtcacgtcgaacgcagtgcatcctggaaatatgatgtactccaacattcatcgcagctggtgggtgtacacactgctgtttaccttggcgaggcctttcaccaagtccatggtttcagactgcctggtagaaggaggtcacttctgattgtcagtgactttgagctgagtgctgaaataaaatgataaacaagtc

SEQ ID NO: 10530 - protein, 363 aa, Homo sapiens
MAALRYAGLDDTDSEDELPPGWEERTTKDGWVYYANHTEEKTQWEHPKTGKRKRVAGDLPYGWEQETDENGQVFFVDHINKRTTYLDPRLAFTVDDNPTKPTTRQRYDGSTTAMEILQGRDFTGKVVVVTGANSGIGFETAKSFALHGAHVILACRNMARASEAVSRILEEWHKAKVEAMTLDLALLRSVQHFAEAFKAKNVPLHVLVCNAATFALPWSLTKDGLETTFQVNHLGHFYLVQLLQDVLCRSAPARVIVVSSESHRFTDINDSLGKLDFSRLSPTKNDYWAMLAYNRSKLCNILFSNELHRRLSPRGVTSNAVHPGNMMYSNIHRSWWVYTLLFTLARPFTKSMVSDCLVEGGHF

SEQ ID NO: 10531 - DNA, 719 bp, Homo sapiens
ggggattctgtgtccctgcatccagaaaagggacagatatagaaagggaggatgcggtctcaccgggccataaacatatatgaatccttcttggaaggaatcagaaatactcgcaggccttctagtttctgggtaaactgatagaacacaggctctttaactggacagtcaaaccacaatgccccctggtggtgaaatcatgcatatacacatgtcatcacagataggaaattctccaataaggtcaacacgacaaggacatctgcagtgatctttctacatgctctgccaacttggcactcatctataactttagaagaggaggcagaacatcagtgatgactgcaaacatatgcttgatttttttaagcaacgggaaaatgaaaaatgaacgggaggagggaacactgctgccttctgaggacagaagtcgtgtttcaagtagtcaggagtgatggggaggtgggacgagaatgaagatttaggggaatctgaacaaaacaaggtggtgtatggggaatgagggcagtcagtaaagccaaatagtaccaggtggaaaaatagcctaaaagaagtacaagtctaatcatccaaaaattctaaagcaaaactaaaactccatagttcagcaaaagacaccctttcaggtgtttagaagactgtggttatccgtttaaagatgttcctctctcaaggaatctctgagaactataaatgtg

SEQ ID NO: 10532 - protein, 30 aa, Homo sapiens
MPPGGEIMHIHMSSQIGNSPIRSTRQGHLQ

SEQ ID NO: 10533 - DNA, 707 bp, Homo sapiens
cctcatgtatcactgaaacaaccaactgaaaaccattgagaggctcatggtgaaagaagacagacagtgtaatttccctggaaactcaattttgattcagacgtccacagcatctcatttctgcctttaaaaaatttcaagagtgacattttggcatgactggactcacaggtggagaagtgttgtcttttccctgcattgagatagcattgcatggagatccttgtactcttcgaacagaggctgcagatggacacaggatctgctcagggagataagatcacctgctaattctgctttctccatcagagtctgaatgatcagtgatggggaccagagctaggttaggtctctggaaacgccctctgtctgagtccgggagatggatgatatgggtaatgacttgctgctttatcttctctccatctccttacagcagctccaactactgacttttattgtgtggcagctaattgtaggattctatttctgtaaagagaaggcaagagaggaatgcagtgtccaccatccctgcagccctttggcgccttccccctcccattaccttgaagtagagggaaaggggacgacagaagaacccttagaagtaagactttttctgtctctgatgccacggacctttgaaatatttttttgaaaagaaggcctcccttggctgataccttctgactgttagtgaataaagg

SEQ ID NO: 10534 - protein, 40 aa, Homo sapiens
MTGLTGGEVLSFPCIEIALHGDPCTLRTEAADGHRICSGR

SEQ ID NO: 10535 - DNA, 4238 bp, Homo sapiens
cgaggagaccaagccgctgctggggggcgacgtgtcggcccccgaaggcacgaagatgggcgccgtgccctgccgccgggctcttctgctttgcaacgggatgaggtacaaactgctgcaggagggcgacattcaggtctgtgtcatccggcacccgcggacctttctcagcaagatcctcacctcgaaattcctgaggcgctgggagccgcaccacctaacgctggccgacaacagcctggcgtccgccacgccaactgggtacatggaaaactcagtctcctacagcgcaattgaagacgttcagctgctgtcctgggagaatgccccgaagtactgtttacagctcacgattcctgggggaactgtcttactgcaggctgccaatagctacctgcgagaccagtggttccattctctgcaatggaagaaaaagatttacaaatataagaaagtgctgagtaacccaagccgctgggaagttgtcttgaaagagatccggaccctggtggacatggccctgacatcccccctgcaggatgactccatcaaccaggccccactggaaatcgtctcgaaactgctctcagagaacacaaacttgaccacccaggagcatgaaaacatcattgtggcaatcgctcctttgctggaaaacaaccacccaccaccagatctctgtgaattcttttgcaagcactgcagagagcggccccggtccatggtggtcatcgaggtgttcacccccgtggtgcagcgaatcctcaagcataacatggactttgggaagtgcccgcgactgaggctgtttactcaggagtacatccttgccttgaacgagctcaacgcggggatggaagtggtgaagaagttcattcagagcatgcacggccccacagggcactgcccccacccccgggtcctgcccaacctggtggccgtgtgcctggctgccatctactcctgctatgaagagttcatcaacagccgcgacaattccccaagcctgaaggaaatccggaacggctgccagcagccgtgcgaccggaagcccactttacctctgcgccttctgcaccccagcccggacctggtgtctcaggaagccacgctgtctgaggcccggctcaagtcggtggtcgtggcctccagtgagatccacgtggaggtggaacgcaccagcactgccaagccggcgctgacggccagcgcaggcaacgacagcgagcccaacctcatcgactgcctcatggtcagccccgcctgcagcaccatgagcatcgagctgggcccccaggccgaccgcacgctcggctgctacgtggaaatcctcaagctgctgtcagactatgatgactggagaccgtctctggccagtttgcttcaacccattccattccccaaagaagctctcgcacatgagaagttcaccaaggaactgaagtacgtgattcagaggttcgccgaagaccccaggcaagaggtccactcatgcctgctgagcgtgcgggccggcaaagatggctggttccagctctacagccccggaggggtggcctgcgacgatgacggggagctgttcgccagcatggtgcacatcctcatgggctcctgttacaagaccaaaaaattcctgctctccctggcagaaaacaagctgggtccctgcatgctcctggcactgagggggaaccagaccatggtggagatcctgtgcttgatgctggaatacaacatcatcgacaacaacgacacccaactgcagatcatctcaaccctggagagcacagacgtggggaagcgcatgtacgagcagctgtgtgaccggcagcgggagctgaaggagctgcaaaggaaaggcgggcccaccaggctaacactgccctccaagtccacagacgctgacttggctcgtttgctgagctccggctccttcggaaacctggagaacctcagtttggccttcaccaatgtaaccagtgcctgcgccgagcacctcatcaaactgccttcgctcaagcagctgaacctgtggtccactcagtttggagacgctggccttcggctcctgtcggaacacctcaccatgctccaggtgctgaacctgtgcgagaccccggtcacagacgctggcctgctggccctgagctccatgaagagtctctgcagtttaaacatgaacagcaccaagctctcagctgacacctacgaagatctgaaggccaagcttcccaatttgaaggaagtggacgtccgctacaccgaagcctggtgaagctcccagctcaaggcaggaagacgtttgcaaccgcgacaaaataactcttgactaacagccgcagagcagccggtcctggggtcccaccctggtgccctggctgtgagatagatggggagtctttctgggggcggaggggggagggggtggggagggggcccacaagcacgcccagcccccgccgaattcttttagcttcgtaattggaacctttgacctgatctaaagtggactttgtagcaacaagaggagcatcagcgggtcggggaggggtttgggggtgggctggggggtgggggaccctttgtggattttctttgcctttgtgtttgatgccgtcgtgtgggaaaagtcaactccgatgccaccattgcgggccggacgaaggatgctttcttcctagaggctccgagctgagctgcgaactcgccccccgcccttgggacaagaagacccagtcacatcactgcacccgtcctgtgtcctcaccattgctatgcaaagtgattcttgttgtacataagatttaaataatgcacctatttaagacatgttgacaaattgcgggtctgggacccgcctcttatttatgaagtctttgaccgtcccccccgcccgaccccaccgccctcccgcccccacctggcgtgtagtactgtataaaccagtcagctgtcgggttagtggtagtattattgttatttttttaaaggaaacaaacagacaacaaaaagaagaaaaaaaaaaagaacctccttggaaaaattaattgctttttcgtaatggattctctatgctaatgctctctcgtctgtctgtctgtctgcccactcccccacccaccactgtgcgtttctgatttccaaatgtctccaactccctcacgaggtggggctcaggctggaggaggagggattaagatccccttgctccactaaggcccaagctctttctctcggcaccttttagacttgaatgggaggctgctaacccgccctctccagtccaccccggtaaaagagctgttccccacccccagggagctcctgtccctgtcagcctttgctgtcccctgtccccaacggagactctgtcacccctgggctccccctgccatcgtgtgcttcacgtggccccatgcatgcccgcctctctgcatggtctcttgggaaaagagagatgtgtcgcctccgccagtccgactgccctccccaccccacccccgccaccccccacatgtgaccactgcaacgaagacactccttctgtccccacctgctccgaagacaaaccaacctccgtttcttttataaacagtcggctttttcttaataagccctcactgtacagaacagcccgttgatggtttatttggggtccccctctccccccagcccttttttctgttggtttagcacaaatacttccctcctccggcacctccaaacctaccccacagtcagtgtacttgttttatatatatttaatcttattcaatggaaaccatgcttttgtcgttttatactttgctaggtagactttattacccccccactatgccctcatttttttaaaaaaggaaaaaaaaaagaaactgggttccagtcttaattcattttccgtgccaggttttatttcgtgtgtgtgtgagtgtgttctgttttgtgttttgttttttgttgttgtttttagttgtttggttttcttttctttcccccctccggtcccatacttcacagcactctggtgcgggaagaagcagaagcaaaaaaaataaaaataaaaaaataaataaaaataaaaaaaataaaaaaggaaaaaaaaaaaagaagaaacaagacatgccacctttcccctcgcactgttgcttttcctgatggttaatactactgtcacgtagctgtgtacaaagagatgtgaaatactttcaggcaaaaataaactgtaagtgactcatcaa

SEQ ID NO: 10536 - protein, 739 aa, Homo sapiens; identical to SEQ ID NO: 1699

SEQ ID NO: 10537 - DNA, 4131 bp, Homo sapiens
ggcttcttggatgggctgggcgtgcatggcataaccgtttgagaacaacaaaccaagccggccgggctgccgctctgtttcctgcgaggagggaagttacagatctccgccctggcgtccggggaaggatgggacaggctgctgagccaactgggtacatggaaaactcagtctcctacagcgcaattgaagacgttcagctgctgtcctgggagaatgccccgaagtactgtttacagctcacgattcctgggggaactgtcttactgcaggctgccaatagctacctgcgagaccagtggttccattctctgcaatggaagaaaaagatttacaaatataagaaagtgctgagtaacccaagccgctgggaagttgtcttgaaagagatccggaccctggtggacatggccctgacatcccccctgcaggatgactccatcaaccaggccccactggaaatcgtctcgaaactgctctcagagaacacaaacttgaccacccaggagcatgaaaacatcattgtggcaatcgctcctttgctggaaaacaaccacccaccaccagatctctgtgaattcttttgcaagcactgcagagagcggccccggtccatggtggtcatcgaggtgttcacccccgtggtgcagcgaatcctcaagcataacatggactttgggaagtgcccgcgactgaggctgtttactcaggagtacatccttgccttgaacgagctcaacgcggggatggaagtggtgaagaagttcattcagagcatgcacggccccacagggcactgcccccacccccgggtcctgcccaacctggtggccgtgtgcctggctgccatctactcctgctatgaagagttcatcaacagccgcgacaattccccaagcctgaaggaaatccggaacggctgccagcagccgtgcgaccggaagcccactttacctctgcgccttctgcaccccagcccggacctggtgtctcaggaagccacgctgtctgaggcccggctcaagtcggtggtcgtggcctccagtgagatccacgtggaggtggaacgcaccagcactgccaagccggcgctgacggccagcgcaggcaacgacagcgagcccaacctcatcgactgcctcatggtcagccccgcctgcagcaccatgagcatcgagctgggcccccaggccgaccgcacgctcggctgctacgtggaaatcctcaagctgctgtcagactatgatgactggagaccgtctctggccagtttgcttcaacccattccattccccaaagaagctctcgcacatgagaagttcaccaaggaactgaagtacgtgattcagaggttcgccgaagaccccaggcaagaggtccactcatgcctgctgagcgtgcgggccggcaaagatggctggttccagctctacagccccggaggggtggcctgcgacgatgacggggagctgttcgccagcatggtgcacatcctcatgggctcctgttacaagaccaaaaaattcctgctctccctggcagaaaacaagctgggtccctgcatgctcctggcactgagggggaaccagaccatggtggagatcctgtgcttgatgctggaatacaacatcatcgacaacaacgacacccaactgcagatcatctcaaccctggagagcacagacgtggggaagcgcatgtacgagcagctgtgtgaccggcagcgggagctgaaggagctgcaaaggaaaggcgggcccaccaggctaacactgccctccaagtccacagacgctgacttggctcgtttgctgagctccggctccttcggaaacctggagaacctcagtttggccttcaccaatgtaaccagtgcctgcgccgagcacctcatcaaactgccttcgctcaagcagctgaacctgtggtccactcagtttggagacgctggccttcggctcctgtcggaacacctcaccatgctccaggtgctgaacctgtgcgagaccccggtcacagacgctggcctgctggccctgagctccatgaagagtctctgcagtttaaacatgaacagcaccaagctctcagctgacacctacgaagatctgaaggccaagcttcccaatttgaaggaagtggacgtccgctacaccgaagcctggtgaagctcccagctcaaggcaggaagacgtttgcaaccgcgacaaaataactcttgactaacagccgcagagcagccggtcctggggtcccaccctggtgccctggctgtgagatagatggggagtctttctgggggcggaggggggagggggtggggagggggcccacaagcacgcccagcccccgccgaattcttttagcttcgtaattggaacctttgacctgatctaaagtggactttgtagcaacaagaggagcatcagcgggtcggggaggggtttgggggtgggctggggggtgggggaccctttgtggattttctttgcctttgtgtttgatgccgtcgtgtgggaaaagtcaactccgatgccaccattgcgggccggacgaaggatgctttcttcctagaggctccgagctgagctgcgaactcgccccccgcccttgggacaagaagacccagtcacatcactgcacccgtcctgtgtcctcaccattgctatgcaaagtgattcttgttgtacataagatttaaataatgcacctatttaagacatgttgacaaattgcgggtctgggacccgcctcttatttatgaagtctttgaccgtcccccccgcccgaccccaccgccctcccgcccccacctggcgtgtagtactgtataaaccagtcagctgtcgggttagtggtagtattattgttatttttttaaaggaaacaaacagacaacaaaaagaagaaaaaaaaaaagaacctccttggaaaaattaattgctttttcgtaatggattctctatgctaatgctctctcgtctgtctgtctgtctgcccactcccccacccaccactgtgcgtttctgatttccaaatgtctccaactccctcacgaggtggggctcaggctggaggaggagggattaagatccccttgctccactaaggcccaagctctttctctcggcaccttttagacttgaatgggaggctgctaacccgccctctccagtccaccccggtaaaagagctgttccccacccccagggagctcctgtccctgtcagcctttgctgtcccctgtccccaacggagactctgtcacccctgggctccccctgccatcgtgtgcttcacgtggccccatgcatgcccgcctctctgcatggtctcttgggaaaagagagatgtgtcgcctccgccagtccgactgccctccccaccccacccccgccaccccccacatgtgaccactgcaacgaagacactccttctgtccccacctgctccgaagacaaaccaacctccgtttcttttataaacagtcggctttttcttaataagccctcactgtacagaacagcccgttgatggtttatttggggtccccctctccccccagcccttttttctgttggtttagcacaaatacttccctcctccggcacctccaaacctaccccacagtcagtgtacttgttttatatatatttaatcttattcaatggaaaccatgcttttgtcgttttatactttgctaggtagactttattacccccccactatgccctcatttttttaaaaaaggaaaaaaaaaagaaactgggttccagtcttaattcattttccgtgccaggttttatttcgtgtgtgtgtgagtgtgttctgttttgtgttttgttttttgttgttgtttttagttgtttggttttcttttctttcccccctccggtcccatacttcacagcactctggtgcgggaagaagcagaagcaaaaaaaataaaaataaaaaaataaataaaaataaaaaaaataaaaaaggaaaaaaaaaaaagaagaaacaagacatgccacctttcccctcgcactgttgcttttcctgatggttaatactactgtcacgtagctgtgtacaaagagatgtgaaatactttcaggcaaaaataaactgtaagtgactcatcaa

SEQ ID NO: 10538 - protein, 679 aa, Homo sapiens; identical to SEQ ID NO: 1697

SEQ ID NO: 10539 - DNA, 921 bp, Homo sapiens
gtgacccaggcacatggtgcaaacctaggacctccacctcccagctctgtagccaggggcagctcactccaccctggtccctggagtgtgcttacaggcttccgtgttggggggctgcgaggcctgggcagcaaaccgccttgtactgcctctggcctgtggatagtagatgctcaataaacctctccttcctgtcagaaactcagtctccctatgtggatgacagcattttcctaaaggatctaaagttccatccaccttaaactctgcctgaagggaagactatgaaactagaaaagaaaatggtgtggatttgtgtgctactgcagacactgctgcgacatatattaaggagcatggaacggaaccgcgtggatgataaagtctgcgtggtgtttacaaaggaatattcataagcactttctgagaagccccgtgcagctgctaacagtgactgcctaggggaaaatggacttgaaggagtagaggccaacttttcattttatacctttctatactttttaggactaccacctatgtacgtgcattttatttttgttaaatgttcgcaggggatatctggcaggacaaggaactggctggaaaggggcgcgaggagatcttctgggtgacggagatccaggtggtggttactcagatgtattttatccttcaatgagaagtttatttcgaaaacgtcctgtgtctcttccaaagatagctccagctgggcaaagtggcagctctgtgggctccaacggaagaggccaaaaggcccatcctcctcctgtcccctgggttcaattcacagccctgcctgtctctagctgtgtgatcctggacgtgcctctctgcttcctcagctcctgcttcaagacaggcctaaccaaattttgagaagtccccagcagagctcccgac

SEQ ID NO: 10540 - protein, 38 aa, Homo sapiens [sequence omitted]

SEQ ID NO: 10541 - DNA, 4049 bp, Homo sapiens
gtgtacgcgcgcgagccccagaggctgcggcagcagcagagcagcagagcagcagcccctgcctggcgcgacgtgcttccagtgcattctgagtcactcctctcctggcaaggggcacattcctgctgacgacttgtctcccgtggaggagcaacaggctctgctttccctggcctgagaaccctggcatatgtgcttgcctctgctgacagttgccagagcgatggcaagtgttgcccagaaaaagatttacaaatataagaaagtgctgagtaacccaagccgctgggaagttgtcttgaaagagatccggaccctggtggacatggccctgacatcccccctgcaggatgactccatcaaccaggccccactggaaatcgtctcgaaactgctctcagagaacacaaacttgaccacccaggagcatgaaaacatcattgtggcaatcgctcctttgctggaaaacaaccacccaccaccagatctctgtgaattcttttgcaagcactgcagagagcggccccggtccatggtggtcatcgaggtgttcacccccgtggtgcagcgaatcctcaagcataacatggactttgggaagtgcccgcgactgaggctgtttactcaggagtacatccttgccttgaacgagctcaacgcggggatggaagtggtgaagaagttcattcagagcatgcacggccccacagggcactgcccccacccccgggtcctgcccaacctggtggccgtgtgcctggctgccatctactcctgctatgaagagttcatcaacagccgcgacaattccccaagcctgaaggaaatccggaacggctgccagcagccgtgcgaccggaagcccactttacctctgcgccttctgcaccccagcccggacctggtgtctcaggaagccacgctgtctgaggcccggctcaagtcggtggtcgtggcctccagtgagatccacgtggaggtggaacgcaccagcactgccaagccggcgctgacggccagcgcaggcaacgacagcgagcccaacctcatcgactgcctcatggtcagccccgcctgcagcaccatgagcatcgagctgggcccccaggccgaccgcacgctcggctgctacgtggaaatcctcaagctgctgtcagactatgatgactggagaccgtctctggccagtttgcttcaacccattccattccccaaagaagctctcgcacatgagaagttcaccaaggaactgaagtacgtgattcagaggttcgccgaagaccccaggcaagaggtccactcatgcctgctgagcgtgcgggccggcaaagatggctggttccagctctacagccccggaggggtggcctgcgacgatgacggggagctgttcgccagcatggtgcacatcctcatgggctcctgttacaagaccaaaaaattcctgctctccctggcagaaaacaagctgggtccctgcatgctcctggcactgagggggaaccagaccatggtggagatcctgtgcttgatgctggaatacaacatcatcgacaacaacgacacccaactgcagatcatctcaaccctggagagcacagacgtggggaagcgcatgtacgagcagctgtgtgaccggcagcgggagctgaaggagctgcaaaggaaaggcgggcccaccaggctaacactgccctccaagtccacagacgctgacttggctcgtttgctgagctccggctccttcggaaacctggagaacctcagtttggccttcaccaatgtaaccagtgcctgcgccgagcacctcatcaaactgccttcgctcaagcagctgaacctgtggtccactcagtttggagacgctggccttcggctcctgtcggaacacctcaccatgctccaggtgctgaacctgtgcgagaccccggtcacagacgctggcctgctggccctgagctccatgaagagtctctgcagtttaaacatgaacagcaccaagctctcagctgacacctacgaagatctgaaggccaagcttcccaatttgaaggaagtggacgtccgctacaccgaagcctggtgaagctcccagctcaaggcaggaagacgtttgcaaccgcgacaaaataactcttgactaacagccgcagagcagccggtcctggggtcccaccctggtgccctggctgtgagatagatggggagtctttctgggggcggaggggggagggggtggggagggggcccacaagcacgcccagcccccgccgaattcttttagcttcgtaattggaacctttgacctgatctaaagtggactttgtagcaacaagaggagcatcagcgggtcggggaggggtttgggggtgggctggggggtgggggaccctttgtggattttctttgcctttgtgtttgatgccgtcgtgtgggaaaagtcaactccgatgccaccattgcgggccggacgaaggatgctttcttcctagaggctccgagctgagctgcgaactcgccccccgcccttgggacaagaagacccagtcacatcactgcacccgtcctgtgtcctcaccattgctatgcaaagtgattcttgttgtacataagatttaaataatgcacctatttaagacatgttgacaaattgcgggtctgggacccgcctcttatttatgaagtctttgaccgtcccccccgcccgaccccaccgccctcccgcccccacctggcgtgtagtactgtataaaccagtcagctgtcgggttagtggtagtattattgttatttttttaaaggaaacaaacagacaacaaaaagaagaaaaaaaaaaagaacctccttggaaaaattaattgctttttcgtaatggattctctatgctaatgctctctcgtctgtctgtctgtctgcccactcccccacccaccactgtgcgtttctgatttccaaatgtctccaactccctcacgaggtggggctcaggctggaggaggagggattaagatccccttgctccactaaggcccaagctctttctctcggcaccttttagacttgaatgggaggctgctaacccgccctctccagtccaccccggtaaaagagctgttccccacccccagggagctcctgtccctgtcagcctttgctgtcccctgtccccaacggagactctgtcacccctgggctccccctgccatcgtgtgcttcacgtggccccatgcatgcccgcctctctgcatggtctcttgggaaaagagagatgtgtcgcctccgccagtccgactgccctccccaccccacccccgccaccccccacatgtgaccactgcaacgaagacactccttctgtccccacctgctccgaagacaaaccaacctccgtttcttttataaacagtcggctttttcttaataagccctcactgtacagaacagcccgttgatggtttatttggggtccccctctccccccagcccttttttctgttggtttagcacaaatacttccctcctccggcacctccaaacctaccccacagtcagtgtacttgttttatatatatttaatcttattcaatggaaaccatgcttttgtcgttttatactttgctaggtagactttattacccccccactatgccctcatttttttaaaaaaggaaaaaaaaaagaaactgggttccagtcttaattcattttccgtgccaggttttatttcgtgtgtgtgtgagtgtgttctgttttgtgttttgttttttgttgttgtttttagttgtttggttttcttttctttcccccctccggtcccatacttcacagcactctggtgcgggaagaagcagaagcaaaaaaaataaaaataaaaaaataaataaaaataaaaaaaataaaaaaggaaaaaaaaaaaagaagaaacaagacatgccacctttcccctcgcactgttgcttttcctgatggttaatactactgtcacgtagctgtgtacaaagagatgtgaaatactttcaggcaaaaataaactgtaagtgactcatcaa

SEQ ID NO: 10542 - protein, 631 aa, Homo sapiens
MCLPLLTVARAMASVAQKKIYKYKKVLSNPSRWEVVLKEIRTLVDMALTSPLQDDSINQAPLEIVSKLLSENTNLTTQEHENIIVAIAPLLENNHPPPDLCEFFCKHCRERPRSMVVIEVFTPVVQRILKHNMDFGKCPRLRLFTQEYILALNELNAGMEVVKKFIQSMHGPTGHCPHPRVLPNLVAVCLAAIYSCYEEFINSRDNSPSLKEIRNGCQQPCDRKPTLPLRLLHPSPDLVSQEATLSEARLKSVVVASSEIHVEVERTSTAKPALTASAGNDSEPNLIDCLMVSPACSTMSIELGPQADRTLGCYVEILKLLSDYDDWRPSLASLLQPIPFPKEALAHEKFTKELKYVIQRFAEDPRQEVHSCLLSVRAGKDGWFQLYSPGGVACDDDGELFASMVHILMGSCYKTKKFLLSLAENKLGPCMLLALRGNQTMVEILCLMLEYNIIDNNDTQLQIISTLESTDVGKRMYEQLCDRQRELKELQRKGGPTRLTLPSKSTDADLARLLSSGSFGNLENLSLAFTNVTSACAEHLIKLPSLKQLNLWSTQFGDAGLRLLSEHLTMLQVLNLCETPVTDAGLLALSSMKSLCSLNMNSTKLSADTYEDLKAKLPNLKEVDVRYTEAW

SEQ ID NO: 10543 - DNA, 2665 bp, Homo sapiens
agcgcggcagcaagcgtgggaacgcgggcggcgagacggcggcaggacggcggcaggatgtgtgaccggaatggtggtcggcggcttcgacagtggctgatcgagcagattgacagtagcatgtatccaggactgatttgggagaatgaggagaagagcatgttccggatcccttggaaacacgctggcaagcaagattataatcaggaagtggatgcctccatttttaaggcctgggcagtttttaaagggaagtttaaagaaggggacaaagctgaaccagccacttggaagacgaggttacgctgtgctttgaataagagcccagattttgaggaagtgacggaccggtcccaactggacatttccgagccatacaaagtttaccgaattgttcctgaggaagagcaaaaatgcaaactaggcgtggcaactgctggctgcgtgaatgaagttacagagatggagtgcggtcgctctgaaatcgacgagctgatcaaggagccttctgtggacgattacatggggatgatcaaaaggagcccttccccgccggaggcctgtcggagtcagctccttccagactggtgggcgcagcagcccagcacaggcgtgccgctggtgacggggtacaccacctacgacgcgcaccattcagcattctcccagatggtgatcagcttctactatgggggcaagctggtgggccaggccaccaccacctgccccgagggctgccgcctgtccctgagccagcctgggctgcccggcaccaagctgtatgggcccgagggcctggagctggtgcgcttcccgccggccgacgccatccccagcgagcgacagaggcaggtgacgcggaagctgttcgggcacctggagcgcggggtgctgctgcacagcagccggcagggcgtgttcgtcaagcggctgtgccagggccgcgtgttctgcagcggcaacgccgtggtgtgcaaaggcaggcccaacaagctggagcgtgatgaggtggtccaggtcttcgacaccagccagttcttccgagagctgcagcagttctataacagccagggccggcttcctgacggcagggtggtgctgtgctttggggaagagtttccggatatggcccccttgcgctccaaactcattctcgtgcagattgagcagctgtatgtccggcaactggcagaagaggctgggaagagctgtggagccggctctgtgatgcaggcccccgaggagccgccgccagaccaggtcttccggatgtttccagatatttgtgcctcacaccagagatcatttttcagagaaaaccaacagatcaccgtctaagtgcgtcgcttgggcgccccaccccgtctgcgtcctgcatccatctccctgttacagtggcccgcatcatgattaaagaatgtggatccctctgtctggggtgggatgccttactttgcacttaatttaataagggcattctcggaggagtagacgtttaatacgaagtggcggcatagccctgccgagatgtcggtgatggcctggatgctgtaaccacaacctgtggctaaaaattttattttctatcctttacccgtcattatcattagttgctatgattctttctgcattttcggttaactatcatttccaaagacttgtcattcagtaatattagcagatagctgcttcgataaaggaatttggagtttaaaaatcaacttgtgaaaacaaggttgtttttgtctttatcgtttgttagagttatagatttatgatttcataggcttgattctatgtgaaatatctttttacttttatgcattttaataagatttaaaaatatttagattaaagccccctttaatgagtacaagaaaaactcttggcttgttagaagaaagtatattctttctagaatttggtgcaggaatatgtgttcatatccaggcaaacgggtgtgtttttatcttcagacaatgaaaccttctcctctggggctttgttgccaggaagattagaactaaatttatttttttcatttctgtcatgaaatcattccagatacctcttttcttctttccaaatggttttcacatgtgtttgaaatatttgtacttcgaattgtcggattttccatgtcctcctttctcctttgtgcccagcctgagtcagcaccaatcccgcattcagaacctcccagtgaaagggcagccttcattttgagaaggtggaaggtgttagggtttgggagacagctcatccaatctcccaagtctcatggtggatttgtgactgtgagagtttccggtttaaaatctgaaaagccagatatgcctgtttccttttcccagcaccatgcctgtggaggggacagtcagacccagaggtcctttacgtgtggatggagttcacaggcgaatagaggagaggaccaggggacgtggcttgtcccttttgtccaacaaagcattatatttttaagaatggcagacctgtttgctgaagtgttcataagataacaataggcttgaatctccaattcaaatgaatgtcaaagcacatatctttaatatgctgaatgaatatttatttttgtatccattaaaacagtatattgatctcttttattctttattaaaataaaatgctcttttttaaagct

SEQ ID NO: 10544 - protein, 426 aa, Homo sapiens; identical to SEQ ID NO: 1702

SEQ ID NO: 10545 - DNA, 990 bp, Homo sapiens
tggaggccagcattgccttctcatggcaggtgtcccggagtccctgaatctgatgtgtgaccggaatggtggtcggcggcttcgacagtggctgatcgagcagattgacagtagcatgtatccaggactgatttgggagaatgaggagaagagcatgttccggatcccttggaaacacgctggcaagcaagattataatcaggaagtggatgcctccatttttaaggcctgggcagtttttaaagggaagtttaaagaaggggacaaagctgaaccagccacttggaagacgaggttacgctgtgctttgaataagagcccagattttgaggaagtgacggaccggtcccaactggacatttccgagccatacaaagtttaccgaattgttcctgaggaagagcaaaaatgcaaactaggcgtggcaactgctggctgcgtgaatgaagttacagagatggagtgcggtcgctctgaaatcgacgagctgatcaaggagccttctgtggacgattacatggggatgatcaaaaggagcccttccccgccggaggcctgtcggagtcagctccttccagactggtgggcgcagcagcccagcacaggcgtgccgctggtgacggggtacaccacctacgacgcgcaccattcagcattctcccagatggtgatcagcttctactatgggggcaagctggtgggccaggccaccaccacctgccccgagggctgccgcctgtccctgagccagcctgggctgcccggcaccaagctgtatgggcccgagggcctggagctggtgcgcttcccgccggccgacgccatccccagcgagcgacagaggcaggtgacgcggaagctgttcgggcacctggagcgcggggtgctgctgcacagcagccggcagggcgtgttcgtcaagcggctgtgccagggccgcgtgttctgcagcggcaacgccgtggtgtgcaaaggcaggcccaacaagct

SEQ ID NO: 10546 - protein, 321 aa, Homo sapiens
MAGVPESLNLMCDRNGGRRLRQWLIEQIDSSMYPGLIWENEEKSMFRIPWKHAGKQDYNQEVDASIFKAWAVFKGKFKEGDKAEPATWKTRLRCALNKSPDFEEVTDRSQLDISEPYKVYRIVPEEEQKCKLGVATAGCVNEVTEMECGRSEIDELIKEPSVDDYMGMIKRSPSPPEACRSQLLPDWWAQQPSTGVPLVTGYTTYDAHHSAFSQMVISFYYGGKLVGQATTTCPEGCRLSLSQPGLPGTKLYGPEGLELVRFPPADAIPSERQRQVTRKLFGHLERGVLLHSSRQGVFVKRLCQGRVFCSGNAVVCKGRPN

SEQ ID NO: 10547 - DNA, 2253 bp, Homo sapiens
tgtgggagtctgggaggtggcagctggccccggaggccttgaaggttgccaggccttgggtgtcgagtaagaggtccctggaaaggcacctctgtctgtgctgcaggaacaccatccggaaagctagcttgcacccccaggctctcccccagagataagccctgggtggtgggtatgcagtccagtggtattctgggggcgtgccgctggtgacggggtacaccacctacgacgcgcaccattcagcattctcccagatggtgatcagcttctactatgggggcaagctggtgggccaggccaccaccacctgccccgagggctgccgcctgtccctgagccagcctgggctgcccggcaccaagctgtatgggcccgagggcctggagctggtgcgcttcccgccggccgacgccatccccagcgagcgacagaggcaggtgacgcggaagctgttcgggcacctggagcgcggggtgctgctgcacagcagccggcagggcgtgttcgtcaagcggctgtgccagggccgcgtgttctgcagcggcaacgccgtggtgtgcaaaggcaggcccaacaagctggagcgtgatgaggtggtccaggtcttcgacaccagccagttcttccgagagctgcagcagttctataacagccagggccggcttcctgacggcagggtggtgctgtgctttggggaagagtttccggatatggcccccttgcgctccaaactcattctcgtgcagattgagcagctgtatgtccggcaactggcagaagaggctgggaagagctgtggagccggctctgtgatgcaggcccccgaggagccgccgccagaccaggtcttccggatgtttccagatatttgtgcctcacaccagagatcatttttcagagaaaaccaacagatcaccgtctaagtgcgtcgcttgggcgccccaccccgtctgcgtcctgcatccatctccctgttacagtggcccgcatcatgattaaagaatgtggatccctctgtctggggtgggatgccttactttgcacttaatttaataagggcattctcggaggagtagacgtttaatacgaagtggcggcatagccctgccgagatgtcggtgatggcctggatgctgtaaccacaacctgtggctaaaaattttattttctatcctttacccgtcattatcattagttgctatgattctttctgcattttcggttaactatcatttccaaagacttgtcattcagtaatattagcagatagctgcttcgataaaggaatttggagtttaaaaatcaacttgtgaaaacaaggttgtttttgtctttatcgtttgttagagttatagatttatgatttcataggcttgattctatgtgaaatatctttttacttttatgcattttaataagatttaaaaatatttagattaaagccccctttaatgagtacaagaaaaactcttggcttgttagaagaaagtatattctttctagaatttggtgcaggaatatgtgttcatatccaggcaaacgggtgtgtttttatcttcagacaatgaaaccttctcctctggggctttgttgccaggaagattagaactaaatttatttttttcatttctgtcatgaaatcattccagatacctcttttcttctttccaaatggttttcacatgtgtttgaaatatttgtacttcgaattgtcggattttccatgtcctcctttctcctttgtgcccagcctgagtcagcaccaatcccgcattcagaacctcccagtgaaagggcagccttcattttgagaaggtggaaggtgttagggtttgggagacagctcatccaatctcccaagtctcatggtggatttgtgactgtgagagtttccggtttaaaatctgaaaagccagatatgcctgtttccttttcccagcaccatgcctgtggaggggacagtcagacccagaggtcctttacgtgtggatggagttcacaggcgaatagaggagaggaccaggggacgtggcttgtcccttttgtccaacaaagcattatatttttaagaatggcagacctgtttgctgaagtgttcataagataacaataggcttgaatctccaattcaaatgaatgtcaaagcacatatctttaatatgctgaatgaatatttatttttgtatccattaaaacagtatattgatctcttttattctttattaaaataaaatgctcttttttaaagct

SEQ ID NO: 10548 - protein, 222 aa, Homo sapiens
MVISFYYGGKLVGQATTTCPEGCRLSLSQPGLPGTKLYGPEGLELVRFPPADAIPSERQRQVTRKLFGHLERGVLLHSSRQGVFVKRLCQGRVFCSGNAVVCKGRPNKLERDEVVQVFDTSQFFRELQQFYNSQGRLPDGRVVLCFGEEFPDMAPLRSKLILVQIEQLYVRQLAEEAGKSCGAGSVMQAPEEPPPDQVFRMFPDICASHQRSFFRENQQITV

SEQ ID NO: 10549 - DNA, 2215 bp, Homo sapiens
tggggaaaagcactgaattcagcggaagcctgtgctccctggagcctctggcacgccatgtgcagccttttaagggacttttggagaaggagcgattggggttactccctgtacaccacacctgggtggctctgagcttgcttttctgtttctcctgcaggcgtgccgctggtgacggggtacaccacctacgacgcgcaccattcagcattctcccagatggtgatcagcttctactatgggggcaagctggtgggccaggccaccaccacctgccccgagggctgccgcctgtccctgagccagcctgggctgcccggcaccaagctgtatgggcccgagggcctggagctggtgcgcttcccgccggccgacgccatccccagcgagcgacagaggcaggtgacgcggaagctgttcgggcacctggagcgcggggtgctgctgcacagcagccggcagggcgtgttcgtcaagcggctgtgccagggccgcgtgttctgcagcggcaacgccgtggtgtgcaaaggcaggcccaacaagctggagcgtgatgaggtggtccaggtcttcgacaccagccagttcttccgagagctgcagcagttctataacagccagggccggcttcctgacggcagggtggtgctgtgctttggggaagagtttccggatatggcccccttgcgctccaaactcattctcgtgcagattgagcagctgtatgtccggcaactggcagaagaggctgggaagagctgtggagccggctctgtgatgcaggcccccgaggagccgccgccagaccaggtcttccggatgtttccagatatttgtgcctcacaccagagatcatttttcagagaaaaccaacagatcaccgtctaagtgcgtcgcttgggcgccccaccccgtctgcgtcctgcatccatctccctgttacagtggcccgcatcatgattaaagaatgtggatccctctgtctggggtgggatgccttactttgcacttaatttaataagggcattctcggaggagtagacgtttaatacgaagtggcggcatagccctgccgagatgtcggtgatggcctggatgctgtaaccacaacctgtggctaaaaattttattttctatcctttacccgtcattatcattagttgctatgattctttctgcattttcggttaactatcatttccaaagacttgtcattcagtaatattagcagatagctgcttcgataaaggaatttggagtttaaaaatcaacttgtgaaaacaaggttgtttttgtctttatcgtttgttagagttatagatttatgatttcataggcttgattctatgtgaaatatctttttacttttatgcattttaataagatttaaaaatatttagattaaagccccctttaatgagtacaagaaaaactcttggcttgttagaagaaagtatattctttctagaatttggtgcaggaatatgtgttcatatccaggcaaacgggtgtgtttttatcttcagacaatgaaaccttctcctctggggctttgttgccaggaagattagaactaaatttatttttttcatttctgtcatgaaatcattccagatacctcttttcttctttccaaatggttttcacatgtgtttgaaatatttgtacttcgaattgtcggattttccatgtcctcctttctcctttgtgcccagcctgagtcagcaccaatcccgcattcagaacctcccagtgaaagggcagccttcattttgagaaggtggaaggtgttagggtttgggagacagctcatccaatctcccaagtctcatggtggatttgtgactgtgagagtttccggtttaaaatctgaaaagccagatatgcctgtttccttttcccagcaccatgcctgtggaggggacagtcagacccagaggtcctttacgtgtggatggagttcacaggcgaatagaggagaggaccaggggacgtggcttgtcccttttgtccaacaaagcattatatttttaagaatggcagacctgtttgctgaagtgttcataagataacaataggcttgaatctccaattcaaatgaatgtcaaagcacatatctttaatatgctgaatgaatatttatttttgtatccattaaaacagtatattgatctcttttattctttattaaaataaaatgctcttttttaaagct

SEQ ID NO: 10550 - protein, 222 aa, Homo sapiens; identical to SEQ ID NO: 10548

SEQ ID NO: 10551 - DNA, 688 bp, Homo sapiens
ggtgcagagctattttcagccttggggttttcaccccagggtccccaaagtgcttggggcagagtacagctcccctttgagaaagtcggtgctctggactgatgaaaaggacaaaagagaagccagttttgagaagtcaaagtgtgggcagaacggttcctttctggaggctttaggggagaatctgtttcctcgcttctccagcctttagaggccacctgcagtccctggctcacggccatcttcaaagccagcggtcgcatcgccctgacctccgcctccatcaaccatctccttgctgaccctgaccctcctgcctccctctcacaacgactcctgcgatgacgtggggctgtgaaaggaaaaatctcttgggtcccttcaagctgggaactgctcagggcaaaactccctcccattctattcaaactcatccctctgctcactgagatagatgcatattctgattgcctcgcttaccagaaactcaaaagaatgcaaccggttgtctctaaactcaaaagaatgcaaccagttgtctcacctacctgtgacctggaaacccctttcctgcttggagctgtccccgtctttctggatggaaccagtgtacttcttacatgtattgattgatgtctcatgtctccctaaaatgtataaaaccaggctgtgccccgaccaccttggg

SEQ ID NO: 10552 - protein, 77 aa, Homo sapiens
MHILIASLTRNSKECNRLSLNSKECNQLSHLPVTWKPLSCLELSPSFWMEPVYFLHVLIDVSCLPKMYKTRLCPDHL

SEQ ID NO: 10553 - DNA, 3345 bp, Homo sapiens
gctcacttcacgtgctcggcggcgtgcgaggagcagtaatacttcttgtgggcgatgaaggtggacaggctgctgaacttgatgttgcaaagacggcagtaccggtggttgccgttgggcagcggcgccggcgtgcccttgctgggagtctggacgcccttgtccgagtaggaggggggcgccggcgggggcggcacggcctcgggcgcggcggccggggacgggggcgggccgggcggcggctcctggggctccgggccgaggccgtcccgggggccacgggacccgggctgcggggaggcggcgggggcgggagcgggcgaggggccgcggtcggccggcgtccgggcctcgacccccgggccggccaggggcgcgccgagcagcaggccgtgcgccaggcggaaatgctccagcaggtccccgcgcaccgggccgttcggggggcagtaggggcaggcggcggcgggcaggccgagcgcgccgggcggtggcgcagcggggcacgagtacttcttgtgcgccaggtaggcctcgaggctgtggaagctcacgcggcaggccgtgcactcgtggtagtcggccagcgccggtgccggggctccggggagcgggcgccgcggcttcttgctcaggtcgatggggccgtcggccgcggggccgggcgagcgcgcaggggcgaggccggggccgcttccgcttccgcttccgggccgcggcgactcgggcgcgggggcgtggccgggcggcggggggggcggggcgccggccgcgtgcagctcgtagagcttgcggcgtctgcgcgtgcgcacaggcgcggcgggagagggggccgggggcgcggccggcccagggggtcccgggggcgcggccggtcggcgcggcggcgggtcgtggcgcgaggcgcagtagtaccgcttgtgcacggtgtaggtctcgtggcggctgaagcggatgttgcaggcctcgcacagcgtgcggctggggtcgtcctccgcgtcgtccacggagctacccgggctctggctgccctcgctgccccggccgcccgcgccgtcctcgggcgtggccgcgcccccagccccctcctcgcgcgctccggggcccggggacgagcgcggcgcgtcgggttcggcgggctggccggggggcgcgcgggccgggccggggggcgccttgggcctgcgcgcggcaggcgcgtcctcgggcgcacggcggcctgaacagtagaggcgcttgtgcacgtagtagttgttgacgttgctgaaggtgatctcgcactcgaagcacgtagcgcccttgggggccccggggaagagcccggtctgcgcgccgccggcgcccgcgcccgcgccctgctgcagccggctgtgcaccagctcggacatcttggccaggatctccgaggcggggggcgccgcgtcgggcccgaacacgtactgcggaaggaacagggccccggccaggcccagctcgccgggcaccgggctggagcccggcgtggggctggacagctcggccttgaccctggccggggcggggctgcgcggcgacggcgtccgcgacggggcctggggcccaggctctccggggcccaggatgggggccgcctccggctcctccaccgcctccaccttgatgctcctgggggccgccgggggctcgctgctgcctccattctgggccagaggctccgctctggcctctccgttggtggcctcggccagggcctttctgtccagtcctggcgatggggtgggcgccaggcccaggtccgcggaggccagggggccttgcagggccgtgtgctgctgctggaagctgcccagactgtctgggggcagcttggttgctgggtgtccggcccctggcgagtagatctcacccttggagccaggctggcagaccatgtggttggtgaccaagtggctgtagaggatgtcccttgtggtggagatgaagccacagctgtggcagacaccgctcagcgtgtccgtgtgcaccttgaggtgccgctcgcagttggccttggtggtgaaggccgacaggcagatcaggcacacgaagggccgctctccgctgtggctgcgcatgtggatctccagggagctggcgctggggcagctcttgcggcactgggggaaggggcagacgcgctcgttggggtaggtctctttgggcttctcgtctgtggcggctgcggccggggagccggtgccctggcggctggcgcagtagtagagcaggtgcgcctgcaggttgcgctcgctgcggtaccagatgccacagtccttgcaggggaagacgtctttgttgatcactgcggtggcaaggatggaggccatcccggcctgctggggcaggagctggaggtcgtgtgcaggggccgggcacgtgggctctgctggctccttcttcacagggtggccgggggtgctgtggggctcggccgtgaggagcacgctcaggagtccccccgcaggcaccggcttggtgaccctgcaccagagtgcgtcatccttcctgtggatctctgtgttggcctcggcctcagtcagggcctggggcagcgtcctcagccagcaggcctcgtccaccagcagcagggtcagggctgggctcggctccgcctgcctgggggatgaggctctggtctggacactcccatggaacgggccccaggacaggcccgtggcgaggctgagtcgggcccgtatgcgcctctgcccatcctgcaccaccggctccagctcgtctggcccgctccagggactgcccggctcttcctccgtgggcctgggttctggttcctgtccttccagctccttggggcctcctggggatgtggggggcggcagcggtgggggtgagttaacatctgcgctgggagggctcggggcttcaggtgccgtggccttttgctccatgtggctggcacccaccaactgcacctcctctctggcctccatgtctccgagggaacgcttgatctgccgggggttgctctgtttccgcctggacatgtctccggcgccgcgcgccctcccggcggccgcctctagccccgggcgggcggcggcgggcggcgggggcgcggcggggccgcggggccgctcatgcccccggcccccggtctccgcggccgccccggcccgcgcccccagcccgcgcgcccagccccggagccgctggagctgccgcggaggcccgagaggccacggtcctgcgttgcgggcgcgcggactgcccgacgggcgggtgccggctcctccgctcccgcgcactcgccgccgccgccgcggccgctcggcttttctcaatggaacccgcgggcggcgagcggcg

SEQ ID NO: 10554 - protein, 354 aa, Homo sapiens
MPQSLQGKTSLLITAVARMEAIPACWGRSWRSCAGAGHVGSAGSFFTGWPGVLWGSAVRSTLRSPPAGTGLVTLHQSASSFLWISVLASASVRAWGSVLSQQASSTSSRVRAGLGSACLGDEALVWTLPWNGPQDRPVARLSRARMRLCPSCTTGSSSSGPLQGLPGSSSVGLGSGSCPSSSLGPPGDVGGGSGGGELTSALGGLGASGAVAFCSMWLAPTNCTSSLASMSPRERLICRGLLCFRLDMSPAPRALPAAASSPGRAAAGGGGAAGPRGRSCPRPPVSAAAPARAPSPRAQPRSRWSCRGGPRGHGPALRARGLPDGRVPAPPLPRTRRRRRGRSAFLNGTRGRRA

SEQ ID NO: 10555 - DNA, 582 bp, Homo sapiens
gataagggttaatcaaggatttaattcattaaggagcttgcgagggtctccggggataggcagatgtgggttctatttctccctctgctgtttgatcctgggtatttgggcaattgacttaacatcttggagcctcagttttctcatcggctccgcctgcctgggggatgaggctctggtctggacactcccatggaacgggccccaggacaggcccgtggcgaggctgagtcgggcccgtatgcgcctctgcccatcctgcaccaccggctccagctcgtctggcccgctccagggactgcccggctcttcctccgtgggcctgggttctggttcctgtccttccagctccttggggcctcctggggatgtggggggcggcagcggtgggggtgagttaacatctgcgctgggagggctcggggcttcaggtgccgtggccttttgctccatgtggctggcacccaccaactgcacctcctctctggcctccatgtctccgagggaacgcttgatctgccgggggttgctctgtttccgcctggacatgtctccggcgccgcgcgccctcccggcggccgc

SEQ ID NO: 10556 - protein, 112 aa, Homo sapiens
MRLCPSCTTGSSSSGPLQGLPGSSSVGLGSGSCPSSSLGPPGDVGGGSGGGELTSALGGLGASGAVAFCSMWLAPTNCTSSLASMSPRERLICRGLLCFRLDMSPAPRALPA

SEQ ID NO: 10557 - DNA, 927 bp, Homo sapiens
tgctgcatcagggaagcgacctgccccaggtcacacggcaagtcggtgccagagtccacgctcctgactcggctggggacttgtgcactcattttcctctgtgggtgcccgccccccatgtccagaggtggggaaccgagggggaagccaccctgtccctgttcatcccggcctgtgagcaagccccaggcctgtggaggccagcggggagggtcacagcatcgcatctgcacccctcccccttctccttctacaaagagagaagaaaaactggcagcagctggggcgatccgggcaggaggcaacgtcctcctcagggaggggtcggggagagaactgggacctatcagccaagagcgacaggggcccgctgagacgcaaaaatatttagacaataaatgaagtatcggaaaggcgtgcatatcttgaagaaatcaatcatcttgtacggtgtgtctggacactcggcgccaaggcggagatagcgcctcgcggctccgcctgcctgggggatgaggctctggtctggacactcccatggaacgggccccaggacaggcccgtggcgaggctgagtcgggcccgtatgcgcctctgcccatcctgcaccaccggctccagctcgtctggcccgctccagggactgcccggctcttcctccgtgggcctgggttctggttcctgtccttccagctccttggggcctcctggggatgtggggggcggcagcggtgggggtgagttaacatctgcgctgggagggctcggggcttcaggtgccgtggccttttgctccatgtggctggcacccaccaactgcacctcctctctggcctccatgtctccgagggaacgcttgatctgccgggggttgctctgtttccgcctggacatgtctccggcgccgcgcgccctcccggcggccgc

SEQ ID NO: 10558 - protein, 112 aa, Homo sapiens; identical to SEQ ID NO: 10556

SEQ ID NO: 10559 - DNA, 788 bp, Homo sapiens
tcttgtacggtgtgtctggacactcggcgccaaggcggagatagcgcctcgctggggagataagggttaatcaaggatttaattctgcaggagataaagcagaggagggaagagtggagcgggggctccttcctccccgggctccccacagagccccagcggctcctctggccttggctccccttgtgcccccagacgttatctccccacttgggagcgtttctaaccccgtgcccgtatccccaggatggcctgtgccctaggccagagcaggactaaatgcggaggcaggcggacagggaggggtgactgcagctagggcaaagggcagcccgtggggatgactcctgggccggtgccagcccctcagccctaccattaaggagcttgcgagggtctccggggataggcagatgtgggttctatttctccctctgctgtttgatcctgggtatttgggcaattgacttaacatcttggagcctcagttttctcatcggctccgcctgcctgggggatgaggctctggtctggacactcccatggaacgggccccaggacaggcccgtggcgaggctgagtcgggcccgtatgcgcctctgcccatcctgcaccaccggctccagctcgtctgcgctgggagggctcggggcttcaggtgccgtggccttttgctccatgtggctggcacccaccaactgcacctcctctctggcctccatgtctccgagggaacgcttgatctgccgggggttgctctgtttccgcctggacatgtctccggcgcc

SEQ ID NO: 10560 - protein, 81 aa, Homo sapiens
MERAPGQARGEAESGPYAPLPILHHRLQLVCAGRARGFRCRGLLLHVAGTHQLHLLSGLHVSEGTLDLPGVALFPPGHVSG

SEQ ID NO: 10561 - DNA, 734 bp, Homo sapiens
cggcttctccgatgttgatcctgagtctgcagttatcacgcaggggtggcccctacccccgcgccctcccctctgcggcctgctcgccacctctgcctcttgggaggaatttcagtgcctgggcaggtgcctctgcatcccgcttcacaggcgagatgggcccagagtgccggaggctcaagaatgaaactggatctgaccctggaattggttcctgcggctcttccagagcagcagacaagcgtcggccgtgccctggcagccgcagaagtgctagggcaggactcaggcaggccttgtgcaccagctgttgccaggtgtggggaacacagtgaacagaactgcatctcccgtgagtcctggagtgtggagccgcccagaaatagcagggcagataagatggcagcgaaccaggaccgagaggccgaggaggcccgcgcccctttatcagcccccaggaagggaagagcggactgggggcagcaggagcggttctgccgtctcagcttcagggctgccagcccacccagaatgcctgggtcccagcccagggctctgaccactaggccgccccctcccctgcccctgcagggcttggcaccaagagggtgaccagtgtgagcggggtcccagcatcacagtcacacgggccagctagcaccccgcggccctatgggggaccgggaacacccattcctgtgacggtcatccccctgcacagacaaggacatcga

SEQ ID NO: 10562 - protein, 142 aa, Homo sapiens
MKLDLTLELVPAALPEQQTSVGRALAAAEVLGQDSGRPCAPAVARCGEHSEQNCISRESWSVEPPRNSRADKMAANQDREAEEARAPLSAPRKGRADWGQQERFCRLSFRAASPPRMPGSQPRALTTRPPPPLPLQGLAPRG

SEQ ID NO: 10563 - DNA, 3187 bp, Homo sapiens
atccccggggatgatcgagttcatcaaagtggaaaacttaaggcggtcttcgtcgggctgatacttcctgctttattgaatgttgatattaaatgcttacctccggaattattttttgaggtatcgactttagattaaaagcctaacaattcttacctttcccgtgggctgcctggctccccgcgcggttcaacgcgagcagcgccagtgaggggacctgtcgcgtgtcctgctcagcgcggtgtcccacgggcgcgtccacagcccggggcgtccaggggctgcagcggtgcgagctgctctagagacggagggcccggccggagaccaggggccggcggtttcatcctgcgctgacccttgccaacgacgtggctggtcctggggatcacagggcttcgctcatcccatcttcctccatatccccaaggtggaaacaagggggcgagatgtccacaaactgaggaacagacaaaatgctggctgtccatgcagtggagtgtgagtcagtcatcaagaagagtgaagttcagacccatgccacaacatgggtgaaccttggaaacatactaagtaaagcaagccaatcgcaaaaggacaaaacctgtgcgactccatgctatggaccgagttctgtccccctaacatttgtatgtgaagccttaatccccaatgtgactgtgtttgcagaaagggcctttagagaagtaattaaggttaaatgagattataagggtggggtcctgatctgataggattagtgtccttggaagaggtaccacaggcctggcactgtggctcacacctgtaatcctagcactttgggagtccaaggtgggaggaccacctcctccaggagtttgagaccagcctgggcaacaaagcaagacccctgtctctacaaaaaaattaacagggcaccgtggtgcgtgcctgtagtcccagcaacttgttatggttacgtaagaggaatgtgaattcaaccctggtgattttgggtcgtgtcaggagcagccctgcgacaccagttggcaccttctgcagactctatgtgtcgataagacaaggtcccacccagcaagtgcccttttctcagctgatgaacataagcctgcatggacgttactgtccatggaaaggagcggccggcaccggctgtgacagacacgtgcctgtctgcgatctgagtttcatgaacagtaaactctgttggtcacagcctctttggaaaacaatgttagttaaaagaagtgccctgtgaccagcagtgccaccctcgacagggttctccaagtgggacccgggcaagcagcctcagtatcactaggggttgttagcaatgtgccttcctgggctctgccccagagtggccgcaccagtgactgggagtgaggtcccagggccctgtggtccatgaagagctctcaggggattctgatgcccagtggtacaggtgggccaccggactggggtgtcatctgcccgtgggcatgagacatgaacaaggacatagcaggtctgttagtagtcataactaaaagaacaaaggagccgggcacggtggctcatgcctgtaatcccagcagtgttgggattacaggcgtgagccactgcgcccggtccacgtttctatcaaattgaaatcatgagcggttttgctgagggtgtggggcacccagagcctgcggcctgtgctcgagtgaaaatggtggccccgctccagaagcctgcgacggcgctcacggaaccgcagccttcgtgcggcggcacctgggccgtgctactcctctgtgacttcccggaagagatgagctgctacgtccagcaaaaggcacatccaagatcgttcaccccagcatgactcgttacactccggactagaaggaaccccaaggtgcttcagtgacagaacgatgaaccagctggggtgtaacccccatgcaatggaatatcgtacaggaacgaaaaggacacgctacccctacaagcaacatggatctcagaggcaggatgttgcgcagaagaaaccagacacaaatgcttcggctcgtgttgctgcgactcattacaggcagccgaatctgcggtgatgggggccccaggagcagtgaccaggaggcagtgccacggagcctgcggtgggggctgatagtcagtagcgtgacctggttgggatgttctgtttttaagctggagtccatcatgtttgtttatttgttcatttcgtagaggtgggggtcttgtagaggtgggggtctcactctgttgcccaggctggtctcaaactctgggcctcaagcgatcctcccaccttggccttccaaagtgctgggattacaggtgtgagccactgcataaggccgttattgttattagtgcttaaaaatatttagtaaacattttatttagcctaaaaaccattcagagagcagaggctggatggaacacggcgtgccaggcggtgagagcacagaccctcctcttccagagcaggaagtgggtaaatgacttttaagcctcatttctggggtggcaaaactcttctgtatgaagaagtacaaatatgtaatgtcccataatggcagctatgggacgttacgtatttgccaaaacccacataacgcacaacgccaagagtgaactgtaatgtaaactgtggacttaagtcaatgatcgtgtcccgatacgggctggttggttgtgatgcagggcaggtgaggcccaaagtggagcttagcctgccagcgttcttggctttgcccaagaaagaattcaaggacaagccggaggtagaagagaacaacttgattgaagaggcagtgtggcagacctcactgaagatccccctaccccaggctcaagtcagagagagaggaggtggcagtgccggaatttcagctgcgcatccgtcccagctctgcactgcgggcgtccgtcccagctctgcactgcgtgcgtcccgccctggctggagcttgcagacggcagccctgcaggaacccaccggggctgactccttcctccccagatcccacaaaacagcagtggatctccactcggcacgcattcccctctacattcacacgaagtgtcttttaatggaaagtgtataaactcgttaattttggttactgcactgaagttaggcaagcttctgcagctttattaaatgaccaatgctgtccct

SEQ ID NO: 10564 - protein, 147 aa, Homo sapiens; identical to SEQ ID NO: 1706

SEQ ID NO: 10565 - DNA, 3178 bp, Homo sapiens
acaatggccggcccccgcgggtagtggagcccgtttgttccgcccgtgtcgagcctggagccagaacctgtgaagagcggaagggccaagggacgtcttctccacgccgctccgactccaggggagccgtggcctcctctccgccctagcgctgagaaccgtgggtaccgatggatgtggccgagagccctgaacgggatcctcactctccagaggatgaagagcagccacagggactctcggacgatgacattctgagggacagcgggtccgatcaggatttggacggggcgggggtgagggcttctgatctggaggatgaggaaagtgcagccagggggccgagccaggaggaggaagataatcactccgacgaggaggaccgggcaagtgagcctaaatcccaagaccaggactcagaggtgaatgagctgagccggggcccgaccagctccccctgcgaggaggagggggacgaaggggaggaagaccggacaagcgaccttagggatgaggcctcctcagtcaccagggagctggatgagcatgagctagactacgatgaggaggttcctgaggagccagctcccgccgtccaggaggacgaggctgagaaagcgggggctgaggatgatgaggagaaaggcgaaggcactcccagggaggaggggaaggctggtgttcagagtgtgggagaaaaggaatccctggaggctgccaaggagaaaaagaaagaggacgatgatggagaaatcgatgatggggaaatagacgatgatgacctggaagaaggtgaagtgaaggaccccagtgacaggaaggtgaggcctcgtcccacctgccggttcttcatgaaagatgttgtgacaccattatccactcttcttccaccaatatccaattccataccattcagaggccaggttaaagggaactgtacctggggaatgaattgtaggtttatacaccctggagtgaacgacaaggggaactactccctaatcaccaaagccgaccccttcccgcctaatggtgccccgcctctcggacctcacccgctgatgcccgccaacccttggggtgggccggtagttgatgaaattttgcctccaccccctccagagcccccaacagagagtgcctgggaacgaggactccggcatgcaaaggaggttttaaaaaaagcaactattcgaaaagaacaggagcctgattttgaagagaaaaggtttacggtgaccattggcgaagacgaacgggaatttgacaaagaaaatgaagtttttcgagattggaattctcggatcccgagagatgtcagagacacagtactcgagccttacgcagacccttattatgactatgaaattgagcggttttggcgtggcggacagtatgagaatttcagggtgcagtatacagaaacagagccgtatcataattaccgagtaaagggagcgcgagcgagagcgggagcgcgagcgccgaccgggagaaggagcgggagaaggagaaggggaagcccaagccccgctccccgcagccgccaagccgccaagctgagccaccaaagaaggaggctgccaccacggggccgcaggtgaagagagcagatgagtggaaggacccttggcgccgatccaagtctcccaagaagaaactcggggtgtcggtctccccgagccgggctcgaaggcgtcggaaaacatcagcctcgtcagcctctgcctctaattcctccaggtcgtcttcgcggtcatcgtcctactctggctccggctcctcccggtcgcgatcccggtcttcatcctacagctcctactccagccgctcttccagacacagctcgttctcaggaagccggtccaggtcccggtccttctcttcgtccccgtccccgtccccaacaccttccccacatagaccttccatcagaaccaagggagagccggccccgccgcccgggaaagcaggagagaagtcagtgaagaagccggccccgcctccagccccaccacaggccaccaaaaccactgctcctgtccccgagcccaccaagccaggagaccctcgggaagccaggaggaaggagcggccagccaggaccccccccaggaggcggctgataaaggaagcaggaagcgctatgaaccatcagacaaggacaggcagagccctcctccagccaagcggcccaacacatccccagaccgaggttctcgggaccggaagtcaggtgggagactgggctccccgaagccagagcggcagagaggccagaactccaaagcccctgcagccccggctgacaggaagcgccagctgtcaccccagtccaagagctccagcaaggtcacgagcgtgcccggcaaagcctcggatcccggcgccgccagcaccaaatcagggaaggccagcacgctgtctcggcgggaggagctgctgaaacagctgaaggccgtggaggatgctattgcacgcaagcgggccaagatccccgggaaagcataggccgtgccccgaccggactggacgcatttttatacatagggtaagcgcagccattttggattttgcagttaatgtcttattttggctgtgattctttttaaaaagtaaaaaagaaaaaaaagtttctcagctggaaaagaagccacacaggaaatgacaacgacgctgaatcccagcctccctccccagagcagaagtcccgcaggacagacagacacagacagcgctagtgaccagcacggttctcatgtaaattacaagccccagccgccagccccgccttctcttcctcctcctccgtcttcttccctggccctggtcaggcctgtggagccccagctctgggtccctagcccgggtccaggcagccaggctccctcctgagctgagaaacggaacctcgcgaaccactggtggcacatccttctcctcccccgcccctgatcacccgcccccggatcagaaatatatctatattctcgactaaagtctcatcaggaaatatttcctgtcttttattttaagcatcaaattgttttagttgatttaaaaaggaaaaaatacagaaaagaccaaaaaaaggccaagggtgttgttggggcgtctgtctaatgtggtgggtctttttttgaggggtctcctaaaataaaatattttgataagcagc

SEQ ID NO: 10566 - protein, 477 aa, Homo sapiens
MDVAESPERDPHSPEDEEQPQGLSDDDILRDSGSDQDLDGAGVRASDLEDEESAARGPSQEEEDNHSDEEDRASEPKSQDQDSEVNELSRGPTSSPCEEEGDEGEEDRTSDLRDEASSVTRELDEHELDYDEEVPEEPAPAVQEDEAEKAGAEDDEEKGEGTPREEGKAGVQSVGEKESLEAAKEKKKEDDDGEIDDGEIDDDDLEEGEVKDPSDRKVRPRPTCRFFMKDVVTPLSTLLPPISNSIPFRGQVKGNCTWGMNCRFIHPGVNDKGNYSLITKADPFPPNGAPPLGPHPLMPANPWGGPVVDEILPPPPPEPPTESAWERGLRHAKEVLKKATIRKEQEPDFEEKRFTVTIGEDEREFDKENEVFRDWNSRIPRDVRDTVLEPYADPYYDYEIERFWRGGQYENFRVQYTETEPYHNYRVKGARARAGARAPTGRRSGRRRRGSPSPAPRSRQAAKLSHQRRRLPPRGRR

SEQ ID NO: 10567 - DNA, 3699 bp, Homo sapiens
acaatggccggcccccgcgggtagtggagcccgtttgttccgcccgtgtcgagcctggagccagaacctgtgaagagcggaagggccaagggacgtcttctccacgccgctccgactccaggggagccgtggcctcctctccgccctagcgctgagaaccgtgggtaccgatggatgtggccgagagccctgaacgggatcctcactctccagaggatgaagagcagccacagggactctcggacgatgacattctgagggacagcgggtccgatcaggatttggacggggcgggggtgagggcttctgatctggaggatgaggaaagtgcagccagggggccgagccaggaggaggaagataatcactccgacgaggaggaccgggcaagtgagcctaaatcccaagaccaggactcagaggtgaatgagctgagccggggcccgaccagctccccctgcgaggaggagggggacgaaggggaggaagaccggacaagcgaccttagggatgaggcctcctcagtcaccagggagctggatgagcatgagctagactacgatgaggaggttcctgaggagccagctcccgccgtccaggaggacgaggctgagaaagcgggggctgaggatgatgaggagaaaggcgaaggcactcccagggaggaggggaaggctggtgttcagagtgtgggagaaaaggaatccctggaggctgccaaggagaaaaagaaagaggacgatgatggagaaatcgatgatggggaaatagacgatgatgacctggaagaaggtgaagtgaaggaccccagtgacaggaaggtgaggcctcgtcccacctgccggttcttcatgaaagggaactgtacctggggaatgaattgtaggtttatacaccctggagtgaacgacaaggggaactactccctaatcaccaaagccgaccccttcccgcctaatggtgccccgcctctcggacctcacccgctgatgcccgccaacccttggggtgggccggtagttgatgaaattttgcctccaccccctccagagcccccaacagagagtgcctgggaacgaggactccggcatgcaaaggaggttttaaaaaaagcaactattcgaaaagaacaggagcctgattttgaagagaaaaggtttacggtgaccattggcgaagacgaacgggaatttgacaaagaaaatgaagtttttcgagattggaattctcggatcccgagagatgtcagagacacagtactcgagccttacgcagacccttattatgactatgaaattgagcggttttggcgtggcggacagtatgagaatttcagggtgcagtatacagaaacagagccgtatcataattaccgagaaagggagcgggagcgagagagagagaacagacagcgcgagcgcgagcgggagcgggagcgggaccgagagcgggagcgccggcagagggagcgcgagcgagagcgggagcgcgagcgcgacaaggagcggcagcggaggaaggaggagtgggagcgtgagcgagccaagcgggacgagaaggaccggcagcaccgtgaccgcgaccgggagaaggagcgggagaaggagaaggggaagcccaagccccgctccccgcagccgccaagccgccaagctgagccaccaaagaaggaggctgccaccacggggccgcaggtgaagagagcagatgagtggaaggacccttggcgccgatccaagtctcccaagaagaaactcggggtgtcggtctccccgagccgggctcgaaggcgtcggaaaacatcagcctcgtcagcctctgcctctaattcctccaggtcgtcttcgcggtcatcgtcctactctggctccggctcctcccggtcgcgatcccggtcttcatcctacagctcctactccagccgctcttccagacacagctcgttctcaggaagccggtccaggtcccggtccttctcttcgtccccgtccccgtccccaacaccttccccacatagaccttccatcagaaccaagggagagccggccccgccgcccgggaaagcaggagagaagtcagtgaagaagccggccccgcctccagccccaccacaggccaccaaaaccactgctcctgtccccgagcccaccaagccaggagaccctcgggaagccaggaggaaggagcggccagccaggaccccccccaggaggcggacgctaagcggcagcggcagtggcagtggtagcagctatagtggttccagctcccgatccaggtccctgagcgtgagcagcgtctcctcagtgtccagtgctacgtcgagcagcagctctgcacacagcgtggactcggaggacatgtacgcagacctggctagccccgtgtcctcagccagctctcggtccccggccccagcccagaccaggaaggagaaaggaaaatctaagaaagaagacggtgttaaagaggaaaagcggaaaagggattcgtccacacaaccacccaaatctgcaaaacctccagcaggggggaagtcctcccagcagccctcgacaccccagcaggcaccccccgggcagccccagcagggcacatttgtggcccacaaggagatcaagttgacactgttgaataaggcggctgataaaggaagcaggaagcgctatgaaccatcagacaaggacaggcagagccctcctccagccaagcggcccaacacatccccagaccgaggttctcgggaccggaagtcaggtgggagactgggctccccgaagccagagcggcagagaggccagaactccaaagcccctgcagccccggctgacaggaagcgccagctgtcaccccagtccaagagctccagcaaggtcacgagcgtgcccggcaaagcctcggatcccggcgccgccagcaccaaatcagggaaggccagcacgctgtctcggcgggaggagctgctgaaacagctgaaggccgtggaggatgctattgcacgcaagcgggccaagatccccgggaaagcataggccgtgccccgaccggactggacgcatttttatacatagggtaagcgcagccattttggattttgcagttaatgtcttattttggctgtgattctttttaaaaagtaaaaaagaaaaaaaagtttctcagctggaaaagaagccacacaggaaatgacaacgacgctgaatcccagcctccctccccagagcagaagtcccgcaggacagacagacacagacagcgctagtgaccagcacggttctcatgtaaattacaagccccagccgccagccccgccttctcttcctcctcctccgtcttcttccctggccctggtcaggcctgtggagccccagctctgggtccctagcccgggtccaggcagccaggctccctcctgagctgagaaacggaacctcgcgaaccactggtggcacatccttctcctcccccgcccctgatcacccgcccccggatcagaaatatatctatattctcgactaaagtctcatcaggaaatatttcctgtcttttattttaagcatcaaattgttttagttgatttaaaaaggaaaaaatacagaaaagaccaaaaaaaggccaagggtgttgttggggcgtctgtctaatgtggtgggtctttttttgaggggtctcctaaaataaaatattttgataagcagc

SEQ ID NO: 10568 - protein, 953 aa, Homo sapiens
MDVAESPERDPHSPEDEEQPQGLSDDDILRDSGSDQDLDGAGVRASDLEDEESAARGPSQEEEDNHSDEEDRASEPKSQDQDSEVNELSRGPTSSPCEEEGDEGEEDRTSDLRDEASSVTRELDEHELDYDEEVPEEPAPAVQEDEAEKAGAEDDEEKGEGTPREEGKAGVQSVGEKESLEAAKEKKKEDDDGEIDDGEIDDDDLEEGEVKDPSDRKVRPRPTCRFFMKGNCTWGMNCRFIHPGVNDKGNYSLITKADPFPPNGAPPLGPHPLMPANPWGGPVVDEILPPPPPEPPTESAWERGLRHAKEVLKKATIRKEQEPDFEEKRFTVTIGEDEREFDKENEVFRDWNSRIPRDVRDTVLEPYADPYYDYEIERFWRGGQYENFRVQYTETEPYHNYRERERERERENRQRERERERERDRERERRQRERERERERERDKERQRRKEEWERERAKRDEKDRQHRDRDREKEREKEKGKPKPRSPQPPSRQAEPPKKEAATTGPQVKRADEWKDPWRRSKSPKKKLGVSVSPSRARRRRKTSASSASASNSSRSSSRSSSYSGSGSSRSRSRSSSYSSYSSRSSRHSSFSGSRSRSRSFSSSPSPSPTPSPHRPSIRTKGEPAPPPGKAGEKSVKKPAPPPAPPQATKTTAPVPEPTKPGDPREARRKERPARTPPRRRTLSGSGSGSGSSYSGSSSRSRSLSVSSVSSVSSATSSSSSAHSVDSEDMYADLASPVSSASSRSPAPAQTRKEKGKSKKEDGVKEEKRKRDSSTQPPKSAKPPAGGKSSQQPSTPQQAPPGQPQQGTFVAHKEIKLTLLNKAADKGSRKRYEPSDKDRQSPPPAKRPNTSPDRGSRDRKSGGRLGSPKPERQRGQNSKAPAAPADRKRQLSPQSKSSSKVTSVPGKASDPGAASTKSGKASTLSRREELLKQLKAVEDAIARKRAKIPGKA

SEQ ID NO: 10569 - DNA, 4657 bp, Homo sapiens
ccacgcccaactaattttgtatttttagtagagaaggggtttctccatgttggtcaggctgctctcaaactcctgacctcaggtgatccacctgcctcggcctcccacggtgctgggattacaggcatgagccaccacacctggccctcacttcctattttcttgagtattttttatcaaaaaggctattgaatttttgttagacatttttatcatctgtgaatagaaccctttgacttctggcctgctcttagatgtagtttgtgaacagatttcctaaccttgagccaaccttgcgctcctggagtaaaccccactgcgtcacggtctgttactttctgtccctaatgtttcgtgtggtctttttacgccagtgctcctaagtgatgagagttctttttcattggcccttttcagactcgagccttacgcagacccttattatgactatgaaattgagcggttttggcgtggcggacagtatgagaatttcagggtgcagtatacagaaacagagccgtatcataattaccgagaaagggagcgggagcgagagagagagaacagacagcgcgagcgcgagcgggagcgggagcgggaccgagagcgggagcgccggcagagggagcgcgagcgagagcgggagcgcgagcgcgacaaggagcggcagcggaggaaggaggagtgggagcgtgagcgagccaagcgggacgagaaggaccggcagcaccgtgaccgcgaccgggagaaggagcgggagaaggagaaggggaagcccaagccccgctccccgcagccgccaagccgccaagctgagccaccaaagaaggaggctgccaccacggggccgcaggtgaagagagcagatgagtggaaggacccttggcgccgatccaagtctcccaagaagaaactcggggtgtcggtctccccgagccgggctcgaaggcgtcggaaaacatcagcctcgtcagcctctgcctctaattcctccaggtaaggagggctcgtgggacggctggggtgtcagcaccttggagccgtcagctgacaccatgtacctcactgggtcaggtggggaacaccccagccccactgtttgctgtggcgtcgttacctgcagaccagtcagtgggactaacccggcgtttataccttcagcaaagagcatcaatgccaagtaggactgacgcagtgaccccaaatggggcacagaccccggcgactgagcctgactgctcccagggagtcacaggccacactggagggaggggcacctggatgcgggaggacgcacagacctggggcccagtgagtccatctgttcctccagactggacctgaaactgttgcccctccacctacggtcctggtctcagcacacaggagcccggctcccgagtgagggatgatggaaagcagggggccggggtagaccccatcatgctcggcaggaacaggaggtgtgggtgggaggccaggcttcactgaaagtggatgcagatgaacagatagacacacacacggacccacgtgagctgggtctgcccactcaggcagcgccacccggtaacagcaggcacaccccacgcccaggtcttgatttctaaatgccgttctgcaccaaggagggatggcactgaagagtgtctgggggaggctgtatgcgtctgtgcgcgcgtctgcagctgtgcgcgcgtgcgcagctgtgcgcttgtgtgtagctgtgcgtctgtgggtgtgtagctgtgcatgtgtgcgtcagggcgtgtggggcagggagggcccttctcacttctcgccacgctccgtcccgcccgccccaggtcgtcttcgcggtcatcgtcctactctggctccggctcctcccggtcgcgatcccggtcttcatcctacagctcctactccagccgctcttccagacacagctcgttctcaggaagccggtccagatgcgtgctgtcactgagggccacagcctgagatcctcgagttgaggcactccagtcctccgcagacaggccgaggaaggggccagacccagccctgtcctgtgggtgtttctatgggagctgtgctgctgccccactgccaaggagcctgtctcctcctgtcctgcacacacatgaacgtgacactcgcctcccggaggacccgccagtggatgctgacaccttccacgctctctggtctactctgggcctgtgtttttagcagatgacagaacagtccagaactgaagttaaaactgaggcacataaatggaaattcgtggccttctccatgggtctgggtgggtcctcagtgggcttgggctggtgaagaaacacccccaggccccttccgacacctttgttcactcccctaggtcccggtccttctcttcgtccccgtccccgtccccaacaccttccccacatagaccttccatcagaaccaagggagagccggccccgccgcccgggaaagcagggtgagtgcccagcctgtgggcaagtcctggccggccaggcctccacaggctgcagcctcctccctccgtctctatctctcatttgtgtttgggaccaaagaggtgaggatgcctcagggggctggccccagggggtgactgggctgggaggcactgggcacagctcctgttctcacgggccacccttacacagcagcactccctcgggaaccctggggacagagcacagccctggggacacggcagcagccgggtgttcttaaggggtcttcctattagcctgctctccccactgcctggcggtgcctgtagctcttgcctgttagaggggagcctggaagggctgctgggggctttgaagccgttcccaagcactctgacaccgatgggtggggagccgtgtccaggcacgagcgtgctcaccgagcgtcacaggcatgcagtgtcgttccccgagctgtgggtccattgaaaggggatgtaggccagcggggccccgtccaccagccctgccctgctcgagcctccctgtctcacagagagaagtcagtgaagaagccggccccgcctccagccccaccacaggccaccaaaaccactgctcctgtccccgagcccaccaagccaggagaccctcgggaagccaggaggaaggagcggccagccaggaccccccccaggaggcggacgctaagcggcagcggcagtggcagtggtagcagctatagtggttccagctcccgatccaggtcatccccatcaccctgtgcctctgtttctccctccccgtcggggccaggaagtcccagaagcagccagtgtgggttgggctgtctcccacaggtgggctggggcccttctggatctgagtcaccctggggctgtggaaggctgcggttgaagctttgacacaggagaaaatgggccaggactcgtgataggaagaccccctccccccaccaaaaaaagattcacaaactcgggggcactcaggtcaggaggaggtgcctctgccctgctgacttgatgcccagcaccctgagagagcacctgcacctggggaggagccggcagcttccagcccagcagggcagaggctgggcctgcgtgacctatcacacctgtcgagggaaccggcctgagggggtggggaagccgataaaaacatctgagaagagaatacatggaaaagctttgtgggccaggtgcggcggctcacacctgtgatcccagcaccgtgggaggccaaggcaggaggattgcttgagcccaggacttgaccagcctgagcaacatagaccccatctccacagaaaaagatttttttttttttttttttttttgagacagtttcattcttgttgcccaggctggagtgcaatggcgcgatctcgctacctccgcctcccggattcaacctcagccccctgagtagctgagactacaggcgcacactgccacgcccagctaattttctgtattttagtagagatggggtttcaccatgttgcccaggttggtctcaaactcctgagctcaggcattccacccaccttggcctcccaaagtgctgggattacatgcgtgagccgccgcacgcagcctaattttgtatttttagtagagactgggttttaccacgtttctgatcttgaactcctgacctcaggtgatccatccgcctcggcttcccaaagtgctgggattacaggtgtgagccactgcacccagcccagaaattttttttaattagctgggtatagtggtgtgtgcctatgatcccagctacttgggaggtcaaggttgaatgagctgtgatcacgacattgcattccagcctggacaacagagatcctgtctcaaaacaaaaaaaaaggatttttgctatttagttgttttaaaagaaagtattaaatcagtccttagattccttgcatagaactctttcatttccaggcagcaggtcgtttatatatttgtcacagttctttgtttcttttgtttgttttgtttctggagagacatggtcttgctgtgttgcccaggctggtctcaaactcctgggctcaagtgatcctcccaccgtggtctcccaaactcgtgggattataggcatgagccaccgcgcctggcctaaatgtttcttaataagtctgaaatgttttaaagacctgacttttgaaa

SEQ ID NO: 10570 - protein, 156 aa, Homo sapiens
MRVLFHWPFSDSSLTQTLIMTMKLSGFGVADSMRISGCSIQKQSRIIITEKGSGSERERTDSASASGSGSGTESGSAGRGSASESGSASATRSGSGGRRSGSVSEPSGTRRTGSTVTATGRRSGRRRRGSPSPAPRSRQAAKLSHQRRRLPPRGRR

SEQ ID NO: 10571 - DNA, 486 bp, Homo sapiens
gagagaagtcagtgaagaagccggccccgcctccagccccaccacaggccaccaaaaccactgctcctgtccccgagcccaccaagccaggagaccctcgggaagccaggaggaaggagcggccagccaggaccccccccaggaggcggacgctaagcggcagcggcagtggcagtggtagcagctatagtggttccagctcctgagctgagaaacggaacctcgcgaaccactggtggcacatccttctcctcccccgcccctgatcacccgcccccggatcagaaatatatctatattctcgactaaagtctcatcaggaaatatttcctgtcttttattttaagcatcaaattgttttagttgatttaaaaaggaaaaaatacagaaaagaccaaaaaaaggccaagggtgttgttggggcgtctgtctaatgtggtgggtctttttttgaggggtctcctaaaataaaatattttgataagc

SEQ ID NO: 10572 - protein, 67 aa, Homo sapiens
EKSVKKPAPPPAPPQATKTTAPVPEPTKPGDPREARRKERPARTPPRRRTLSGSGSGSGSSYSGSSS

SEQ ID NO: 10573 - DNA, 2254 bp, Homo sapiens
catatgggcagggcagactcaggtgccagtcctgtgtgctttgtgtccgtgttgagtgcacgccagtgaagctacagacctgctgtttccagtctgtctgccgtgtgttcctcaggcattccctgagactgcggaattgctccttgtgtttttaatttccctgtgggctgaggctatctcccttttgtctaagccagggactctgcttaaattccatccttgccgctgttgagtcagctcagtcctgtttcccttcccaaaaagcaacctgacattcgttttgttttttgtttgttttgagacggagtttcactcttgtcgcccaggctggagtgcgatggcatggtctcggctcactgcaacctccacctcccgggttcaagcgatttttttgcctcagcctccccagtagctgggattacaggcgcctgcgaccacgcccggctaatttttgtatttttagtagagatggggttttaccatgttggccaagctggtcccgaactcctgacatcagttcagctgggtctcagaccccattgctcgtgacgagatctgcccatctcagtctcccagagtgctgggattacaggcgtgagcagccgtgcctggctgcaacctgacattgattagtgaaatggggccctggcctagccatggggacgtcccttactttgtaaccctgaaactgcccagtgtccccccaaaatcacacattccgtgggtacatgatccataaatggacactgcgtaaaagtggaccatggagcaccccctgctggcccctccctccagtctggctggggtgtggtgagatgtgcttgtgtgtccaggtccctgagcgtgagcagcgtctcctcagtgtccagtgctacgtcgagcagcagctctgcacacagcgtggactcggaggacatgtacgcagacctggctagccccgtgtcctcagccagctctcggtccccggccccagcccagaccaggaaggagaaaggaaaatctaagaaagaagacggtgttaaagaggaaaagcggaaaagggattcgtccacacaaccacccaaatctgcaaaacctccagcaggggggaagtcctcccagcagccctcgacaccccagcaggcaccccccgggcagccccagcagggcacatttgtggcccacaaggagatcaagttgacactgttgaataaggcggctgataaaggaagcaggaagcgctatgaaccatcagacaaggacaggcagagccctcctccagccaagcggcccaacacatccccagaccgaggttctcgggaccggaagtcaggtgggagactgggctccccgaagccagagcggcagagaggccagaactccaaagcccctgcagccccggctgacaggaagcgccagctgtcaccccagtccaagagctccagcaaggtcacgagcgtgcccggcaaagcctcggatcccggcgccgccagcaccaaatcagggaaggccagcacgctgtctcggcgggaggagctgctgaaacagctgaaggccgtggaggatgctattgcacgcaagcgggccaagatccccgggaaagcataggccgtgccccgaccggactggacgcatttttatacatagggtaagcgcagccattttggattttgcagttaatgtcttattttggctgtgattctttttaaaaagtaaaaaagaaaaaaaagtttctcagctggaaaagaagccacacaggaaatgacaacgacgctgaatcccagcctccctccccagagcagaagtcccgcaggacagacagacacagacagcgctagtgaccagcacggttctcatgtaaattacaagccccagccgccagccccgccttctcttcctcctcctccgtcttcttccctggccctggtcaggcctgtggagccccagctctgggtccctagcccgggtccaggcagccaggctccctcctgagctgagaaacggaacctcgcgaaccactggtggcacatccttctcctcccccgcccctgatcacccgcccccggatcagaaatatatctatattctcgactaaagtctcatcaggaaatatttcctgtcttttattttaagcatcaaattgttttagttgatttaaaaaggaaaaaatacagaaaagaccaaaaaaaggccaagggtgttgttggggcgtctgtctaatgtggtgggtctttttttgaggggtctcctaaaataaaatattttgataagcagc

SEQ ID NO: 10574 - protein, 223 aa, Homo sapiens
MYADLASPVSSASSRSPAPAQTRKEKGKSKKEDGVKEEKRKRDSSTQPPKSAKPPAGGKSSQQPSTPQQAPPGQPQQGTFVAHKEIKLTLLNKAADKGSRKRYEPSDKDRQSPPPAKRPNTSPDRGSRDRKSGGRLGSPKPERQRGQNSKAPAAPADRKRQLSPQSKSSSKVTSVPGKASDPGAASTKSGKASTLSRREELLKQLKAVEDAIARKRAKIPGKA

SEQ ID NO: 10575 - DNA, 1171 bp, Homo sapiens
gacctttgggagcagagcaggttgctggcaaggaacccatgtcctctggggcgaggacacggcttctggctcctggccctgctgtcctcactggcctctctcttgtcccaggcggctgataaaggaagcaggaagcgctatgaaccatcagacaaggacaggcagagccctcctccagccaagcggcccaacacatccccagaccgaggttctcgggaccggaagtcaggtgggagactgggctccccgaagccagagcggcagagaggccagaactccaaagcccctgcagccccggctgacaggaagcgccagctgtcaccccagtccaagagctccagcaaggtcacgagcgtgcccggcaaagcctcggatcccggcgccgccagcaccaaatcagggaaggccagcacgctgtctcggcgggaggagctgctgaaacagctgaaggccgtggaggatgctattgcacgcaagcgggccaagatccccgggaaagcataggccgtgccccgaccggactggacgcatttttatacatagggtaagcgcagccattttggattttgcagttaatgtcttattttggctgtgattctttttaaaaagtaaaaaagaaaaaaaagtttctcagctggaaaagaagccacacaggaaatgacaacgacgctgaatcccagcctccctccccagagcagaagtcccgcaggacagacagacacagacagcgctagtgaccagcacggttctcatgtaaattacaagccccagccgccagccccgccttctcttcctcctcctccgtcttcttccctggccctggtcaggcctgtggagccccagctctgggtccctagcccgggtccaggcagccaggctccctcctgagctgagaaacggaacctcgcgaaccactggtggcacatccttctcctcccccgcccctgatcacccgcccccggatcagaaatatatctatattctcgactaaagtctcatcaggaaatatttcctgtcttttattttaagcatcaaattgttttagttgatttaaaaaggaaaaaatacagaaaagaccaaaaaaaggccaagggtgttgttggggcgtctgtctaatgtggtgggtctttttttgaggggtctcctaaaataaaatattttgataagcagc

SEQ ID NO: 10576 - protein, 99 aa, Homo sapiens
MNHQTRTGRALLQPSGPTHPQTEVLGTGSQVGDWAPRSQSGREARTPKPLQPRLTGSASCHPSPRAPARSRACPAKPRIPAPPAPNQGRPARCLGGRSC

SEQ ID NO: 10577 - DNA, 1151 bp, Homo sapiens
cagatgccttggtgcccacatctctcttctcctacttggctctcccctttttatttctttataaaaatgaaggtggtgaactaagcagcctcaggctttagaagtgagtccctggcatcggtgaggccacccacacagccattccctgtacatcaggagggtggtctcactctgtacctatcacccaggttctcgggaccggaagtcaggtgggagactgggctccccgaagccagagcggcagagaggccagaactccaaagcccctgcagccccggctgacaggaagcgccagctgtcaccccagtccaagagctccagcaaggtcacgagcgtgcccggcaaagcctcggatcccggcgccgccagcaccaaatcagggaaggccagcacgctgtctcggcgggaggagctgctgaaacagctgaaggccgtggaggatgctattgcacgcaagcgggccaagatccccgggaaagcataggccgtgccccgaccggactggacgcatttttatacatagggtaagcgcagccattttggattttgcagttaatgtcttattttggctgtgattctttttaaaaagtaaaaaagaaaaaaaagtttctcagctggaaaagaagccacacaggaaatgacaacgacgctgaatcccagcctccctccccagagcagaagtcccgcaggacagacagacacagacagcgctagtgaccagcacggttctcatgtaaattacaagccccagccgccagccccgccttctcttcctcctcctccgtcttcttccctggccctggtcaggcctgtggagccccagctctgggtccctagcccgggtccaggcagccaggctccctcctgagctgagaaacggaacctcgcgaaccactggtggcacatccttctcctcccccgcccctgatcacccgcccccggatcagaaatatatctatattctcgactaaagtctcatcaggaaatatttcctgtcttttattttaagcatcaaattgttttagttgatttaaaaaggaaaaaatacagaaaagaccaaaaaaaggccaagggtgttgttggggcgtctgtctaatgtggtgggtctttttttgaggggtctcctaaaataaaatattttgataagcagc

SEQ ID NO: 10578 - protein, 76 aa, Homo sapiens
MTTTLNPSLPPQSRSPAGQTDTDSASDQHGSHVNYKPQPPAPPSLPPPPSSSLALVRPVEPQLWVPSPGPGSQAPS

SEQ ID NO: 10579 - DNA, 1044 bp, Homo sapiens
gccaggtgtgcaggccgctccaagcccagcctgccccgctgccgccaccatgacgctcctccccggcctcctgtttctgacctggctgcacacatgcctggcccaccatgacccctccctcagggggcacccccacagtcacggtaccccacactgctactcggctgaggaactgcccctcggccaggcccccccacacctgctggctcgaggtgccaagtgggggcaggctttgcctgtagccctggtgtccagcctggaggcagcaagccacagggggaggcacgagaggccctcagctacgacccagtgcccggtgctgcggccggaggaggtgttggaggcagacacccaccagcgctccatctcaccctggagataccgtgtggacacggatgaggaccgctatccacagaagctggccttcgccgagtgcctgtgcagaggctgtatcgatgcacggacgggccgcgagacagctgcgctcaactccgtgcggctgctccagagcctgctggtgctgcgccgccggccctgctcccgcgacggctcggggctccccacacctggggcctttgccttccacaccgagttcatccacgtccccgtcggctgcacctgcgtgctgccccgttcagtgtgaccgccgaggccgtggggcccctagactggacacgtgtgctccccagagggcaccccctatttatgtgtatttattgttatttatatgcctcccccaacactacccttggggtctgggcattccccgtgtctggaggacagccccccactgttctcctcatctccagcctcagtagttgggggtagaaggagctcagcacctcttccagcccttaaagctgcagaaaaggtgtcacacggctgcctgtaccttggctccctgtcctgctcccggcttcccttaccctatcactggcctcaggcccccgcaggctgcctcttcccaacctccttggaagtacccctgtttcttaaacaattatttaagtgtacgtgtattattaaactgatgaacacatcccc

SEQ ID NO: 10580 - protein, 197 aa, Homo sapiens; identical to SEQ ID NO: 1710

SEQ ID NO: 10581 - DNA, 989 bp, Homo sapiens
ccgccgtggtgaagctgttcgggccctttaccaggaattactatgttcgggccgtcctgcatctcctgtgagtccccgtcccgcaccccctctagggctcaggagggcttggagccgaccctccccactgtcccaccggccgggctgcctggacaggagccacccccacttacctcagtgtttttccaaacaaaaattcgggtccctggctctggcagggcctgtgtctgctgtctagtgtgcaggatttgtaaggatccactccaaatccgaggagctccgatccgtcgccagggtctggggtcagcatgcactgctggggggtcttgcctgggcttcctggtagggtggagggttccgtgctgtgtgtctgctggttactgccggctgaggccaggacacccacacgtggctgcttcctccgagcaagtgcaccagagccgctagtgtccacatcaaggctgagaacacccaggaccgaaacaagccccggtccgcgcacgtcccctgggtctgcagtctgccttgtcctgagactttgtggccttggcccccagacctggggctccgttcccctttctgagtgcccttctgtgtccctgcctctcacccgctgtcccccaggctctcggtgcccgccggcttcctgctggccaccatccttgggaccgcctgcctggccattgcgagcggcatctacctactggcggctgtgcgtggcgagcagtggacgcccatcgagcccaagccccgggagcggccgcagatcggaggcaccatcaagcagccgcccagcaaccccccgccgcggcccccggccgaggcccgcaagaagcccagcgaggaggaggctgcggtggcggcggggggacccccgggaggtccccaggtcaaccccatcccggtgaccgacgaggtcgtgtgacctcgccccggacctgccctcccgccaggtgcacccacctgcaataaatgcagcgaagccggga

SEQ ID NO: 10582 - protein, 199 aa, Homo sapiens
MHCWGVLPGLPGRVEGSVLCVCWLLPAEARTPTRGCFLRASAPEPLVSTSRLRTPRTETSPGPRTSPGSAVCLVLRLCGLGPQTWGSVPLSECPSVSLPLTRCPPGSRCPPASCWPPSLGPPAWPLRAASTYWRLCVASSGRPSSPSPGSGRRSEAPSSSRPATPRRGPRPRPARSPARRRLRWRRGDPREVPRSTPSR

SEQ ID NO: 10583 - DNA, 517 bp, Homo sapiens
tcctcatcaccgggggcatcgtggccacagctgggcgcttcacccagtggtactttggtgcctactccattgtggcgggcgtgtttgtgtgcctgctggagtacccccgggggaagaggaagaagggctccaccatggagcgctggggacagaagtacatgaccgccgtgcttcctgctggccaccatccttgggaccgcctgcctggccattgcgagcggcatctacctactggcggctgtgcgtggcgagcagtggacgcccatcgagcccaagccccgggagcggccgcagatcggaggcaccatcaagcagccgcccagcaaccccccgccgcggcccccggccgaggcccgcaagaagcccagcgaggaggaggctgcggtggcggcggggggacccccgggaggtccccaggtcaaccccatcccggtgaccgacgaggtcgtgtgacctcgccccggacctgccctcccgccaggtgcacccacctgcaataaatgcagcgaagccggga

SEQ ID NO: 10584 - protein, 121 aa, Homo sapiens
MERWGQKYMTAVLPAGHHPWDRLPGHCERHLPTGGCAWRAVDAHRAQAPGAAADRRHHQAAAQQPPAAAPGRGPQEAQRGGGCGGGGGTPGRSPGQPHPGDRRGRVTSPRTCPPARCTHLQ

SEQ ID NO: 10585 - DNA, 672 bp, Homo sapiens
cgacgcagacagacaaacccagagagttaatgtgtagtggacctcgggcctgcctccctgccttccctgcccttggcaccttgagaggagaatttgagtactagaatttgcatctgggagtgtccaccacgggatcttccagaagcccaggggttcgggccccactcctggcatgaagaaatagcttgggctggtgtcaggccgacccaggtcctggctgtgtggcctcgggcgcgtcacttaacctctctgagtggcagtcacaccatcctgcgtgggattcagacttgagcctgtcccagggcccctagcggggtgggcctccggggagggagggagggagggagggcgggcgctggggcgcggctcaacccttcagtgccccgcaggcggctgtgcgtggcgagcagtggacgcccatcgagcccaagccccgggagcggccgcagatcggaggcaccatcaagcagccgcccagcaaccccccgccgcggcccccggccgaggcccgcaagaagcccagcgaggaggaggctgcggtggcggcggggggacccccgggaggtccccaggtcaaccccatcccggtgaccgacgaggtcgtgtgacctcgccccggacctgccctcccgccaggtgcacccacctgcaataaatgcagcgaagccggga

SEQ ID NO: 10586 - protein, 133 aa, Homo sapiens
VAVTPSCVGFRLEPVPGPLAGWASGEGGREGGRALGRGSTLQCPAGGCAWRAVDAHRAQAPGAAADRRHHQAAAQQPPAAAPGRGPQEAQRGGGCGGGGGTPGRSPGQPHPGDRRGRVTSPRTCPPARCTHLQ

SEQ ID NO: 10587 - DNA, 656 bp, Homo sapiens
ggactccatttggaaatggaccctctcgggaccagggccagggagtgtctggcccagcacggtcctcatcaccgggggcatcgtggccacagctgggcgcttcacccagtggtactttggtgcctactccattgtggcgggcgtgtttgtgtgcctgctggagtacccccgggggaagaggaagaagggctccaccatggagcgctggggacagaagtacatgaccgccgtggtgaagctgttcgggccctttaccaggaattactatgttcgggccgtcctgcatctcctgctctcggtgcccgccggcttcctgctggccaccatccttgggaccgcctgcctggccattgcgagcggcatctacctactggcggctgtgcgtggcgagcagtggacgcccatcgagcccaagccccgggagcggccgcagatcggaggcaccatcaagcagccgcccagcaaccccccgccgcggcccccggccgaggcccgcaagaagcccagcgaggaggaggctgcggtggcggcggggggacccccgggaggtccccaggtcaaccccatcccggtgaccgacgaggtcgtgtgacctcgccccggacctgccctcccgccaggtgcacccacctgcaataaatgcagcgaagccggga

SEQ ID NO: 10588 - protein, 207 aa, Homo sapiens
MDPLGTRARECLAQHGPHHRGHRGHSWALHPVVLWCLLHCGGRVCVPAGVPPGEEEEGLHHGALGTEVHDRRGEAVRALYQELLCSGRPASPALGARRLPAGHHPWDRLPGHCERHLPTGGCAWRAVDAHRAQAPGAAADRRHHQAAAQQPPAAAPGRGPQEAQRGGGCGGGGGTPGRSPGQPHPGDRRGRVTSPRTCPPARCTHLQ

SEQ ID NO: 10589 - DNA, 3046 bp, Homo sapiens
gcagtgtcccagccgggttcgtgtcgccatggggcagatcgagtgggccatgtgggccaacgaacaggcgctggcgtccggcctgagtgagtgcacgtcagggacggtggaggctgcagcctggaggggtgtcccaagaccccagccgggacctcgggctacttacagggtggggaagtggggcgccaggcgggccaggccgggccggggtcaggccaggagggtgcggggaacgggggcgggaccctcaggccgcgggctggaaggaggagttctgagacccccagtaattcccttgcagaccctgcggagcgcggcgcccctcccccattcccttctctcggtcccccgactccgcgaaggaggaagttgcagcgcaggggaagaggcggttcagccccggtggtttccggggtcaccgccccgaagcccccgagtgggggctccggcctgggcatcgggagaagctcccctgcccctcggtagccagctggcctggaggtcgctctccctgggcttggggtggggaatgggctcatgccctggggctcagcccttctcatctggagtctgcgctggaggcggtctgagatttcacaaggcgccgaaaccacccagtgacggccctgcccagcccagctgcacaggcactttgctcttggggtgggatggcacagcccccagtcaccctcctgtgcatttgctcagaggttctggtgagggcagcggactccatttggaaatggaccctctcgggaccagggccagggagtgtctggcccagcacgggtgaggctgggctcaggcgaggtctgagggcagaggcaccactgcagcagctccaggaaggacctgcaccgggggaggagtgcctgggaagggcctgggggctgagggtgaggaggaggggcccgctgccaccactcccctggggctctgagcgccctccctgttgtctggagggtgcgtggcagctggagtgggagcagagacctcagggtgggagggctggaggacggggccctgcagcctgtcctgtgcccaggaaagtgaccgcctgcttcgagtcagcggccaagaagtcggtgggtcagttcagacagctctccccagagctgccccgtgagactcaccctgcctgccccgcactccctacaggaagtagacggactgagggcacccagctgggagccaggagacctgggctctagtctggcctcctgctgaaaccctccaggggctcctggcccgaagagttagagccagactggacgccctgcactgcccgccctggcctcccggctctccggccccctcctccagctgccgtgcttcctttctgttcctagatctcctgagcgtgccccagggcctcggcacaagctgctgcttctgcagagcctcatggctgtctcatttatttctcaattcaaatgccacctgcctggggaggtccttccagaccgtgcagccccaggaggcagctggcccggagacagcagggccttgacaaagagtcccccctgtacacagcaggtgctctgtaaatgtggctgggtgccagaatacgtcctcagacctccctggtggcaccagcggcagctttgcaccctctttcggatggcaggctcgggaccaggacggtccccaaagatgcatggacaattggctgagtagactcaaggacactgccctcccctcctccgacgcagacagacaaacccagagagttaatgtgtagctcggcctcccaaagtgctgggattacaggcgtgagccaccgcgcccggcctgattgtctttttcttaagttgcaggaagtccacatatattttagctatttagcctttgtaacctttaaacactggggatgccttcatgctttctggtgagggtctgttaacttggcgcgtggagtccttcactgcacggaagagcagaggtttccctgttcacctgctctatggtctgtgctttgtgaaaacacctttccctggccctgggtcctgccttcacgttcctgccttttcttctatcagccttctagttttgcttttcagaatggaatgtttccgttttggagtcaggtaggatcacacatgtccagtttctctttctgttcatgacgtatatgatgtgacatatttttccaccagatattatgggatagaagatgaaaagcacacactcccaggtccacttgacctgttgcagtggaacctccgggcatgggcccaggagtctgtatttttagtaaaagccagtggaatcccgtggtcttcaagctctccccccaccacccccatgtgcagaaatgcctgggcacccttggggggctgccggccagcgtgggtgaatggcgcccaccagacggagcagggcctgctactctcctgggccacccctcctgctggacctcgggcctgcctccctgccttccctgcccttggcaccttgagaggagaatttgagtactagaatttgcatctgggagtgtccaccacgggatcttccagaagcccaggggttcgggccccactcctggcatgaagaaatagcttgggctggtgtcaggccgacccaggtcctggctgtgtggcctcgggcgcgtcacttaacctctctgagtggcagtcacaccatcctgcgtgggattcagacttgagcctgtcccagggcccctagcggggtgggcctccggggagggagggagggagggagggcgggcgctggggcgcggctcaacccttcagtgccccgcaggcggctgtgcgtggcgagcagtggacgcccatcgagcccaagccccgggagcggccgcagatcggaggcaccatcaagcagccgcccagcaaccccccgccgcggcccccggccgaggcccgcaagaagcccagcgaggaggaggctgcggtggcggcggggggacccccgggaggtccccaggtcaaccccatcccggtgaccgacgaggtcgtgtgacctcgccccggacctgccctcccgccaggtgcacccacctgcaataaatgcagcgaagccggga

SEQ ID NO: 10590 - protein, 52 aa, Homo sapiens
MCSSASQSAGITGVSHRARPDCLFLKLQEVHIYFSYLAFVTFKHWGCLHAFW

SEQ ID NO: 10591 - DNA, 2649 bp, Homo sapiens
gcaccctacagatgcgggtctccgcccagccgcggtcacctggggggctgggggcggggcctgggcggggcggggttcggccgggagcgcaggggcggcagtgcgcgcctagcagtgtcccagccgggttcgtgtcgccatggggcagatcgagtgggccatgtgggccaacgaacaggcgctggcgtccggcctgatcctcatcaccgggggcatcgtggccacagctgggcgcttcacccagtggtactttggtgcctactccattgtggcgggcgtgtttgtgtgcctgctggagtacccccgggggaagaggaagaagggctccaccatggagcgctggggacagaagtacatgaccgccgtggtgaagctgttcgggccctttaccaggaattactatgttcgggccgtcctgcatctcctgctctcggtgcccgccggcttcctgctggccaccatccttgggaccgcctgcctggccattgcgagcggcatctacctactgagccaagtccctcctgcccgcagaggcaactgccctccccttgctgtgcgtcttctagtgtgtgtgcgtgggaaaggtgcagcactttctgtgtacgccttccgcgtatggaagtggagttctgtttcaagcctcactgacctgccaccggcagaactctcctttagaaccccttcctgttgccaagtgctcatctgggctgttgctttgttttccgggggccacccgcatcccccccgtctccctgctgccacgcacagctagtggctcctggagacctcgggaggaattccttgtgctaaacccagagaggaattgctgggtcaggcatcagcctctgcaccgttcaccctgccgggctcagctgctcctcagcagacaacccaccaccagccatgtggccccatctctcccaccatgcactaggctttctcccacgcttgccagtttcacagcacgagctggccgtgtggagcttggactcgcccttctctgactgtggatttgagctgttggagtttcttctcccttgagttgcctgttcaaatcctttgcccatttttctattgtggtttttgtatttttctttttcttcttttttttttgagatggagtctcgcgccatcgcccaggctggagtgcagtggcgtgatctcggctcactgcaaccttcgcctcctgggttcaagcaattctcctgcctcagcctcccgagtagctgggactacaggcacgtgccaccatgcctggctaatttttggtatttttagtagagacggggtttcaccgcgttagccaggatggtctggatctccttgaccttgtgatccgcccgcctcggcctcccaaagtgctgggattacaggcgtgagccaccgcgcccggcctgattgtctttttcttaagttgcaggaagtccacatatattttagctatttagcctttgtaacctttaaacactggggatgccttcatgctttctggtgagggtctgttaacttggcgcgtggagtccttcactgcacggaagagcagaggtttccctgttcacctgctctatggtctgtgctttgtgaaaacacctttccctggccctgggtcctgccttcacgttcctgccttttcttctatcagccttctagttttgcttttcagaatggaatgtttccgttttggagtcaggtaggatcacacatgtccagtttctctttctgttcatgacgtatatgatgtgacatatttttccaccagatattatgggatagaagatgaaaagcacacactcccaggtccacttgacctgttgcagtggaacctccgggcatgggcccaggagtctgtatttttagtaaaagccagtggaatcccgtggtcttcaagctctccccccaccacccccatgtgcagaaatgcctgggcacccttggggggctgccggccagcgtgggtgaatggcgcccaccagacggagcagggcctgctactctcctgggccacccctcctgctggacctcgggcctgcctccctgccttccctgcccttggcaccttgagaggagaatttgagtactagaatttgcatctgggagtgtccaccacgggatcttccagaagcccaggggttcgggccccactcctggcatgaagaaatagcttgggctggtgtcaggccgacccaggtcctggctgtgtggcctcgggcgcgtcacttaacctctctgagtggcagtcacaccatcctgcgtgggattcagacttgagcctgtcccagggcccctagcggggtgggcctccggggagggagggagggagggagggcgggcgctggggcgcggctcaacccttcagtgccccgcaggcggctgtgcgtggcgagcagtggacgcccatcgagcccaagccccgggagcggccgcagatcggaggcaccatcaagcagccgcccagcaaccccccgccgcggcccccggccgaggcccgcaagaagcccagcgaggaggaggctgcggtggcggcggggggacccccgggaggtccccaggtcaaccccatcccggtgaccgacgaggtcgtgtgacctcgccccggacctgccctcccgccaggtgcacccacctgcaataaatgcagcgaagccggga

SEQ ID NO: 10592 - protein, 210 aa, Homo sapiens
MGQIEWAMWANEQALASGLILITGGIVATAGRFTQWYFGAYSIVAGVFVCLLEYPRGKRKKGSTMERWGQKYMTAVVKLFGPFTRNYYVRAVLHLLLSVPAGFLLATILGTACLAIASGIYLLSQVPPARRGNCPPLAVRLLVCVRGKGAALSVYAFRVWKWSSVSSLTDLPPAELSFRTPSCCQVLIWAVALFSGGHPHPPRLPAATHS

SEQ ID NO: 10593 - DNA, 791 bp, Homo sapiens
gcaccctacagatgcgggtctccgcccagccgcggtcacctggggggctgggggcggggcctgggcggggcggggttcggccgggagcgcaggggcggcagtgcgcgcctagcagtgtcccagccgggttcgtgtcgccatggggcagatcgagtgggccatgtgggccaacgaacaggcgctggcgtccggcctgatcctcatcaccgggggcatcgtggccacagctgggcgcttcacccagtggtactttggtgcctactccattgtggcgggcgtgtttgtgtgcctgctggagtacccccgggggaagaggaagaagggctccaccatggagcgctggggacagaagtacatgaccgccgtggtgaagctgttcgggccctttaccaggaattactatgttcgggccgtcctgcatctcctgctctcggtgcccgccggcttcctgctggccaccatccttgggaccgcctgcctggccattgcgagcggcatctacctactggcggctgtgcgtggcgagcagtggacgcccatcgagcccaagccccgggagcggccgcagatcggaggcaccatcaagcagccgcccagcaaccccccgccgcggcccccggccgaggcccgcaagaagcccagcgaggaggaggctgcggtggcggcggggggacccccgggaggtccccaggtcaaccccatcccggtgaccgacgaggtcgtgtgacctcgccccggacctgccctcccgccaggtgcacccacctgcaataaatgcagcgaagccggga

SEQ ID NO: 10594 - protein, 195 aa, Homo sapiens; identical to SEQ ID NO: 1712

SEQ ID NO: 10595 - DNA, 934 bp, Homo sapiens
gccatggggcagatcgagtgggccatgtgggccaacgaacaggcgctggcgtccggcctgatcctcatcaccgggggcatcgtggccacagctgggcgcttcacccagtggtactttggtgcctactccattgtggcgggcgtgtttgtgtgcctgctggagtacccccgggggaagaggaagaagggctccaccatggagcgctggggacagaagtacatgaccgccgtggtgaagctgttcgggccctttaccaggaattactatgttcgggccgtcctgcatctcctgtgagtccccgtcccgcaccccctctagggctcaggagggcttggagccgaccctccccactgtcccaccggccgggctgcctggacaggagccacccccacttacctcagtgtttttccaaacaaaaattcgggtccctggctctggcagggcctgtgtctgctgtctagtgtgcaggatttgtaaggatccactccaaatccgaggagctccgatccgtcgccagggtctggggtcagcatgcactgctggggggtcttgcctgggcttcctggtagggtggagggttccgtgctgtgtgtctgctggttactgccggctgaggccaggacacccacacgtggctgcttcctccgagcaagtgcaccagagccgctagtgtccacatcaaggctgagaacacccaggaccgaaacaagccccggtccgcgcacgtcccctgggtctgcagtctgccttgtcctgagactttgtggccttggcccccagacctggggctccgttcccctttctgagtgcccttctgtgtccctgcctctcacccgctgtcccccaggctctcggtgcccgccggcttcctgctggccaccatccttgggaccgcctgcctggccattgcgagcggcatctacctactggtgag

SEQ ID NO: 10596 - protein, 96 aa, Homo sapiens
MGQIEWAMWANEQALASGLILITGGIVATAGRFTQWYFGAYSIVAGVFVCLLEYPRGKRKKGSTMERWGQKYMTAVVKLFGPFTRNYYVRAVLHLL

SEQ ID NO: 10597 - DNA, 1210 bp, Homo sapiens
cccagccgggttcgtgtcgccatggggcagatcgagtgggccatgtgggccaacgaacaggcgctggcgtccggcctgatcctcatcaccgggggcatcgtggccacagctgggcgcttcacccagtggtactttggtgcctactccattgtggcgggcgtgtttgtgtgcctgctggagtacccccgggggaagaggaagaagggctccaccatggagcgctggtgagtctcctcctgctctggggtctctccgggggctgcggggcccaggcagggctcacagggttgggtggagcttggtttctcacttggaggctccggaaccaaccctttggtgcttgtgggtaaaccaaggccggtgcctgcccggtgtgttttgtgggaggaaagaggcctgggtgccctggggtggtcagcagggcagcaaaggagtcccgagtgggagaggcccagccgcgccgtctcgccttcctccctcccccaggggacagaagtacatgaccgccgtggtgaagctgttcgggccctttaccaggaattactatgttcgggccgtcctgcatctcctgtgagtccccgtcccgcaccccctctagggctcaggagggcttggagccgaccctccccactgtcccaccggccgggctgcctggacaggagccacccccacttacctcagtgtttttccaaacaaaaattcgggtccctggctctggcagggcctgtgtctgctgtctagtgtgcaggatttgtaaggatccactccaaatccgaggagctccgatccgtcgccagggtctggggtcagcatgcactgctggggggtcttgcctgggcttcctggtagggtggagggttccgtgctgtgtgtctgctggttactgccggctgaggccaggacacccacacgtggctgcttcctccgagcaagtgcaccagagccgctagtgtccacatcaaggctgagaacacccaggaccgaaacaagccccggtccgcgcacgtcccctgggtctgcagtctgccttgtcctgagactttgtggccttggcccccagacctggggctccgttcccctttctgagtgcccttctgtgtccctgcctctcacccgctgtcccccaggctctcggtgcccgccggcttcctgctggccaccatccttgggaccgcctgcctggccattgcgagcggcatctacctactgg

SEQ ID NO: 10598 - protein, 68 aa, Homo sapiens
MGQIEWAMWANEQALASGLILITGGIVATAGRFTQWYFGAYSIVAGVFVCLLEYPRGKRKKGSTMERW

SEQ ID NO: 10599 - DNA, 520 bp, Homo sapiens
agtgcgcgcctagcagtgtcccagccgggttcgtgtcgccatggggcagatcgagtgggccatgtgggccaacgaacaggcgctggcgtccggcctgatcctcatcaccgggggcatcgtggccacagctgggcgcttcacccagtggtactttggtgcctactccatgtatccttccacctgaggctggggtgggcggggaacgcccagggcagagctggggagccacttcacagtgagctgtttgcctccgctccccaccaccgcagccaggctgggacacagggtgggctgtgcacgggttgggcagcccaggccccagcagccaggcccctcgccaggaccatgtggcgatcagcggcagacccgccagtctaagtcctggtgagtggtgggcagggggtgtcaccagagggccagggccagcactgaggcctccctgttggactgctgggatcccctctgcccgctcctgtcagtcatcccccttgaccggcccctctacctcctctgccccatc

SEQ ID NO: 10600 - protein, 47 aa, Homo sapiens
MGQIEWAMWANEQALASGLILITGGIVATAGRFTQWYFGAYSMYPST

SEQ ID NO: 10601 - DNA, 956 bp, Homo sapiens
actttttcatcacccctaaaagaaacctgtccccacagcagccacctgccgtctccccctccctgagccctgacggccaggaatgcacttcccatctctggacttgcctgttgtagactgttgtagacgcttagagaaacggatgcattcaccgtgcccctgccctgcttttccaggtttctgaaggggctgcaggtgaggccggcccctctctcagctgagcttcaggctgcgctggccatggagccgacccccggtggggtcaaatacatcattgtcactcaggtggggccagggcctcaaatcctggatgacccctgcgcccacctcctgggtcctgacggcctgccgaagccagctgcctgactgcctcagcagggaccgcatgccgcttggagaaggggtggcctcgccggagctagggagcggatgtggtgggctggccggactcctgggacatgtgggtggtggcttgaccccgggcccatgggcagcttgctgtggggcagtgcagggagtcctgcggccgcccaggtgtcaggagaggtccccgccgagtgcttcagctgccctaagctgcaccagcgctttgccaagatgggatggggagggggtatgagaactggcagagcctcggtgcagcagggctgaagggctttctcaccccagctctggctatgcccagttctctgagaaaggagctcagtggggaggtggtccctccagcggaccagggaaggggtcaccgtgctgggagcagcctccttgggcctcaggaaaccaccaagtgcctcggatggtggctgcccacggcgcttctgctgagaccctgcccccggcccaggtgtctcggagggtggctgcccacggcctgggtgtggctggaatggtggcaggagtgggcaccagtgcggccccggtggccatggggaataaaccagcattgctgcctccgg

SEQ ID NO: 10602 - protein, 41 aa, Homo sapiens
MEPTPGGVKYIIVTQVGPGPQILDDPCAHLLGPDGLPKPAA

SEQ ID NO: 10603 - DNA, 1065 bp, Homo sapiens
gcagacgtgtcaagtaccaggcacttggggtcacagctccactccagtgtggccctgagggcctagactgagctcttggagagcccaaggccgcctggcagaccagagggttggggagacaagggtcaggcaccacgtgaatagccagggtgactgctgtgggttccaggtggcgtacacctttgacgcgggccccaatgccgtgatcttcaccctggacgacactgtggctgagtttgtggctgctgtgtggcacggctttcccccaggctcgaatggagacacgtttctgaaggggctgcaggtgaggccggcccctctctcagctgagcttcaggctgcgctggccatggagccgacccccggtggggtcaaatacatcattgtcactcaggtggggccagggcctcaaatcctggatgacccctgcgcccacctcctgggtcctgacggcctgccgaagccagctgcctgactgcctcagcagggaccgcatgccgcttggagaaggggtggcctcgccggagctagggagcggatgtggtgggctggccggactcctgggacatgtgggtggtggcttgaccccgggcccatgggcagcttgctgtggggcagtgcagggagtcctgcggccgcccaggtgtcaggagaggtccccgccgagtgcttcagctgccctaagctgcaccagcgctttgccaagatgggatggggagggggtatgagaactggcagagcctcggtgcagcagggctgaagggctttctcaccccagctctggctatgcccagttctctgagaaaggagctcagtggggaggtggtccctccagcggaccagggaaggggtcaccgtgctgggagcagcctccttgggcctcaggaaaccaccaagtgcctcggatggtggctgcccacggcgcttctgctgagaccctgcccccggcccaggtgtctcggagggtggctgcccacggcctgggtgtggctggaatggtggcaggagtgggcaccagtgcggccccggtggccatggggaataaaccagcattgctgcctccgg

SEQ ID NO: 10604 - protein, 41 aa, Homo sapiens; identical to SEQ ID NO: 10602

SEQ ID NO: 10605 - DNA, 2644 bp, Homo sapiens
ggaactcacgggatggggacccgctgccctccagcctcagctgcaaggtgcacgtggcatcggtgaacaacttccccacggctgcgggcctggcctcctcagcggcgggctatgcctgcctaggtgggtgcccacagagacccgcaggggttctgggctgtgggcgcaggagccacttcatgctcttcccgggtcagggagcccactgctgggcgtggctaaaagagcatcccctcaccccaggcctccctggcctctctggagttgttcagtctcttcccagagcacatctgaacattttcatcttccagttgcagctggcgtggggctctcgcctgtaatcccagtacttaagaggctgatgggggagaagcactgtaggccaggagttcaagaccagcctgggcaacatagtgagacccccccccatctctacaaaaaataaaaaaatcttcccgttgctgtatgtggagcccctctagattgtcagtgatagaaaccacttcaaactggctcagccctaaaatagcgatgattttgtggctcacgtaactgaggattccaatgggcacagctggttgcaggccccgctggacccagctctctgctggccccaggccacttgctggcagcttcccacccactgtcagagcctgtccccccggtggtggtctcacaccatcttcacccctcaactccaggggtgacgcttcctggcccacctgggctcctgcgccttccctgaaccaccctcggtgaccagggtgggtgaccagacctggaggtggggttgccctgctggagccctgtgggaggaggggagaaggtggctcccgtgctgggtgggcagggggcgcgtcttgtggagtccagctctgtcctggcatcggtccctgccccacacagccttaaaattccttcccaccctcaaagcccagcttgggtgtcctcgggggcctttctcccgccttccatggggcttcctgctctgccgcaggtaccttttgttgcccttgtcgcgggccgcaagctctgcaggccgtgaacagagagtgtccgagagtggaactagcggaggtgggggacagacggctgggccggtgaatgctggcctcaaaggctgatggcccagaagccctgtcatctggaaatccccatttgccgtggggtgtgggacgttcctggggcggtgagctgtcagggagcacagcgcaggcagctctgaggaccctccctgaatccgcatgcctgcagcctacaccctggcccgtgtctacggcgtggagagtgacctctcagaagtggctcgccggggctcaggcagcgcctgccggagcctgtatgggggctttgtggagtggcagatgggagagcaggccgacgggaaggacagcatcgctcggcaagtggcccccgagtcacactggcctgaactccgcgtgctcatccttgtggtgagcgctgagaagaagctgacaggcagtaccgtgggcatgcgggccagtgtggagaccagccccctgcttcggttccgggccgagtccgtggtgcccgcgcgcatggcggagatggcccgctgcatccgggagcgagacttccccagcttcgcccagctgaccatgaaggacagcaaccagttccacgccacctgcctcgacaccttcccgcccatctcttacctcaatgccatctcctggcgcatcatccacctggtgcaccgcttcaacgcccaccacggggacaccaaggtggcgtacacctttgacgcgggccccaatgccgtgatcttcaccctggacgacactgtggctgagtttgtggctgctgtgtggcacggctttcccccaggctcgaatggagacacgtttctgaaggggctgcaggtgaggccggcccctctctcagctgagcttcaggctgcgctggccatggagccgacccccggtggggtcaaatacatcattgtcactcaggtggggccagggcctcaaatcctggatgacccctgcgcccacctcctgggtcctgacggcctgccgaagccagctgcctgactgcctcagcagggaccgcatgccgcttggagaaggggtggcctcgccggagctagggagcggatgtggtgggctggccggactcctgggacatgtgggtggtggcttgaccccgggcccatgggcagcttgctgtggggcagtgcagggagtcctgcggccgcccaggtgtcaggagaggtccccgccgagtgcttcagctgccctaagctgcaccagcgctttgccaagatgggatggggagggggtatgagaactggcagagcctcggtgcagcagggctgaagggctttctcaccccagctctggctatgcccagttctctgagaaaggagctcagtggggaggtggtccctccagcggaccagggaaggggtcaccgtgctgggagcagcctccttgggcctcaggaaaccaccaagtgcctcggatggtggctgcccacggcgcttctgctgagaccctgcccccggcccaggtgtctcggagggtggctgcccacggcctgggtgtggctggaatggtggcaggagtgggcaccagtgcggccccggtggccatggggaataaaccagcattgctgcctccgg

SEQ ID NO: 10606 - protein, 269 aa, Homo sapiens [sequence omitted]

SEQ ID NO: 10607 - DNA, 1844 bp, Homo sapiens
gatcgcgggccgtaagtggctgtggagctggggtcactgcgcggtgggaccatggcctcggagaagccgctggcggcagtcacttgtacagcgccggtcaacatcgcggtcatcaagtactggggcaagcgcgatgaagagctggttctgcccatcaactcctccctgagcgtcactctgcaccaggaccagttaaaaaccaccacaacagccgtcatcagcaaggacttcaccgaggaccggatttggctgaatggccgggaggaggatgtggggcagccgcggctgcaggcctgcctgcgggagatccgctgcctggcccggaagcggaggaactcacgggatggggacccgctgccctccagcctcagctgcaaggtgcacgtggcatcggtgaacaacttccccacggctgcgggcctggcctcctcagcggcgggctatgcctgcctagcctacaccctggcccgtgtctacggcgtggagagtgacctctcagaagtggctcgccggggctcaggcagcgcctgccggagcctgtatgggggctttgtggagtggcagatgggagagcaggccgacgggaaggacagcatcgctcggcaagtggcccccgagtcacactggcctgaactccgcgtgctcatccttgtggtgagcgctgagaagaagctgacaggcagtaccgtgggcatgcgggccagtgtggagaccagccccctgcttcggttccgggccgagtccgtggtgcccgcgcgcatggcggagatggcccgctgcatccgggagcgagacttccccagcttcgcccagctgaccatgaaggacagcaaccagttccacgccacctgcctcgacaccttcccgcccatctcttacctcaatgccatctcctggcgcatcatccacctggtgcaccgcttcaacgcccaccacggggacaccaaggtggcgtacacctttgacgcgggccccaatgccgtgatcttcaccctggacgacactgtggctgagtttgtggctgctgtgtggcacggctttcccccaggctcgaatggagacacgtttctgaaggggctgcaggtgaggccggcccctctctcagctgagcttcaggctgcgctggccatggagccgacccccggtggggtcaaatacatcattgtcactcaggtggggccagggcctcaaatcctggatgacccctgcgcccacctcctgggtcctgacggcctgccgaagccagctgcctgactgcctcagcagggaccgcatgccgcttggagaaggggtggcctcgccggagctagggagcggatgtggtgggctggccggactcctgggacatgtgggtggtggcttgaccccgggcccatgggcagcttgctgtggggcagtgcagggagtcctgcggccgcccaggtgtcaggagaggtccccgccgagtgcttcagctgccctaagctgcaccagcgctttgccaagatgggatggggagggggtatgagaactggcagagcctcggtgcagcagggctgaagggctttctcaccccagctctggctatgcccagttctctgagaaaggagctcagtggggaggtggtccctccagcggaccagggaaggggtcaccgtgctgggagcagcctccttgggcctcaggaaaccaccaagtgcctcggatggtggctgcccacggcgcttctgctgagaccctgcccccggcccaggtgtctcggagggtggctgcccacggcctgggtgtggctggaatggtggcaggagtgggcaccagtgcggccccggtggccatggggaataaaccagcattgctgcctccgg

SEQ ID NO: 10608 - protein, 400 aa, Homo sapiens; identical to SEQ ID NO: 1714

SEQ ID NO: 10609 - DNA, 1266 bp, Homo sapiens
tagaaaccacttcaaactggctcagccctaaaatagcgatgattttgtggctcacgtaactgaggattccaatgggcacagctggttgcaggccccgctggacccagctctctgctggccccaggccacttgctggcagcttcccacccactgtcagagcctgtccccccggtggtggtctcacaccatcttcacccctcaactccaggggtgacgcttcctggcccacctgggctcctgcgccttccctgaaccaccctcggtgaccagggtgggtgaccagacctggaggtggggttgccctgctggagccctgtgggaggaggggagaaggtggctcccgtgctgggtgggcagggggcgcgtcttgtggagtccagctctgtcctggcatcggtccctgccccacacagccttaaaattccttcccaccctcaaagcccagcttgggtgtcctcgggggcctttctcccgccttccatggggcttcctgctctgccgcaggtaccttttgttgcccttgtcgcgggccgcaagctctgcaggccgtgaacagagagtgtccgagagtggaactagcggaggtgggggacagacggctgggccggtgaatgctggcctcaaaggctgatggcccagaagccctgtcatctggaaatccccatttgccgtggggtgtgggacgttcctggggcggtgagctgtcagggagcacagcgcaggcagctctgaggaccctccctgaatccgcatgcctgcagcctacaccctggcccgtgtctacggcgtggagagtgacctctcagaagtggctcgccggggctcaggcagcgcctgccggagcctgtatgggggctttgtggagtggcagatgggagagcaggccgacgggaaggacagcatcgctcggcaagtggcccccgagtcacactggcctgaactccgcgtgctcatccttgtggtgagcgctgagaagaagctgacaggcagtaccgtgggcatgcgggccagtgtggagaccagccccctgcttcggttccgggccgagtccgtggtgcccgcgcgcatggcggagatggcccgctgcatccgggagcgagacttccccagcttcgcccagctgaccatgaaggacagcaaccagttccacgccacctgcctcgacaccttcccgcccatctcttacctcaatgccatctcctggcgcatcatccacctggtgcaccgcttcaacgcccaccacggggacaccaaggtgacgcgggc

SEQ ID NO: 10610 - protein, 170 aa, Homo sapiens
MPAAYTLARVYGVESDLSEVARRGSGSACRSLYGGFVEWQMGEQADGKDSIARQVAPESHWPELRVLILVVSAEKKLTGSTVGMRASVETSPLLRFRAESVVPARMAEMARCIRERDFPSFAQLTMKDSNQFHATCLDTFPPISYLNAISWRIIHLVHRFNAHHGDTKVT

SEQ ID NO: 10611 - DNA, 714 bp, Homo sapiens
gcgggccgtaagtggctgtggagctggggtcactgcgcggtgggaccatggcctcggagaagccgctggcggcagtcacttgtacagcgccggtcaacatcgcggtcatcaagtactggggcaagcgcgatgaagagctggttctgcccatcaactcctccctgagcgtcactctgcaccaggaccagttaaaaaccaccacaacagccgtcatcagcaaggacttcaccgaggaccggatttggctgaatggccgggaggaggatgtggggcagccgcggctgcaggcctgcctgcgggagatccgctgcctggcccggaagcggaggaactcacgggatggggacccgctgccctccagcctcagctgcaaggtgcacgtggcatcggtgaacaacttccccacggctgcgggcctggcctcctcagcggcgggctatgcctgcctagcctacaccctggcccgtgtctacggcgtggagagtgacctctcagaagtggctcgccggggctcaggcagcgcctgccggagcctgtatgggggctttgtggagtggcagatgggagagcaggccgacgggaaggacagcatcgctcggcaagtggcccccgagtcacactggcctgaactccgctgctcaggaaccgaggtgagcgctgagaagaagctgacaggcagtaccgtgggcatgcgggccagtgtggagaccagcc

SEQ ID NO: 10612 - protein, 221 aa, Homo sapiens
MASEKPLAAVTCTAPVNIAVIKYWGKRDEELVLPINSSLSVTLHQDQLKTTTTAVISKDFTEDRIWLNGREEDVGQPRLQACLREIRCLARKRRNSRDGDPLPSSLSCKVHVASVNNFPTAAGLASSAAGYACLAYTLARVYGVESDLSEVARRGSGSACRSLYGGFVEWQMGEQADGKDSIARQVAPESHWPELRCSGTEVSAEKKLTGSTVGMRASVET

SEQ ID NO: 10613 - DNA, 897 bp, Homo sapiens
gcgggccgtaagtggctgtggagctggggtcactgcgcggtgggaccatggcctcggagaagccgctggcggcagtcacttgtacagcgccggtcaacatcgcggtcatcaagtactggggcaagcgcgatgaagagctggttctgcccatcaactcctccctgagcgtcactctgcaccaggaccagttaaaaaccaccacaacagccgtcatcagcaaggacttcaccgaggaccggatttggctgaatggccgggaggaggatgtggggcagccgcggctgcaggcctgcctgcgggagatccgctgcctggcccggaagcggaggaactcacgggatggggacccgctgccctccagcctcagctgcaaggtgcacgtggcatcggtgaacaacttccccacggctgcgggcctggcctcctcagcggcgggctatgcctgcctagcctacaccctggcccgtgtctacggcgtggagagtgacctctcagaagtggctcgccggggctcaggcagcgcctgccggagcctgtatgggggctttgtggagtggcagatgggagagcaggccgacgggaaggacagcatcgctcggcaagtggcccccgagtcacactggcctgaactccgcgtgctcatccttgtggtgagtggggtggggcgggtggagcagcagcccggtggcctctgtccctagtcagggctgctgccgggagcaggagcgaaggcgtccatccaggctttgcttggctcctggggtcagcgggggctgaaggaacagaagcgtggttgagtgctcaggaaccgctcccatgcggcgggcgccaccacccgctgggatctggaagttgcccctgcgtcacccctgctgtggccgggaggcctctgtggtc

SEQ ID NO: 10614 - protein, 217 aa, Homo sapiens
MASEKPLAAVTCTAPVNIAVIKYWGKRDEELVLPINSSLSVTLHQDQLKTTTTAVISKDFTEDRIWLNGREEDVGQPRLQACLREIRCLARKRRNSRDGDPLPSSLSCKVHVASVNNFPTAAGLASSAAGYACLAYTLARVYGVESDLSEVARRGSGSACRSLYGGFVEWQMGEQADGKDSIARQVAPESHWPELRVLILVVSGVGRVEQQPGGLCP

SEQ ID NO: 10615 - DNA, 988 bp, Homo sapiens
cagaggcctctggggtgggatcgcgggccgtaagtggctgtggagctggggtcactgcgcggtgggaccatggcctcggagaagccgctggcggcagtcacttgtacagcgccggtcaacatcgcggtcatcaagtactggggcaagcgcgatgaagagctggttctgcccatcaactcctccctgagcgtcactctgcaccaggaccagttaaaaaccaccacaacagccgtcatcagcaaggacttcaccgaggaccggatttggctgaatggccgggaggaggatgtggggcagccgcggctgcaggcctgcctgcgggagagtgagctggggtccccataagcccatccctccctgttgtcagcagggtccgagcatccagaaagtgcttctgcctctgtgcccctcctgaggcagcaggcggggtggctgggaaccagacatgcccgctgggccgccagctccagggcagtggcccacctcaatgaccagctgggcttgggtcagtctggggttttcccgggtaagaaactctccacgaggagtctggcaggcagaggcctggtgttcagctgtgaccccgggcaggtgggcaggagcagggcgggcagggtgctgacggctgggccacacgctgtctcattgtctctgcagtccgctgcctggcccggaagcggaggaactcacgggatggggacccgctgccctccagcctcagctgcaaggtgcacgtggcatcggtgaacaacttccccacggctgcgggcctggcctcctcagcggcgggctatgcctgcctagcctacaccctggcccgtgtctacggcgtggagagtgacctctcagaagtggctcgccggggctcaggcagcgcctgccggagcctgtatgggggctttgtggagtggcagatgggagagcaggccgacgggaaggacagcatcgctcggcaagtggcccccgagtcacactggcctgaactccg

SEQ ID NO: 10616 - protein, 91 aa, Homo sapiens
MASEKPLAAVTCTAPVNIAVIKYWGKRDEELVLPINSSLSVTLHQDQLKTTTTAVISKDFTEDRIWLNGREEDVGQPRLQACLRESELGSP

SEQ ID NO: 10617 - DNA, 774 bp, Homo sapiens
cggtgggaccatggcctcggagaagccgctggcggcagtcacttgtacagcgccggtcaacatcgcggtcatcaagtactagatggggtttcaccgtgttagccaggctggtctgaagctcctgacctcgtgatctgcccacctcagcctcccaaagtgctgggattacagactgtcactgcgacacccaggctggagtgcaatggcgtgatctcggctcactgcaacctccgcttcccgggttcaaccgattctcctgcctcagcctctcgagtagctgggactacagggggcaagcgcgatgaagagctggttctgcccatcaactcctccctgagcgtcactctgcaccaggaccagttaaaaaccaccacaacagccgtcatcagcaaggacttcaccgaggaccggatttggctgaatggccgggaggaggatgtggggcagccgcggctgcaggcctgcctgcgggagatccgctgcctggcccggaagcggaggaactcacgggatggggacccgctgccctccagcctcagctgcaaggtgcacgtggcatcggtgaacaacttccccacggctgcgggcctggcctcctcagcggcgggctatgcctgcctagcctacaccctggcccgtgtctacggcgtggagagtgacctctcagaagtggctcgccggggctcaggcagcgcctgccggagcctgtatgggggctttgtggagtggcagatgggagagcaggccgacgggaaggacagcatcgctcggcaa

SEQ ID NO: 10618 - protein, 47 aa, Homo sapiens
MAGRRMWGSRGCRPACGRSAAWPGSGGTHGMGTRCPPASAARCTWHR

SEQ ID NO: 10619 - DNA, 285 bp, Homo sapiens
gtacagcgccggtcaacatcgcggtcatcaagtactggcctcgacagacggggaaactgaggctcagggaggggcgcggcggtggtcgggcggggccgcgcgctccttcgcgtgacaagctcggcgccacccgttcccccgcgacggctgccgcccctgcagggtcgcccggcgcctgcccattagcgattaccgaactatcgaaatcatcaatcatcgattcccatgaatcaagccgccaccacgactggctaatttttttgtgtttcccttaccaataaagct

SEQ ID NO: 10620 - protein, 92 aa, Homo sapiens
TAPVNIAVIKYWPRQTGKLRLREGRGGGRAGPRAPSRDKLGATRSPATAAAPAGSPGACPLAITELSKSSIIDSHESSRHHDWLIFLCFPYQ

SEQ ID NO: 10621 - DNA, 2212 bp, Homo sapiens
atggacgggatcggacgatgggttgctgacgtaggtccgccccacccgcagggtgcgctcgccaggcctggggcgtggtgttgtctgcgcaggcgccgtgtgcccaggcgcctggcgtccgcgtcggcgatccggggtctgggcgcggcgaggtctggtgtggcagatgtggatagctggaccctcctgggtgcctctgcgttatgtcgtttggttgatgcatttggagagaatctgtgctctccacaactgcaggggcaacatgctttcctggcctcttcagatcagggtggctgttcttgggtgctgcaccaaaactccagcagtgggctttcttcaagtggccggctcacctcattcctgccaagacccaggtccgtgttctcacagtgctgccatctttcctccgtgtgagcgtgggctgtgcggagagtggacctcggtgtgtgcggggctgcgtgcactgccatcgctccctctacacgagccggcgtggacccagggctgagctgtgaccacgagggccatcccgacgagccgccatggacccagggctgagctgtgaccatgagggctatcccgacgagctgccgtggacccagggctgagccgtgaccatgagggccatcccgaaactgtgattgttttctgatgaagaaaccaaggctttgtgactaactcaacccctcaagaaggacaaaactagcatcagagccccttgctcctgggtctggcaagaatgcctcttgtttgctgagaggtccacagatttacccggctcaagactgggagatgggaggtgaccaggtcagtgccagcctctctctgagctcctctgagtcgtggcagctgaggtgctcctccgagaatgttctgccatccgcgaggtcgtgtacgcctggaagcttttgttccattgaactctgccagggagctatacttagccacgcgagtggaggccaggagtgggttctctgaatatagatagtagcaagcaggctattttcaaacacctagagaacccccatgattattctgggccaaaatgatatttataggatgctctgggcccttggacatgaaggcaataaccttagcgccttttggcgttcgggataagtttctatcaacggggagtggagagagggacccggtcacccagaggcccgctgtccctcaacacctgtttccaggaggccaggcgtcttctttgcttttacactatgagtcagagaacagcgagaggcacgcagggccctactaattttccttcctgcacaccctggtgtgggtcctgtctgaggcctgccgtgtgctattagggaagacgtcatcaggggactttttctgctgtgaggagggtgcagcccctgcctttcagagctcaggacaccctcttcctcttgtccaggatcctcagggatttcctaggcttccaccctcacccagacatcactggaccgtcactgaaacacccgcttccagtgtgctcaggtcctgcagcctcctgtccatccttgccccgcctcccgcccggaggaaagactctgacactgcccctggaagagggaggagagtggatgtgatgagtgaagatttgggtggggaaaggaaggcctgagtcctgggaggaagagctctccccgccccgagcccccggagactgtgagcaaggctgagacgcctccttcctggtgctcaagctgcaggtgttggataggcctccagaagcccagattttaaatgaccgctccaggttaacctggggatggtcaggcagaacaaggaggagaggccagcagtgaagggcagggctggtgggcagtggctgggggtgtcctgggtggggctggccaccctcgctgcctctgacttgggccagacctgcgttaagtggagtggctcctccattctttacaccccaggcccctggcaggtgccctgcctttcctctgcccctctctctgccaacccatcctctccctcccagcccctgcccgcccagatataaatataagagcattttccatgggctgagacagaagggaaaacattcagctttattttcggcttgtgaaattcctgtccttcattcccaacaggtgcaatcgcctcatttagatattgggacccagaaatagaagacaatttacaatatagcttcctttagggatctggatgctaccaaacaaacaaacaaacaaaaaaagcc

SEQ ID NO: 10622 - protein, 137 aa, Homo sapiens
MDGIGRWVADVGPPHPQGALARPGAWCCLRRRRVPRRLASASAIRGLGAARSGVADVDSWTLLGASALCRLVDAFGENLCSPQLQGQHAFLASSDQGGCSWVLHQNSSSGLSSSGRLTSFLPRPRSVFSQCCHLSSV

SEQ ID NO: 10623 - DNA, 2553 bp, Homo sapiens
atggacgggatcggacgatgggttgctgacgtaggtccgccccacccgcagggtgcgctcgccaggcctggggcgtggtgttgtctgcgcaggcgccgtgtgcccaggcgcctggcgtccgcgtcggcgatccggggtctgggcgcggcgaggtctggtgtggcagatgtggatagctggaccctcctgggtgcctctgcgttatgtcgtttggttgatgcatttggagagaatctgtgctctccacaactgcaggggcaacatgctttcctggcctcttcagatcagggtggctgttcttgggtgctgcaccaaaactccagcagtgggctttcttcaagtggccggctcacctcattcctgccaagacccaggtccgtgttctcacagtgctgccatctttcctccgtgtgagcgtgggctgtgcggagagtggacctcggtgtgtgcggggctgcgtgcactgccatcgctccctctacacgagccggcgtggacccagggctgagctgtgaccacgagggccatcccgacgagccgccatggacccagggctgagctgtgaccatgagggctatcccgacgagctgccgtggacccagggctgagccgtgaccatgagggccatcccgaaactgtgattgttttctgatgaagaaaccaaggctttgtgactaactcaacccctcaagaaggacaaaactagcatcagagccccttgctcctgggtctggcaagaatgcctcttgtttgctgagaggtccacagatttacccggctcaagactgggagatgggaggtgaccaggtcagtgccagcctctctctgagctcctctgagtcgtggcagctgaggtgctcctccgagaatgttctgccatccgcgaggtcgtgtacgcctggaagcttttgttccattgaactctgccagggagctatacttagccacgcgagtggaggccaggagtgggttctctgaatatagatagtagcaagcaggctattttcaaacacctagagaacccccatgattattctgggccaaaatgatatttataggatgctctgggcccttggacatgaaggcaataaccttagcgccttttggcgttcgggataagtttctatcaacggggagtggagagagggacccggtcacccagaggcccgctgtccctcaacacctgtttccaggaggccaggcgtcttctttgcttttacactatgagtcagagaacagcgagaggcacgcagggccctactaattttccttcctgcacaccctggtgtgggtcctgtctgaggcctgccgtgtgctattagggaagacgtcatcaggggactttttctgctgtgaggagggtgcagcccctgcctttcagagctcaggacaccctcttcctcttgtccaggatcctcagggatttcctaggcttccaccctcacccagacatcactggaccgtcactgaaacacccgcttccagtgtgctcaggtcctgcagcctcctgtccatccttgccccgcctcccgcccggaggaaagactctgacactgcccctggaagagggaggagagtggatgtgatgagtgaagatttgggtggggaaaggaaggcctgagtcctgggaggaagagctctccccgccccgagcccccggagactgtgagcaaggctgagacgcctccttcctggtgctcaagctgcaggtgttggataggcctccagaagcccagattttaaatgaccgctccaggttaacctggggatggtcaggcagaacaaggaggagaggccagcagtgaagggcagggctggtgggcagtggctgggggtgtcctgggtggggctggccaccctcgctgcctctgacttgggccagacctgcgttaagtggagtggctcctccattctttacaccccaggcccctggcaggtgccctgcctttcctctgcccctctctctgccaacccatcctctccctcccagcccctgcccgcccagatataaatataagagcattttccatgggctgagacagaagggaaaacattcagctttattttcggcttgtgaaattcctgtccttcattcccaacaggtgcaatcgcctcatttagatattgggacccagaaatagaagacaatttacaatatagcttcctttagggatctggatgctaccaaacaaacaaacaaacaaaaaaagccctcctgtgagatgccgagacttaatagaaaccgtggttggagctcttgcctttttccaggccggtggagaccctcacccctggcagcctgaccgtgaagcagaggaggcaagagctccgggagacagtcgggagggagggggccctggaggacaggctcctagccctactcctcctcaagacccgggtgctggcctgtcccctgcctttgccccgatggggatgagggagaggagatgggtcagggaacagctatggccattggggaaggtgacttggatgcaacctttgaaagagatgcttccagtaaaccccatcggttaagatcagctgtcccccatg

SEQ ID NO: 10624 - protein, 137 aa, Homo sapiens; identical to SEQ ID NO: 10622

SEQ ID NO: 10625 - DNA, 4925 bp, Homo sapiens
aggcgcctggcgtccgcgtcggcgatccggggtctgggcgcggcgaggtctggtgtggcagatgtggatagctggaccctcctgggtgcctctgcgttatgtcgtttggttgatgcatttggagagaatctgtgctctccacaactgcaggggcaacatgctttcctggcctcttcagatcagggtggctgttcttgggtgctgcaccaaaactccagcagtgggctttcttcaagtggccggctcacctcattcctgccaagacccaggtccgtgttctcacagtgctgccatctttcctccgtgtgagcgtgggctgtgcggagagtggacctcggtgtgtgcggggctgcgtgcactgccatcgctccctctacacgagccggcgtggacccagggctgagctgtgaccacgagggccatcccgacgagccgccatggacccagggctgagctgtgaccatgagggctatcccgacgagctgccgtggacccagggctgagccgtgaccatgagggccatcccgaaactgtgattgttttctgatgaagaaaccaaggctttgtgactaactcaacccctcaagaaggacaaaactagcatcagagccccttgctcctgggtctggcaagaatgcctcttgtttgctgagaggtccacagatttacccggctcaagactgggagatgggaggtgaccagggtctcggtctgtcgcccaggctgagtgcagtggtgtgatcttggctcactgcaacctccacctcctgggcacaagcaatcctcctgcctcagcctcctggatagctcagactacaggggtgtgccaccatacccagctcattcttttgtatttttagtagagacagagttttgccatgttgcccaggctggtctcaaactcctgggctcaagtgatccacccgccttggcctcccacagggctgggattacaggagtgaactcccatgcctggccctcatgatcctttgtagactgagggacaaaagaagagggtgaggcctcccctctcctcagcgctgagtgcaaggaccctcaaggcaactcttggcaaagccccatgtttccactggctgtttaggtggaattgcgtccccccgcttccgtatgttgaagtcctaattttcgggccctccgcttgtgaccatatttggaagtagaggctttgcagatgtcatgagttaagatgggggcctcctggagcagggcaacatgactgtatcctcataagaagaggagagacagaaacagacacacacagggagatgccacgggactcccaaagccacaagaaagcctggaacagccccgccctcacagcctctgaaggaaccagccctgccttcacctggatctgggacttccagcctccaggactgggggagaatgaaactctgttgtttcggccactcaggctggggtgctttgttatggcagctgagtgggtgcctccctctctggggacggccaatccctgtaggggaggcagtggtcccggtccaggaaggtgagagaggctttctcagtgtcttcacttcgccagctcacgtggagactggtagcggctggagcccaagctcttctggggagccggtttactcaaggtcacccttgatccagcggagcccaaggtctaggtcaagcttcctctgggatgtccccaaggctcttcaaacaggtgtcgtcaagccatctgcccaagggcccgtcagcacctggcaggtgttagccaggctgatctgcaggcggggctgccccgagtggggctcccactgcccgggttgggactggagcagccaagtggctgagcaacaaggtgcttcatgtgtggtccctgtgagcccccctgaatagtctcatggacagacggatggacgggaggctcagtgggctctgggagcaaggggagcgcttgccgctctccacgtggctccattccaggaccaggacaatgatgtcttcctgtctgcagccagaagcagggcagctgacagcggcccagccctcctgagggacaggtgtccgctcccagaaacctcccttccaccatccccatcagcgaaggtgtcagggactaggaggggcctccttgctccttcctggacgctgcccctggggttgagctggagaggctgagacatgctgggaagaggaggaccagcccagtgggcggccgcccaacagctcggcggtgagaagaggccacgtgtaagaaggaaacgccaccaccccactggatggtgggagcaggactccagggaggggggtcttgagtgtaggcaaccatgtcgatttggcacagtgtctcaacagggcagggcaagggtctgggattccagttcacggatgccccaggtaccatgggtggacagaggcccagaccctctgcaagacagcagtgatcatgtcagaccctcgcagcgcttgagggctgcagcaggagccctgagtcctctgttctgaccaggcagcagggaggactcgctgcccccagctgcacaacgcctgccccggccttggtcttggccctctacccggcaccagctggagcctcttggccattcctctgtgccatgggacactctcccactcctgcgctggcttctgcccacagtggcgcccctgctcacccactggcagtgtccccacctctcagaagagtttttcacagtggcaggccctgacccagagtctcctgcctacttggtggctaaaggccccaggcgatccccaaatcctgctgtctcagggagtttctcagagtcccacctcctccacagaaccaggggattggccaagactcaaagcttcgaagaacggaacatgcaggtgtgcagagaccatttattaccccacggctgttattgcctgggaagctgagtgccctgagaccccagccccctgaggctctgaccgggacaaatcccacaggcactccgcctcatcccaacacacccaaatcaccaatcgtgggctctcccagtcctgccccatctcccggagagtctagtgaggtggggagggcacgtgtgtgtacatgtttgagtgtgtgtgcacatgcacatagacgtgtgacatggggcagctcgtcccagaccccaaaccaaaggctggcgggggctggctgagaggtagttgtgcctactgaggaagggccacagggcggtgctcactataagtcagaactgttcatttctgctgcaatggaactaggcagccttgccagccatccggcggcagtgccggcccatgctggcggccacctccccgaggctctgactcttggaagggtagccccggagacctggccgtgtcgaaatggaaccatggctcttgttctgatgaaagccttccccgggagaggagtctcctctgagtgggctccgcgcggtgggatgcctgggggagtgtcctccggcccagtggcccccgctggacttctttggttctgattggacgcagatgtggaggacgcaccaagtgtgaggccaggccccgccctcccagactcctggctcctctgggggcaggagggacgccagctctcccggtgaggaccatccctcctacctgcgccgaccacgtgcctctcaggggcccgggcagcagccagactcctcatgccgcgccaggagggacatgcgggagaaggtcttggtgcagcgccggcaccggtacttcttggcgtctgagtgcgtttgcagatgggcccgaaggttggagcggtcggcaaaggccctgctgcagtgcgagcaggcatagggcttctcccctgtgggaggaaggcggcggccagtgacaccatggaagatggagtgaaggctaaagcacccaccctgcccatcaatggatactcccatcccttccccacaaatgctcacagccagagcacccaaggttgagctgtgtggggacggggtggcacgccacatcacctgaagcccctcccaggagcacaggcagccacaggtgctagatctcctagtgttgctgcagtagccctcccggggcccttggccactgggagaggacgggagaagcactgggggcctctggcagctgtttctggccactcacaggcaagtgggggggtctggccagctccagcagaatccagggcaggggcagagctgtggaccttgaggaggcagaatttaggaaccacctcccatcaggacaacaggggatctggacaaagtcctgctgggaccttggcccaacacctgtaaagggaagtgtgactgggaatcgtttgttcattcctgtagccccatagagtcctgagagacctcagcctgcagcccctgaggggcccagagcacctgcattcctgctggtgggacactgggcatgctcctggccaggccagcctcccgcagggcctccccacactcctcactcccaggctgagggcaccaagccccagggccctttggcacggaaagggggtgtgtggggggtgtcgtcatcaaagagttgagaaaaaccagaaaggatttcccagagacctggaaaaggccttccctctggcctgcacccaggtgtgactcagagggtcccagtcacaaaagtcatgacttagggggtagggaacctccagttagaaaaagtatgaactagcaggccgggcgcagtggctcacacctgtaatcccagcactttgggaggccgaggcgggtggatcacgaggtcaggagatcgagaccatcctggctaacatggtgaaaaccccatctctactaaaaacacaaaaaatcagctgggcgtggtggcaggtgtctgtagtcccggctactcgggaggctgaggcaggagaatggcatgaacccaggaggcggggcttgcagtgagctgacatagagccactatggtccggcctgggcaaaagagtgagactctgtctc

SEQ ID NO: 10626 - protein, 113 aa, Homo sapiens
MWIAGPSWVPLRYVVWLMHLERICALHNCRGNMLSWPLQIRVAVLGCCTKTPAVGFLQVAGSPHSCQDPGPCSHSAAIFPPCERGLCGEWTSVCAGLRALPSLPLHEPAWTQG

SEQ ID NO: 10627 - DNA, 903 bp, Homo sapiens
aggtctggtgtggcagatgtggatagctggaccctcctgggtgcctctgcgttatgtcgtttggttgatgcatttggagagaatctgtgctctccacaactgcaggggcaacatgctttcctggcctcttcagatcagggtggctgttcttgggtgctgcaccaaaactccagcagtgggctttcttcaagtggccggctcacctcattcctgccaagacccaggtccgtgttctcacagtgctgccatctttcctccgtgtgagcgtgggctgtgcggagagtggacctcggtgtgtgcggggctgcgtgcactgccatcgctccctctacacgagccggcgtggacccagggctgagctgtgaccacgagggccatcccgacgagccgccatggacccagggctgagctgtgaccatgagggctatcccgacgagctgccgtggacccagggctgagccgtgaccatgagggccatcccgaaactgtgattgttttctgaatgtggaagcgtcggccgagcgcggtccttggagaacccttgctgcggagaatgacgctcactctgcggcctggcctcgcctccccatcccttctgcaaactcacaggacaggattgatggggagagcccaggcgaaacgaagctgaccctagtgaccagccctactggcggctctggaacaggcccgggaccggtggcctggagacagtggtcctttctggatgggctgcagtctccgaaggcttcccccactggagtcagccctttaggagtttgtccagtgcctccagaaagctgttttttgggggacggaggacttggcctggaattctggaattcccagggggtcagacatggttatgggaagtttaataaaaccggtgaatcacgtgaattctgc

SEQ ID NO: 10628 - protein, 113 aa, Homo sapiens; identical to SEQ ID NO: 10626

SEQ ID NO: 10629 - DNA, 768 bp, Homo sapiens
ggatagctggaccctcctgggtgcctctgcgttatgtcgtttggttgatgcatttggagagaatctgtgctctccacaactgcaggggcaacatgctttcctggcctcttcagatcagggtggctgttcttgggtgctgcaccaaaactccagcagtgggctttcttcaaggcaggggttcctaacatctacatcggtcattcggacagccttgcttttggttcactgccttacacggggcttccagatgttgacctgcttcattttacagtatcaggaaatcactttcccctcagaaatggccggctcacctcattcctgccaagacccaggtccgtgttctcacagtgctgccatctttcctccgtgtgagcgtgggctgtgcggagagtggacctcggtgtgtgcggggctgcgtgcactgccatcgctccctctacacgagccggcgtggacccagggctgagctgtgaccacgagggccatcccgacgagccgccatggacccagggctgagctgtgaccatgagggctatcccgacgagctgccgtggacccagggctgagccgtgaccatgagggccatcccgaaactgtgattgttttctgatgaagaaaccaaggctttgtgactaactcaacccctcaagaaggacaaaactagcatcagagccccttgctcctgggtctggcaagaatgcctcttgtttgctgagaggtccacagatttacccggctcaagactgggagatgggaggtgaccaggtc

SEQ ID NO: 10630 - protein, 72 aa, Homo sapiens
MLTCFILQYQEITFPSEMAGSPHSCQDPGPCSHSAAIFPPCERGLCGEWTSVCAGLRALPSLPLHEPAWTQG

SEQ ID NO: 10631 - DNA, 517 bp, Homo sapiens
ctcctgggtgcctctgcgttatgtcgtttggttgatgcatttggagagaatctgtgctctccacaactgcaggggcaacatgctttcctggcctcttcagatcagggtggctgttcttgggtgctgcaccaaaactccagcagtgggctttcttcaagtggccggctcacctcattcctgccaagacccaggtccgtgttctcacagtgctgccatctttcctccgtgtgagcgtgggctgtgcggagagtggacctcggtgtgtgcggggctgcgtgcactgccatcgctccctctacacgagccggcgtggacccagggctgagctgtgaccacgagggccatcccgacgagccgccatggacccagggctgagctgtgaccatgagggctatcccgacgagctgccgtggacccagggctgagccgtgaccatgagggccatcccgaaactgtgattgttttctggtatgtgggggatgtgccagaaccagggctgagctgtgaccacgagggc

SEQ ID NO: 10632 - protein, 96 aa, Homo sapiens
MHLERICALHNCRGNMLSWPLQIRVAVLGCCTKTPAVGFLQVAGSPHSCQDPGPCSHSAAIFPPCERGLCGEWTSVCAGLRALPSLPLHEPAWTQG

SEQ ID NO: 10633 - DNA, 518 bp, Homo sapiens
ccagaagcccagattttaaatgaccgctccaggttaacctggggatggtcaggcagaacaaggaggagaggccagcagtgaagggcagggctggtgggcagtggctgggggtgtcctgggtggggctggccaccctcgctgcctctgacttgggccagacctgcgttaagtggagtggctcctccattctttacaccccaggcccctggcaggtgccctgcctttcctctgcccctctctctgccaacccatcctctccctcccagcccctgcccgcccagatataaatataagagcattttccatgggctgagaagtcgggagggagggggccctggaggacaggctcctagccctactcctcctcaagacccgggtgctggcctgtcccctgcctttgccccgatggggatgagggagaggagatgggtcagggaacagctatggccattggggaaggtgacttggatgcaacctttgaaagagatgcttccagtaaaccccatcggttaagatca

SEQ ID NO: 10634 - protein, 80 aa, Homo sapiens
MVRQNKEERPAVKGRAGGQWLGVSWVGLATLAASDLGQTCVKWSGSSILYTPGPWQVPCLSSAPLSANPSSPSQPLPAQI

SEQ ID NO: 10635 - DNA, 1732 bp, Homo sapiens
cttcaagcgccggcggacgcagcagtccggacccaggcgcgcccctcccgccccagcccaccccggcctgccgcccgggaggggaacatgccgcgctccttcctggtgaaaacgcactccagccacagggtccccaactaccggcggctggagacgcagagagaaatcaatggtgcctgctctgcctgtggggggctggtggtgcccctcctcccccgagacaaggaggccccttctgtgcccggtgaccttccccagccctgggaccgctcctcggccgtcgcctgcatctccctgcccctcctgccacggatcgaggaagctctgggggcctctgggctggacgccttggaagtcagcgaggtcgaccctcgggccagccgggccgccattgtacccctcaaagacagcctgaaccacctcaacctgcccccactgctggtgctgcccacacggtggtccccgaccttgggcccagaccggcacggggctccggaaaaactgcttggggctgagcggatgccccgagccccgggcggctttgagtgcttccactgccacaaaccctaccacacgctggccgggctggccaggcaccggcagctgcactgccacctgcaggtggggcgtgtcttcacctgcaagtactgcgacaaggagtacaccagcctgggtgccctcaagatgcacatccgcactcacacgctgccctgcacctgcaagatctgtggcaaggccttctccaggccctggttactgcagggccatgtccgcacccacacaggggagaagccctatgcctgctcgcactgcagcagggcctttgccgaccgctccaaccttcgggcccatctgcaaacgcactcagacgccaagaagtaccggtgccggcgctgcaccaagaccttctcccgcatgtccctcctggcgcggcatgaggagtctggctgctgcccgggcccctgagaggcacgtggtcggcgcaggtaggagggatggtcctcaccgggagagctggcgtccctcctgcccccagaggagccaggagtctgggagggcggggcctggcctcacacttggtgcgtcctccacatctgcgtccaatcagaaccaaagaagtccagcgggggccactgggccggaggacactcccccaggcatcccaccgcgcggagcccactcagaggagactcctctcccggggaaggctttcatcagaacaagagccatggttccatttcgacacggccaggtctccggggctacccttccaagagtcagagcctcggggaggtggccgccagcatgggccggcactgccgccggatggctggcaaggctgcctagttccattgcagcagaaatgaacagttctgacttatagtgagcaccgccctgtggcccttcctcagtaggcacaactacctctcagccagcccccgccagcctttggtttggggtctgggacgagctgccccatgtcacacgtctatgtgcatgtgcacacacactcaaacatgtacacacacgtgccctccccacctcactagactctccgggagatggggcaggactgggagagcccacgattggtgatttgggtgtgttgggatgaggcggagtgcctgtgggatttgtcccggtcagagcctcagggggctggggtctcagggcactcagcttcccaggcaataacagccgtggggtaataaatggtctctgcacacctgca

SEQ ID NO: 10636 - protein, 292 aa, Homo sapiens; identical to SEQ ID NO: 1716

SEQ ID NO: 10637 - DNA, 1528 bp, Homo sapiens
cccgacgttgccacatctcaggtgaataagttctatgaagcgctcacactagtgaccctggcaaagatgagagtgcacatttcgtcctgcctgaaggtccaggagcagatggccaactgccccaagttcgtccccgtggtgcccacatcacagcctatccccagcaacatccccaacaggtccaccttcgcctgcccgtactgtggtgcccgcaacctggaccagcaggagctggtgaagcactgtgtggaaagccaccgcagcgaccccaaccgcgtggtgtgccccatctgctcggcaatgccctggggggaccccagctacaagagcgccaacttcctgcagcacctgcttcaccgacacaagttctcctacgacacctttgtggactacagtattgacgaggaggccgccttccaggctgctctggccctgtctctctctgagaactgaagggaagcgcagccacccgcctgcgtctggggtcagggatgtccccgctcctgtgtcgcacctggcacctgctcgggagcgcacctcaccggactgagctcacaggaggagcctgcacccgcgcagaaggggagccggggccgagcctccgggcctgaatacgggccagccgccgaggccgccagagcagggccgcctggtcccaccggcgtcgctgggttcttcggtgcttctggccgagcaggcggcctacttgggcagggctggacgctgggacctggagctgccgccgtctcttcaaagccatgataccccctcgtgggaagaagggaccgacgcgcgagtcgcgctccgcagtcgagccgggaggaacccaggctgctgccctgcccagcccgaccctgccccggccccacttccaccttgcgcatttggtactggcttttgtgatacttaggaaccctggcatcttttctatattatccagtgtgataatcttttcacgttttatagagcaaagacagagcagttactcttcatattgcaatatctgtgtttgactaggaataatagtatttttatggaacatttacaaaattatattttttaagaaaacaatcaaaacaagcattgggggattggggcaaggatggaaggagcagtggggcagctgccagagctcaggcgagccatggggtctgctgtggggtctgccctggccacccactgtgtgtctgggtccttgaggtttgtacgtttctctttgatgaccaggaagaaatcccagcaccccagccacaggctgtggctgctcccagcagaggcggggccggcagagaaggggcctcctccacccagagtcctggccttggcccgctgtcaccttcaaagctgactgtgccccgctgcgggaggggacggcaccccagtggtggcagagcttgggggcctgggcaggggcccgcttggcgggccgggcaacacgtcaacattcttttctgttcttggcattaattattgctgtcttttttttaaaaaaaaaagtttaaataaaatgtctcagagcatctctagc

SEQ ID NO: 10638 - protein, 128 aa, Homo sapiens
MRVHISSCLKVQEQMANCPKFVPVVPTSQPIPSNIPNRSTFACPYCGARNLDQQELVKHCVESHRSDPNRVVCPICSAMPWGDPSYKSANFLQHLLHRHKFSYDTFVDYSIDEEAAFQAALALSLSEN

SEQ ID NO: 10639 - DNA, 2535 bp, Homo sapiens
cagctgagaagctgctcagcaccagcccctgggtgggcgcagacaggaacttcctgtgggggaagcgggcactactcccggctgctggctctctgaacaccaggctggcagtcactggaaactaggccgatagagcacccaccctgtgggtgcctcgttctgcctcctgctcctcgggcccagccgccctgccagtcgggctgggttccctcttgtgtctttcctgagtccttccggggaggacgaggctgtcttcctcccagccaaccttctgggcacctttcctctcttcccaagctctgcctgggacccttttccttcccctcagcccgtggccgtgctgtgcagccgagccccggcctggtctctggcagctcagggttcactcaggaggtgcaccatccagtcgtttccagtgtgtttgcaattatgcaacaatcgatgcaattctagaagattcttcccactccagaaagaaacccaggactctccccctcgcctggcacccacccgtctgctttctggtcactgggtttctctctgctggacgttgagcgtgagtggacccccacgacacgggtgggacgtgcttgctgtctgccctgcactgttttccaggccttccggtgcgtggtggggctgcacgcctcttcccggccgaacgccctttccatgggtgtgcacgccacgccgtctcttcatccgtttaccgacgggcacctgagctgcttccgcttctcctgccatgagtgcctgagtatgggggtcccctgaggcctccccaggtggaccatcttgccagcaccttcctcccgtgaacgggtgaagtaggcggcccccccggctcaaatccaggggtcagtgccagggatgaccctggaaatatctgctggggcgcctggttctgcggggagtgtctccagccctgcctgcaggtgccatccccgctgtgcccactctgccgcctgcccttcgaccccaagaaggtggacaaggccacccacgtggagaagcagctctcatcctacaaagcgccctgtcgaggctgcaacaaaaaggtgaccctggcaaagatgagagtgcacatttcgtcctgcctgaaggtccaggagcagatggccaactgccccaagttcgtccccgtggtgcccacatcacagcctatccccagcaacatccccaacaggtccaccttcgcctgcccgtactgtggtgcccgcaacctggaccagcaggagctggtgaagcactgtgtggaaagccaccgcagcgaccccaaccgcgtggtgtgccccatctgctcggcaatgccctggggggaccccagctacaagagcgccaacttcctgcagcacctgcttcaccgacacaagttctcctacgacacctttgtggactacagtattgacgaggaggccgccttccaggctgctctggccctgtctctctctgagaactgaagggaagcgcagccacccgcctgcgtctggggtcagggatgtccccgctcctgtgtcgcacctggcacctgctcgggagcgcacctcaccggactgagctcacaggaggagcctgcacccgcgcagaaggggagccggggccgagcctccgggcctgaatacgggccagccgccgaggccgccagagcagggccgcctggtcccaccggcgtcgctgggttcttcggtgcttctggccgagcaggcggcctacttgggcagggctggacgctgggacctggagctgccgccgtctcttcaaagccatgataccccctcgtgggaagaagggaccgacgcgcgagtcgcgctccgcagtcgagccgggaggaacccaggctgctgccctgcccagcccgaccctgccccggccccacttccaccttgcgcatttggtactggcttttgtgatacttaggaaccctggcatcttttctatattatccagtgtgataatcttttcacgttttatagagcaaagacagagcagttactcttcatattgcaatatctgtgtttgactaggaataatagtatttttatggaacatttacaaaattatattttttaagaaaacaatcaaaacaagcattgggggattggggcaaggatggaaggagcagtggggcagctgccagagctcaggcgagccatggggtctgctgtggggtctgccctggccacccactgtgtgtctgggtccttgaggtttgtacgtttctctttgatgaccaggaagaaatcccagcaccccagccacaggctgtggctgctcccagcagaggcggggccggcagagaaggggcctcctccacccagagtcctggccttggcccgctgtcaccttcaaagctgactgtgccccgctgcgggaggggacggcaccccagtggtggcagagcttgggggcctgggcaggggcccgcttggcgggccgggcaacacgtcaacattcttttctgttcttggcattaattattgctgtcttttttttaaaaaaaaaagtttaaataaaatgtctcagagcatctctagc

SEQ ID NO: 10640 - protein, 128 aa, Homo sapiens; identical to SEQ ID NO: 10638

SEQ ID NO: 10641 - DNA, 1874 bp, Homo sapiens
tcagcgcggcgcagtagcggctgtgactagcgggccggcccgggccaggacagcgggcggcgggcggcgcgggcctggccccgggatggctatgttccgcagcctggtggcctcggctcagcagcggcagccgccggccgggccggcgggcggcgacagcggcctggaggcgcagtacacctgccccatctgcctggaggtctatcaccggcccgtggccatcggcagctgcggccacacgttctgcggggagtgtctccagccctgcctgcaggtgccatccccgctgtgcccactctgccgcctgcccttcgaccccaagaaggtggacaaggccacccacgtggagaagcagctctcatcctacaaagcgccctgtcgaggctgcaacaaaaaggtgaccctggcaaagatgagagtgcacatttcgtcctgcctgaaggtccaggagcagatggccaactgccccaagttcgtccccgtggtgcccacatcacagcctatccccagcaacatccccaacaggtccaccttcgcctgcccgtactgtggtgcccgcaacctggaccagcaggagctggtgaagcactgtgtggaaagccaccgcagcgaccccaaccgcgtggtgtgccccatctgctcggcaatgccctggggggaccccagctacaagagcgccaacttcctgcagcacctgcttcaccgacacaagttctcctacgacacctttgtggactacagtattgacgaggaggccgccttccaggctgctctggccctgtctctctctgagaactgaagggaagcgcagccacccgcctgcgtctggggtcagggatgtccccgctcctgtgtcgcacctggcacctgctcgggagcgcacctcaccggactgagctcacaggaggagcctgcacccgcgcagaaggggagccggggccgagcctccgggcctgaatacgggccagccgccgaggccgccagagcagggccgcctggtcccaccggcgtcgctgggttcttcggtgcttctggccgagcaggcggcctacttgggcagggctggacgctgggacctggagctgccgccgtctcttcaaagccatgataccccctcgtgggaagaagggaccgacgcgcgagtcgcgctccgcagtcgagccgggaggaacccaggctgctgccctgcccagcccgaccctgccccggccccacttccaccttgcgcatttggtactggcttttgtgatacttaggaaccctggcatcttttctatattatccagtgtgataatcttttcacgttttatagagcaaagacagagcagttactcttcatattgcaatatctgtgtttgactaggaataatagtatttttatggaacatttacaaaattatattttttaagaaaacaatcaaaacaagcattgggggattggggcaaggatggaaggagcagtggggcagctgccagagctcaggcgagccatggggtctgctgtggggtctgccctggccacccactgtgtgtctgggtccttgaggtttgtacgtttctctttgatgaccaggaagaaatcccagcaccccagccacaggctgtggctgctcccagcagaggcggggccggcagagaaggggcctcctccacccagagtcctggccttggcccgctgtcaccttcaaagctgactgtgccccgctgcgggaggggacggcaccccagtggtggcagagcttgggggcctgggcaggggcccgcttggcgggccgggcaacacgtcaacattcttttctgttcttggcattaattattgctgtcttttttttaaaaaaaaaagtttaaataaaatgtctcagagcatctctagc

SEQ ID NO: 10642 - protein, 237 aa, Homo sapiens; identical to SEQ ID NO: 1718

SEQ ID NO: 10643 - DNA, 634 bp, Homo sapiens
gcggctgtgactagcgggccggcccgggccaggacagcgggcggcgggcggcgcgggcctggccccgggatggctatgttccgcagcctggtggcctcggctcagcagcggcagccgccggccgggccggcgggcggcgacagcggcctggaggcgcagtacacctgccccatctgcctggaggtctatcaccggcccgtggccatcggcagctgcggccacacgttctgcggggagtgtctccagccctgcctgcaggtgccatccccgctgtgcccactctgccgcctgcccttcgaccccaagaaggtggacaaggccacccacgtggagaagcagctctcatcctacaaagcgccctgtcgaggctgcaacaaaaaggtgaccctggcaaagatgagagtgcacatttcgtcctgcctgaaggtccaggagcagatggccaactgccccaagttcgtccccgtggtgcccacatcacagcctatccccagtggtggcagagcttgggggcctgggcaggggcccgcttggcgggccgggcaacacgtcaacattcttttctgttcttggcattaattattgctgtcttttttttaaaaaaaaaagtttaaataaaatgtctcagagcatc

SEQ ID NO: 10644 - protein, 169 aa, Homo sapiens
MAMFRSLVASAQQRQPPAGPAGGDSGLEAQYTCPICLEVYHRPVAIGSCGHTFCGECLQPCLQVPSPLCPLCRLPFDPKKVDKATHVEKQLSSYKAPCRGCNKKVTLAKMRVHISSCLKVQEQMANCPKFVPVVPTSQPIPSGGRAWGPGQGPAWRAGQHVNILFCSWH

SEQ ID NO: 10645 - DNA, 213 bp, Homo sapiens
tgctctgagacattttatttaaacttttttttttaaaaaaaagacagcaataattaatgccaagaacagaaaagaatgttgacgtgttgcccggcccgccaagcgggcccctgcccaggcccccaagctctgccaccactggggtgctgcaggaagttggcgctcttgtagctggggtccccccagggcattgccgagcagatggggcacacc

SEQ ID NO: 10646 - protein, 51 aa, Homo sapiens
MPRTEKNVDVLPGPPSGPLPRPPSSATTGVLQEVGALVAGVPPGHCRADGA

SEQ ID NO: 10647 - DNA, 927 bp, Homo sapiens
ccgccttccaggctgctctggccctgtctctctctgagaactgaagggaagcgcagccacccgcctgcgtctggggtcagggatgtccccgctcctgtgtcgcacctggcacctgctcgggagcgcacctcaccggactgagctcacaggaggagcctgcacccgcgcagaaggggagccggggccgagcctccgggcctgaatacgggccagccgccgaggccgccagagcagggccgcctggtcccaccggcgtcgctgggttcttcggtgcttctggccgagcaggcggcctacttgggcagggctggacgctgggacctggagctgccgccgtctcttcaaagccatgataccccctcgtgggaagaagggaccgacgcgcgagtcgcgctccgcagtcgagccgggaggaacccaggctgctgccctgcccagcccgaccctgccccggccccacttccaccttgcgcatttggtactggcttttgtgatacttaggaaccctggcatcttttctatattatccagtgtgataatcttttcacgttttatagagcaaagacagagcagttactcttcatattgcaatatctgtgtttgactaggaataatagtatttttatggaacatttacaaaattatattttttaagaaaacaatcaaaacaagcattgggggattggggcaaggatggaaggagggcctcctccacccagagtcctggccttggcccgctgtcaccttcaaagctgactgtgccccgctgcgggaggggacggcaccccagtggtggcagagcttgggggcctgggcaggggcccgcttggcgggccgggcaacacgtcaacattcttttctgttcttggcattaattattgctgtcttttttttaaaaaaaaaagtttaaataaaatgtctcagagc

SEQ ID NO: 10648 - protein, 84 aa, Homo sapiens
MIPPRGKKGPTRESRSAVEPGGTQAAALPSPTLPRPHFHLAHLVLAFVILRNPGIFSILSSVIIFSRFIEQRQSSYSSYCNICV
